United States Patent Application Publication US 2010/0120627 A1 - sequence listing, part 6

SEQ ID NO: 10480 - protein, 894 aa, Homo sapiens
MILLAVLFLCFISSYSASVKGHTTGLSLNNDRLYKLTYSTEVLLDRGKGKLQDSVGYRISSNVDVALLWRNPDGDDDQLIQITMKDVNVENVNQQRGEKSIFKGKSPSKIMGKENLEALQRPTLLHLIHGKVKEFYSYQNEAVAIENIKRGLASLFQTQLSSGTTNEVDISGNCKVTYQAHQDKVIKIKALDSCKIARSGFTTPNQVLGVSSKATSVTTYKIEDSFVIAVLAEETHNFGLNFLQTIKGKIVSKQKLELKTTEAGPRLMSGKQAAAIIKAVDSKYTAIPIVGQVFQSHCKGCPSLSELWRSTRKYLQPDNLSKAEAVRNFLAFIQHLRTAKKEEILQILKMENKEVLPQLVDAVTSAQTSDSLEAILDFLDFKSDSSIILQERFLYACGFASHPNEELLRALISKFKGSIGSSDIRETVMIITGTLVRKLCQNEGCKLKAVVEAKKLILGGLEKAEKKEDTRMYLLALKNALLPEGIPSLLKYAEAGEGPISHLATTALQRYDLPFITDEVKKTLNRIYHQNRKVHEKTVRTAAAAIILNNNPSYMDVKNILLSIGELPQEMNKYMLAIVQDILRFEMPASKIVRRVLKEMVAHNYDRFSRSGSSSAYTGYIERSPRSASTYSLDILYSGSGILRRSNLNIFQYIGKAGLHGSQVVIEAQGLEALIAATPDEGEENLDSYAGMSAILFDVQLRPVTFFNGYSDLMSKMLSASGDPISVVKGLILLIDHSQELQLQSGLKANIEVQGGLAIDISGAMEFSLWYRESKTRVKNRVTVVITTDITVDSSFVKAGLETSTETEAGLEFISTVQFSQYPFLVCMQMDKDEAPFRQFEKKYERLSTGRGYVSQKRKESVLAGCEFPLHQENSEMCKVVFAPQPDSTSSGWF

SEQ ID NO: 10481 - DNA, 8192 bp, Homo sapiens
atggggcatgccagtgggtcacatttcctctctgaatctccctccaagccgcactgtactcttgaagggaaagggacaaggcttcacaagaaacagcacatgctttcctttcatttctggaagtcccggggtcaacctacagatgctgcttcttccgtggccgatggcattcagactcctcgctgctgccgacggtgccaggcaaacaactggacaggacagctcagctacagaacactggccacagtctcggccggagcagcagccccccagccacagaccacctccaccgcctcatccaggagccttcccacctccctcaggcttgctgcggccccgccacaggggctgaagaactgggaggtggtggcagcagtggcagcagtgcctacagccttggggccagtccagatacgtgggaccctgcttcgggcaactctgcagcccctccggggccagagacggacccaagacttccccagcgatcaccattgtctcttcctgtcgctgaaacctgggcaagggctcataatggaagctgcccctcctgagctgaattcgaaagcaagacaggcggaggtgggggacggggtgagcagtgctcaagacagccaggagctcaagcagcagctgtggccacttcccaagccttcagcctcctcccagcgagaagcgaaatatgtggacatgtgtgcttcagctgaagtccagagggagagtccccagaccatgaaacttaccctggggcactgccctgggggtcagagggcctctaggagcccaaaggagaaagcccaagatgaacccagcagcaagactccaagcccccagaacaatcctgcctcctcccaactctctagatcccagcactctgcctctgaagagggtggcaatttctcatcttcctcatcctcctccccgatgaacaaagcagaagaggatggcctttccaaaatggaggactccaccacatccacaggggctctggccacctcctcttcatccttaggcttcgagagtgagagtggtgaaagtgaaggttgccaggccggcagcagggacccccccaaagtcgaagaggctcactacatcaccacccatgagatccagctgagtgaggtggaacaggacatggatttcgacgtgggactggcctcccgctgggatttcgaggacaacaacgtgatctactcgttcgtggattatgcttcctttggtggcagcgacgagaccccaggggacatcaccagtctgaccgaagaggacgacgacaacagctgctacctcagcaccactcccagcaccaacaccacccggacgcccagccctacaagcagcgacctggcccgccccaatgcaggccgcagtggccgcgacaccagcagcaccgaagtgggcagtggcccctctgacagtggccccactcccccacccactgggcctggcactgcccccctgactgagcccttgcctgagaccccggaggcagcttcaggggcagcagccgccgccgcaagcagctgtgggagtgcagcaagccagatcctcctatcaatcaaaccggcttcccgggctataaatgagcctagcaacgtgcgtgcaaagcaaaacattatttatgctgccaagcatgaaggcgacatgagcctccgcgtctctacagctgctgaacacaattcaagttcgctgaagcaaaacccggctgcagcagtggctcaggaccatgcaaagaaattcattgctgtacctgctcgcctgcaaaccaggtgcggggccatccgggcgaaggagctggtggactactccagcggagcctccagtgccgtgagcgaactggacgatgcggacaaagaggtgcgtaacctgacctcccgggccttccggagcctggcttacccctactttgaggctctgaacatcagctcccgggagtcctccaccacgctctccgaagtgggctttgggcgctggtcaactttcctggacttaaaatgtgggggtgttggggccagggtggagcagagcctcctcaggagcagcgcggcctctgtggctgcaggtctgaggaagggcagtggggcccgggccactgccgaccagctctacatccagtccaagaagtctcagaccaaggccttggagttcgtggtcagcaaagtcgagggggaaatcaaacatgtggagacgcccctgtgtttccagaagcaggtccagacgggctcccgcgtcgtcacccttttggagcccctgaatgtacgcagtgagagcaaagccagctcggcccctgggcccggcagggccaccaaaggccccggcaagggtcccgggtcggcatacacggacgacggctccgagacctccgagggcagcaagcccacctcccgcgccgatggcccccagaagtccaagttcgcctccagtctgctcaaaaatgtcatttccaagaagatgcagcgggaacacgagttcaaaatggagaggggagaagtcatggatacatcccaccacctctcaggcacctccaaggagacggagggcgcccgcgggagcgagaggcagcgagagaggggcctgcagaggcagagctctcgtcactccgaggccggctccgagtacacagtggtcagcatgtccgacgcgggcggggaggggtccgtggcgggctccaaatctccagtcttcaaagccagtactcctcgcgagcgcaacgcaggccctggccggaatttcaccgatggacacacagaagtgtgtgaaattaaaaagagtgcctcagagaccgtcaagggcatcttcctccgtagtcagaacagtgcgttccggtcatggaaggagaaagaggccgagaagagggaggaacaagcccctatagggaagctgaagctgcccaaaggaggcgactggcgggctgatctcggggagatttctgccagcaagaacaccatcatgtctcgcctctttgtccccaacatccagcagacacccaaggacaagcagccgaggaagcaggccaccaagtaccctgctgctcaggccacctccacagcggtgatcagacccaaggctcccgaaatcaagatccggctggggagtgtgcagcagccgagctcagacttcaacattgccaagttgctcacgcccaagctggccggtggcagcgcctctaacctgttcaagaccatcgaggacaacagcagggcacagcagaaactcttccgcggggacaacctagaaaaagtgccccatttccaggtgagagacatcagagacaagtccaaggctcaaggccccctccaccaggtgagagatgtcaggaaactaattaaagggtcaggggatagtagtgacaagggcagtgttaccccagagcaggggctgactggacccaaacccaggcagctgtctgcagcagctggcggatctggatccctgtcccccatggtgattacatgccaggctgtagtgaaccagagggaagacagcatggaccgagagcccagggaaagcatgggcaaagggggcggcagcagagtcttgaattcttcctccccagaagggacagtcttggttcacagggcatctggcaggctgcctgtggctaccattgcccccaataagcccgagcagggctcatacctgcctgtgctcaagattgtctccaaggcttccacccagaagaccccagagaagctcaaggaggaggaggtcaaggaggaagggaaagccacgaagccagcccggaatgccctggagaagctgactgcagccgtgaggtccatggaagagctgtacagcttcaacaggaacgagtggaagcgcaaaagcgaccccttgcctatgatgatggacagccacgtgctgtcgctcattgccagtgaggagagggaaggggtagtggttgctgatggagaccacgacaagctgtccaaacggctgggtgaggtggaagagcggggcacaggaaacaaagctggtgtggtcctgcgaggggcccccatagaacgtctgcagcggagaaactccaaccccagcgctgagagtgtgtctgccagggcagcggcctttgagaacctggccagggaaagaccccgatctctctatattcccccagtccacaaggatgtagagagaacccaacccctgcagcccctcccaccactccccagcaaccggaacgtgttcacagtgagtgccagcagcatccagaaaactgggggtgtcgctggcaagttcccacaagggccttctccggagagtccttcagcagctaagggcatcaagtcgcagggactccggtccctcaagatctctccagccacccgggcacctcctgatgaggtgaccaacaggaaaagtggcagcaatttggagaagagcaacagtgactgtgagaattacctgaccatccctcttaaaggaagctctgctgcaggggagcttcttagcaggcctggggcttccagggaggggccccccaactcctcagctgccactctctgtagtttacccccgctgagtgcccgcagtcaggtccccagtagctccaaaggctctcaggttagtggaaccagccgaccagcttggcgtaccaaacctgacaacccccgggagacagtagctgcccccccagggccacagagccccgagcatccccccaccaccatctaccaccagccgccgctgcccttcaccctacagggggcccagcctcaggtcctctgcttctccccacccagcatgcctgccccagcacctgcagcctcagctcccgtccccacagaccccttccagcaggcacagcctcaacagacccagcgtaagatgctcctggatgtgacaacaggccagtactatctggtggacacaccagtacagcccatgacccggagactgtttgaccctgagacagggcagtatgtggatgtgcccatgacctcccagcagcaggctgtggctcccatgtccatctctgtgcctcccttggccctgagtcctggggcttatggacccacctacatgatttaccctgggtttctgcctaccgtgctgcccaccaatgctctgcagcccacaccaattgctcgcgctccaagaggaagtgagctctccccaatggtggcagaaccttccagcaaagaggcagctgcaacgttcaccgaggccccatacttcatggcttctggtcagtctccggcctcctcaacctcctcagccccagcagccacatcccagctcctaggggccaaggcctttgcccagctgcatggcaagcctgtcatcagcattacttcgcagcccctggggccacggatcattgctcccccttcctttgatggcaccaccatgagctttgtggtagaacacagatgatgagcagccaccaggaagcggaatgaaaaactgctggagcaagacaaaaagatggactattcttctttaatctggaatttgcattgtaatagcactaagaattatttcatctgaaaaacttcttccacatgtgttattcttaatttttgcttcttataagctaagtgtgtaagtttctatatttttctgaacaatcctcttaaggcagtttttattttaattttattaagttgattgaatggttgcattttttccctttatgactatttctttttatacttcaacacaggatataagctttctattcacctccttcccccctgtacttgtgactagacaaacaattcctttgttcccattgttcagtcaaaacataccacagaatgggattgattctgttgtaaaccaagctagtaaatgagtaatttggatcacgaatctccttatagtttcttggaatatatcaagactagctggctgagttgtaatacgtatttaagttttcactatgatggtctgctctttgaatcatatatcagccaaacctacccattctcttggttatgctctatatgttcttttattaggtttggcatgatttcaaatgtgattgtgaaaaatggtggttgtaatgtttgtgctttattttatttttcccatttgtacaatgccacgacactatttgttgccttaaaatagaatggcttgaaatactggaaagccaatgattgcatctaaaattaagtacttagtctcagaaaggtataaaatatctattttcctttaagaatccaattatttttgtgggtgcataacatttttcttttcttcaataattccctccatagttgcatactcgtgtctctcatggattgtttagagtctaaagagtgacccatttggggcagtagagtagaatatggcactaattcagtggctctgattcactccagccctagcctcgctatcccaataacagtaacctagagttacagcacttgctccttatgaggatgaggcaggtttgaagagatgtcaagaatccaaatcacagaatcttttattgacatttagtactgtctcagttgtaacccaattctgaaggctatttgagtgagtgttcacagggagtcttgaagactggaagacttgattgaacagataaatatttagcttgtcataataagtgtatcgatatatacttggcaaatgttacattgaaatattacttaattactttttaaaggaataatttgaaggttttcccaggatttttttttaagaatctccttttatttaccaatttgtttaaagataaagcattctggtaattttttaaacaccctaatattattttaaacctcagcaatatttgatttctgcttaaattttcttcataagccacagaattttatgctactcatgacaaaaagtgtgagtaaaaaactaggagactgagttttgtatgatttatataatctttttactttgtagttatgcttcccatctcagactcttaaaaaagacttaatttcactttcagggccttcctttaagggatcttactctgaaaaaaagttctcttgggtatagggaaaggtttgaggcgggaatagtcagctctgatcacgattcaattgcttgttgtgctgatgagctatgaaatgaagctatagactttatgagacatgaaatatgaaacatagtctctgtgtataaaaaagatgcccttgtgccaaattcaagaaaaagatatttctttatcatagaggtcttcttacccaggcacatcaatcaattccccccagaacttaaagtaagttttatccactggggaacaaatcttatggcatcagagcttcctcgttttcaggagagattggctgggtataaggtaacttaatattgacccaagaaagtagaatccctttcagaaatcttacacttattttactgaaagcagcaccaagaaacctccagtatttgaatacacctggtgaaacctatataggatttgggtggatagtaccaaaattgttaagactggtttaaagccaaatgcgactttcaggaaaaaccagtggccatgttgagtagtgactgctcaccaactcttccaaaagagagacaactccttctctagaaaatgtggtagagttgagggcttgggacccctaatctatgtatcagtgtttctcaccagcagatttgagttttaaattctcacactgaggtaaattaggacacaaactaaggaaagaaagaaaaagcttttcatttgtttgttctatacaagaggcttcaccttttaggaagttgccaaggacacagtgatgtccaagtggctaaaaacgcaacttttaaataatgttctattaatatcatgtcatctatcgataattttatggttctctatttcaccaaatcatacaaagctgctaggccattcactacctccagtgatagggaaaaaatattttcacgggcatgaggtaaatctcaatcttgatttttattgttttgtcatttcttgaggttgcatgaatatttgaatgaagtgatatacccttccttttatagctcaaggggaatcaaacaagagcctatgaagccttctgacccataaaactattaccctaataatgtccctttagttactgaacttcccttttattttttattactataaaaccattagtaaaacatttcctaaatagtgccttgaacttgaatctaatcagaattgcagagtctggcttttataatatcctcttagggttatatgtgtggcttagttttccagaagatccactttttacttg

SEQ ID NO: 10482 - protein, 1789 aa, Homo sapiens
MGHASGSHFLSESPSKPHCTLEGKGTRLHKKQHMLSFHFWKSRGQPTDAASSVADGIQTPRCCRRCQANNWTGQLSYRTLATVSAGAAAPQPQTTSTASSRSLPTSLRLAAAPPQGLKNWEVVAAVAAVPTALGPVQIRGTLLRATLQPLRGQRRTQDFPSDHHCLFLSLKPGQGLIMEAAPPELNSKARQAEVGDGVSSAQDSQELKQQLWPLPKPSASSQREAKYVDMCASAEVQRESPQTMKLTLGHCPGGQRASRSPKEKAQDEPSSKTPSPQNNPASSQLSRSQHSASEEGGNFSSSSSSSPMNKAEEDGLSKMEDSTTSTGALATSSSSLGFESESGESEGCQAGSRDPPKVEEAHYITTHEIQLSEVEQDMDFDVGLASRWDFEDNNVIYSFVDYASFGGSDETPGDITSLTEEDDDNSCYLSTTPSTNTTRTPSPTSSDLARPNAGRSGRDTSSTEVGSGPSDSGPTPPPTGPGTAPLTEPLPETPEAASGAAAAAASSCGSAASQILLSIKPASRAINEPSNVRAKQNIIYAAKHEGDMSLRVSTAAEHNSSSLKQNPAAAVAQDHAKKFIAVPARLQTRCGAIRAKELVDYSSGASSAVSELDDADKEVRNLTSRAFRSLAYPYFEALNISSRESSTTLSEVGFGRWSTFLDLKCGGVGARVEQSLLRSSAASVAAGLRKGSGARATADQLYIQSKKSQTKALEFVVSKVEGEIKHVETPLCFQKQVQTGSRVVTLLEPLNVRSESKASSAPGPGRATKGPGKGPGSAYTDDGSETSEGSKPTSRADGPQKSKFASSLLKNVISKKMQREHEFKMERGEVMDTSHHLSGTSKETEGARGSERQRERGLQRQSSRHSEAGSEYTVVSMSDAGGEGSVAGSKSPVFKASTPRERNAGPGRNFTDGHTEVCEIKKSASETVKGIFLRSQNSAFRSWKEKEAEKREEQAPIGKLKLPKGGDWRADLGEISASKNTIMSRLFVPNIQQTPKDKQPRKQATKYPAAQATSTAVIRPKAPEIKIRLGSVQQPSSDFNIAKLLTPKLAGGSASNLFKTIEDNSRAQQKLFRGDNLEKVPHFQVRDIRDKSKAQGPLHQVRDVRKLIKGSGDSSDKGSVTPEQGLTGPKPRQLSAAAGGSGSLSPMVITCQAVVNQREDSMDREPRESMGKGGGSRVLNSSSPEGTVLVHRASGRLPVATIAPNKPEQGSYLPVLKIVSKASTQKTPEKLKEEEVKEEGKATKPARNALEKLTAAVRSMEELYSFNRNEWKRKSDPLPMMMDSHVLSLIASEEREGVVVADGDHDKLSKRLGEVEERGTGNKAGVVLRGAPIERLQRRNSNPSAESVSARAAAFENLARERPRSLYIPPVHKDVERTQPLQPLPPLPSNRNVFTVSASSIQKTGGVAGKFPQGPSPESPSAAKGIKSQGLRSLKISPATRAPPDEVTNRKSGSNLEKSNSDCENYLTIPLKGSSAAGELLSRPGASREGPPNSSAATLCSLPPLSARSQVPSSSKGSQVSGTSRPAWRTKPDNPRETVAAPPGPQSPEHPPTTIYHQPPLPFTLQGAQPQVLCFSPPSMPAPAPAASAPVPTDPFQQAQPQQTQRKMLLDVTTGQYYLVDTPVQPMTRRLFDPETGQYVDVPMTSQQQAVAPMSISVPPLALSPGAYGPTYMIYPGFLPTVLPTNALQPTPIARAPRGSELSPMVAEPSSKEAAATFTEAPYFMASGQSPASSTSSAPAATSQLLGAKAFAQLHGKPVISITSQPLGPRIIAPPSFDGTTMSFVVEHR

SEQ ID NO: 10483 - DNA, 624 bp, Homo sapiens
gccatagcaggctgctgtctcacagagcgagaaggtgtcaggagcagcccagttgtgtctctctctctacctctgtgaagggcgcgaatgggcagagcagaacttctagaagggaagatgagcacccaggatccctcagatctgtggagcagatccgatggagaggctgagctgctccaggacttggggtggtatcacggcaacctcacacgccatgctgctgaagctcttctcctctcaaatggatgtgacggcagctaccttctgagggacagcaatgagaccaccgggctgtactctctctctgtgagggccaaagattctgttaaacactttcatgttgaatatactggatattcatttaaatttggctttaatgaattctcatctttgaaggattttgtcaagcattttgcaaatcagcctttgattggaagcgagacaggcactctgatggttctaaaacatccctacccaagaaaagtggaagaaccctccatttatgaatctgtccgggttcacacagcaatgcagacaggaagaacagaagatgaccttgtgcccacagcaccttctctgggcaccaaagaaggttacctcaccaaacagggaggcctggtcaag

SEQ ID NO: 10484 - protein, 178 aa, Homo sapiens
MGRAELLEGKMSTQDPSDLWSRSDGEAELLQDLGWYHGNLTRHAAEALLLSNGCDGSYLLRDSNETTGLYSLSVRAKDSVKHFHVEYTGYSFKFGFNEFSSLKDFVKHFANQPLIGSETGTLMVLKHPYPRKVEEPSIYESVRVHTAMQTGRTEDDLVPTAPSLGTKEGYLTKQGGLV

SEQ ID NO: 10485 - DNA, 1446 bp, Homo sapiens
gccatagcaggctgctgtctcacagagcgagaaggtgtcaggagcagcccagttgtgtctctctctctacctctgtgaagggcgcgaatgggcagagcagaacttctagaagggaagatgagcacccaggatccctcagatctgtggagcagatccgatggagaggctgagctgctccaggacttggggtggtatcacggcaacctcacacgccatgctgctgaagctcttctcctctcaaatggatgtgacggcagctaccttctgagggacagcaatgagaccaccgggctgtactctctctctgtgagggccaaagattctgttaaacactttcatgttgaatatactggatattcatttaaatttggctttaatgaattctcatctttgaaggattttgtcaagcattttgcaaatcagcctttgattggaagcgagacaggcactctgatggttctaaaacatccctacccaagaaaagtggaagaaccctccatttatgaatctgtccgggttcacacagcaatgcagacaggaagaacagaagatgaccttgtgcccacagcaccttctctgggcaccaaagaaggttacctcaccaaacagggaggcctggtcaagacctggaaaacaagatggtttactctgcacaggaatgaactgaaatacttcaaagaccagatgtcaccagaaccaattcggatcctagacctaacagaatgttcagctgtacaattcgattattcacaagaaagggtaaactgtttttgtttggtatttccattcaggacattttatctctgtgcaaagaccggagtagaagctgatgagtggatcaagatattacgctggaaattgtcacaaataagaaaacagctcaaccaaggggaaggcacgatccgatctcggtcgttcatctttaaatagatctttcttgccaaggaatgctctggcccaggagcaaggtggaatgtttccctgacgctgtgatctgcagcaggcttcaaatgaaaaccgactaaggattttctttcaaaaacaaatcagaagcagatgctgattgggacccatataccacgttgctgactcacgttgctgcccttccatgatgttgccatctccttgagaacactgaagcaatcaccattctgatagaaagtgcttaaaccaccactcttaggtctgctcactcttagaacacacaatggaagaggaagggtttttgttttcactcattgtggtccccaagcctattgacactagttgcctagagtcccactgtgagtcatggtcagcctgtctgacatccaggttgtgctattaaccaagaaggaaacagatacttggaggcttagatgacttctgcaggatttatattcagatagaaaacatcaaatattttcaggggagaggtttttttttttaatttttccccctttatac

SEQ ID NO: 10486 - protein, 280 aa, Homo sapiens
MGRAELLEGKMSTQDPSDLWSRSDGEAELLQDLGWYHGNLTRHAAEALLLSNGCDGSYLLRDSNETTGLYSLSVRAKDSVKHFHVEYTGYSFKFGFNEFSSLKDFVKHFANQPLIGSETGTLMVLKHPYPRKVEEPSIYESVRVHTAMQTGRTEDDLVPTAPSLGTKEGYLTKQGGLVKTWKTRWFTLHRNELKYFKDQMSPEPIRILDLTECSAVQFDYSQERVNCFCLVFPFRTFYLCAKTGVEADEWIKILRWKLSQIRKQLNQGEGTIRSRSFIFK

SEQ ID NO: 10487 - DNA, 2355 bp, Homo sapiens
gccatagcaggctgctgtctcacagagcgagaaggtgtcaggagcagcccagttgtgtctctctctctacctctgtgaagggcgcgaatgggcagagcagaacttctagaagggaagatgagcacccaggatccctcagatctgtggagcagatccgatggagaggctgagctgctccaggacttggggtggtatcacggcaacctcacacgccatgctgctgaagctcttctcctctcaaatggatgtgacggcagctaccttctgagggacagcaatgagaccaccgggctgtactctctctctgtgagggccaaagattctgttaaacactttcatgttgaatatactggatattcatttaaatttggctttaatgaattctcatctttgaaggattttgtcaagcattttgcaaatcagcctttgattggaagcgagacaggcactctgatggttctaaaacatccctacccaagaaaagtggaagaaccctccatttatgaatctgtccgggttcacacagcaatgcagacaggaagaacagaagatgaccttgtgcccacagcaccttctctgggcaccaaagaaggttacctcaccaaacagggaggcctggtcaagacctggaaaacaagatggtttactctgcacaggaatgaactgaaatacttcaaagaccagatgtcaccagaaccaattcggatcctagacctaacagaatgttcagctgtacaattcgattattcacaagaaagggtaaactgtttttgtttggtatttccattcaggacattttatctctgtgcaaagaccggagtagaagctgatgagtggatcaagatattacgctggaaattgtcacaaataagaaaacagctcaaccaaggggaaggcacgatccgatctcggtcgttcatctttaaatagatctttcttgccaaggaatgctctggcccaggagcaaggtggaatgtttccctgacgctgtgatctgcagcaggcttcaaatgaaaaccgactaaggattttctttcaaaaacaaatcagaagcagatgctgattgggacccatataccacgttgctgactcacgttgctgcccttccatgatgttgccatctccttgagaacactgaagcaatcaccattctgatagaaagtgcttaaaccaccactcttaggtctgctcactcttagaacacacaatggaagaggaagggtttttgttttcactcattgtggtccccaagcctattgacactagttgcctagagtcccactgtgagtcatggtcagcctgtctgacatccaggttgtgctattaaccaagaaggaaacagatacttggaggcttagatgacttctgcaggatttatattcagatagaaaacatcaaatattttcaggggagaggtttttttttttaatttttccccctttatacaaaaaaaaaagaacatttccaaaactaaaatagaaaatgcttgtggcatttattttctctttttaaaaggttcagaaatttggcaggtcctttgcttctaatgacaaaactgtgagagctagatgtcctatgggcaattaggtagtataataaaggtaaatgaaggtacaatttttaaaccattattttcaccctgttggggtaaatgttttaaagagtgagaaaacataaattgagaaagggtgataaagtaatagataacttttagtttaataataattattgttattatactactaataatagagcacttgtaagcactaagttatctttatccaacatttctccaaatggactgaaagaaacttttcaaggacagtgtattataacaatccctttcccagaattagttgtatagggttggcccaagagatgtaagaaaaatctcgcattgctccctaagcaccctgggccttattaaagagcaacttctatttccagtcgggggagtaacactaaagctacaagaaatatgtaataatgataggtaataatgtgttccaaagctttttcaaactagaataaggaggcaaatagaagaatgagatactgatgtccacagttcattggcagaatctaaccccttctgttatcttttttaatactatttttgtttagatagaagtttcaaagaagataaaaatgcttgaagagcctgagagtaaaaagattatgctgcaaagctatgatataaactgctcttgcagtccaaagggatacctgattaaagaagtttcttatttaaacatctcagacgcaaaaattacattaaatttttgtatatttcaacaacattttaaatgtattttgttatgtttgtattatataggataaagcaaatgtcaagtt

SEQ ID NO: 10488 - protein, 280 aa, Homo sapiens; identical to SEQ ID NO: 10486

SEQ ID NO: 10489 - DNA, 2994 bp, Homo sapiens
gccatagcaggctgctgtctcacagagcgagaaggtgtcaggagcagcccagttgtgtctctctctctacctctgtgaagggcgcgaatgggcagagcagaacttctagaagggaagatgagcacccaggatccctcagatctgtggagcagatccgatggagaggctgagctgctccaggacttggggtggtatcacggcaacctcacacgccatgctgctgaagctcttctcctctcaaatggatgtgacggcagctaccttctgagggacagcaatgagaccaccgggctgtactctctctctgtgagggccaaagattctgttaaacactttcatgttgaatatactggatattcatttaaatttggctttaatgaattctcatctttgaaggattttgtcaagcattttgcaaatcagcctttgattggaagcgagacaggcactctgatggttctaaaacatccctacccaagaaaagtggaagaaccctccatttatgaatctgtccgggttcacacagcaatgcagacaggaagaacagaagatgaccttgtgcccacagcaccttctctgggcaccaaagaaggttacctcaccaaacagggaggcctggtcaagacctggaaaacaagatggtttactctgcacaggaatgaactgaaatacttcaaagaccagatgtcaccagaaccaattcggatcctagacctaacagaatgttcagctgtacaattcgattattcacaagaaagggtaaactgtttttgtttggtatttccattcaggacattttatctctgtgcaaagaccggagtagaagctgatgagtggatcaagatattacgctggaaattggtcaaggacaaaagctgatttattttgtctgctctctgtatatctcccgaggagaagactgatcacaaataagaaaacagctcaaccaaggggaaggcacgatccgatctcggtcgttcatctttaaatagatctttcttgccaaggaatgctctggcccaggagcaaggtggaatgtttccctgacgctgtgatctgcagcaggcttcaaatgaaaaccgactaaggattttctttcaaaaacaaatcagaagcagatgctgattgggacccatataccacgttgctgactcacgttgctgcccttccatgatgttgccatctccttgagaacactgaagcaatcaccattctgatagaaagtgcttaaaccaccactcttaggtctgctcactcttagaacacacaatggaagaggaagggtttttgttttcactcattgtggtccccaagcctattgacactagttgcctagagtcccactgtgagtcatggtcagcctgtctgacatccaggttgtgctattaaccaagaaggaaacagatacttggaggcttagatgacttctgcaggatttatattcagatagaaaacatcaaatattttcaggggagaggtttttttttttaatttttccccctttatacaaaaaaaaaagaacatttccaaaactaaaatagaaaatgcttgtggcatttattttctctttttaaaaggttcagaaatttggcaggtcctttgcttctaatgacaaaactgtgagagctagatgtcctatgggcaattaggtagtataataaaggtaaatgaaggtacaatttttaaaccattattttcaccctgttggggtaaatgttttaaagagtgagaaaacataaattgagaaagggtgataaagtaatagataacttttagtttaataataattattgttattatactactaataatagagcacttgtaagcactaagttatctttatccaacatttctccaaatggactgaaagaaacttttcaaggacagtgtattataacaatccctttcccagaattagttgtatagggttggcccaagagatgtaagaaaaatctcgcattgctccctaagcaccctgggccttattaaagagcaacttctatttccagtcgggggagtaacactaaagctacaagaaatatgtaataatgataggtaataatgtgttccaaagctttttcaaactagaataaggaggcaaatagaagaatgagatactgatgtccacagttcattggcagaatctaaccccttctgttatcttttttaatactatttttgtttagatagaagtttcaaagaagataaaaatgcttgaagagcctgagagtaaaaagattatgctgcaaagctatgatataaactgctcttgcagtccaaagggatacctgattaaagaagtttcttatttaaacatctcagacgcaaaaattacattaaatttttgtatatttcaacaacattttaaatgtattttgttatgtttgtattatataggataaagcaaatgtcaagttaaaatgtattgtgttgtttgtaaagtaagaagttactggccaggagcggcggctcatgcctgtaatcccaggactttggtaggccaagacaagcagatcacttgaggtcaggagttcaacatcagcctggccaacatgatgaaaccttgtctttactaaaaatacaaaaattagctgggcatggtggcaggcgcctgtaatcccagctactcaggaggctgaggcaggagaattgcttgaacccgggaggtggaggttgcagtgaaccaagatcgcggcgctgcactctagcctgggtgacagagtcagactccgtcccaaaaaaacaaacaaacaaaacaaaacaaaaaaaaacagaagttacaaatgaatactcacggatatgtatagttttatgtttgttttcttagaaacaaatgtgtttctttgggtgggtaatattgtgttttactatgtttaccttttataaaacataacctgtttatttatattctttggctttgtttattaaaaagcatgattttgctgtgcatgtaccattttgctattaaaatttatttttaatatttgtaacttg

SEQ ID NO: 10490 - protein, 263 aa, Homo sapiens
MGRAELLEGKMSTQDPSDLWSRSDGEAELLQDLGWYHGNLTRHAAEALLLSNGCDGSYLLRDSNETTGLYSLSVRAKDSVKHFHVEYTGYSFKFGFNEFSSLKDFVKHFANQPLIGSETGTLMVLKHPYPRKVEEPSIYESVRVHTAMQTGRTEDDLVPTAPSLGTKEGYLTKQGGLVKTWKTRWFTLHRNELKYFKDQMSPEPIRILDLTECSAVQFDYSQERVNCFCLVFPFRTFYLCAKTGVEADEWIKILRWKLVKDKS

SEQ ID NO: 10491 - DNA, 2932 bp, Homo sapiens
gccatagcaggctgctgtctcacagagcgagaaggtgtcaggagcagcccagttgtgtctctctctctacctctgtgaagggcgcgaatgggcagagcagaacttctagaagggaagatgagcacccaggatccctcagatctgtggagcagatccgatggagaggctgagctgctccaggacttggggtggtatcacggcaacctcacacgccatgctgctgaagctcttctcctctcaaatggatgtgacggcagctaccttctgagggacagcaatgagaccaccgggctgtactctctctctgtgagggccaaagattctgttaaacactttcatgttgaatatactggatattcatttaaatttggctttaatgaattctcatctttgaaggattttgtcaagcattttgcaaatcagcctttgattggaagcgagacaggcactctgatggttctaaaacatccctacccaagaaaagtggaagaaccctccatttatgaatctgtccgggttcacacagcaatgcagacaggaagaacagaagatgaccttgtgcccacagcaccttctctgggcaccaaagaaggttacctcaccaaacagggaggcctggtcaagacctggaaaacaagatggtttactctgcacaggaatgaactgaaatacttcaaagaccagatgtcaccagaaccaattcggatcctagacctaacagaatgttcagctgtacaattcgattattcacaagaaagggtaaactgtttttgtttggtatttccattcaggacattttatctctgtgcaaagaccggagtagaagctgatgagtggatcaagatattacgctggaaattgtcacaaataagaaaacagctcaaccaaggggaaggcacgatccgatctcggtcgttcatctttaaatagatctttcttgccaaggaatgctctggcccaggagcaaggtggaatgtttccctgacgctgtgatctgcagcaggcttcaaatgaaaaccgactaaggattttctttcaaaaacaaatcagaagcagatgctgattgggacccatataccacgttgctgactcacgttgctgcccttccatgatgttgccatctccttgagaacactgaagcaatcaccattctgatagaaagtgcttaaaccaccactcttaggtctgctcactcttagaacacacaatggaagaggaagggtttttgttttcactcattgtggtccccaagcctattgacactagttgcctagagtcccactgtgagtcatggtcagcctgtctgacatccaggttgtgctattaaccaagaaggaaacagatacttggaggcttagatgacttctgcaggatttatattcagatagaaaacatcaaatattttcaggggagaggtttttttttttaatttttccccctttatacaaaaaaaaaagaacatttccaaaactaaaatagaaaatgcttgtggcatttattttctctttttaaaaggttcagaaatttggcaggtcctttgcttctaatgacaaaactgtgagagctagatgtcctatgggcaattaggtagtataataaaggtaaatgaaggtacaatttttaaaccattattttcaccctgttggggtaaatgttttaaagagtgagaaaacataaattgagaaagggtgataaagtaatagataacttttagtttaataataattattgttattatactactaataatagagcacttgtaagcactaagttatctttatccaacatttctccaaatggactgaaagaaacttttcaaggacagtgtattataacaatccctttcccagaattagttgtatagggttggcccaagagatgtaagaaaaatctcgcattgctccctaagcaccctgggccttattaaagagcaacttctatttccagtcgggggagtaacactaaagctacaagaaatatgtaataatgataggtaataatgtgttccaaagctttttcaaactagaataaggaggcaaatagaagaatgagatactgatgtccacagttcattggcagaatctaaccccttctgttatcttttttaatactatttttgtttagatagaagtttcaaagaagataaaaatgcttgaagagcctgagagtaaaaagattatgctgcaaagctatgatataaactgctcttgcagtccaaagggatacctgattaaagaagtttcttatttaaacatctcagacgcaaaaattacattaaatttttgtatatttcaacaacattttaaatgtattttgttatgtttgtattatataggataaagcaaatgtcaagttaaaatgtattgtgttgtttgtaaagtaagaagttactggccaggagcggcggctcatgcctgtaatcccaggactttggtaggccaagacaagcagatcacttgaggtcaggagttcaacatcagcctggccaacatgatgaaaccttgtctttactaaaaatacaaaaattagctgggcatggtggcaggcgcctgtaatcccagctactcaggaggctgaggcaggagaattgcttgaacccgggaggtggaggttgcagtgaaccaagatcgcggcgctgcactctagcctgggtgacagagtcagactccgtcccaaaaaaacaaacaaacaaaacaaaacaaaaaaaaacagaagttacaaatgaatactcacggatatgtatagttttatgtttgttttcttagaaacaaatgtgtttctttgggtgggtaatattgtgttttactatgtttaccttttataaaacataacctgtttatttatattctttggctttgtttattaaaaagcatgattttgctgtgcatgtaccattttgctattaaaatttatttttaatatttgtaacttg

SEQ ID NO: 10492 - protein, 280 aa, Homo sapiens; identical to SEQ ID NO: 10486

SEQ ID NO: 10493 - DNA, 406 bp, Homo sapiens
ttctgtctagtgtcctaggcttcacacctagcctatgcttgttgtcctgttttgatcctcttcaaaaggtggtttataatcaactgtaagactttgacagttgctctcaacattcttctaaatgaaggaaggaaaagaaagaaaggaagaaaggaagaaagaaagaaagaagaaagaaagaaagaaagaaaggaaggaagaaagaaagaaagaaagaggagcctggaaaatccagtttgtatgaccagggagaagaatggattagagcagccactagtcagtctcttccaagcaagaaggaccacccctgagctgttttccagctggacatgcctggacctgtattccactcctctctaaaatgcaccttatttttcttcattaaattctgttacttaacccttgc

SEQ ID NO: 10494 - protein, 40 aa, Homo sapiens
MKEGKERKEERKKERKKKERKKERKEERKKERGAWKIQFV

SEQ ID NO: 10495 - DNA, 1603 bp, Homo sapiens
atgttaaagctacgtagaagagcagagagccaagtgacctttgatagacaaaaatacattggaagagtgtgcattggactctataagggaaccactggcagtgcagaggacttgatttcctgggaatacgaccagcccccaacgaccccttgtccccactccggctgtcccttggcctgggtcctagggaaggaagccatgctggggcaccaggactacaagactgccatgctgtcggacatcaaagccctcattctcaagcacgaggccttcgagagctacctggctgcggcacaccagcaccgcgtggagcagatcgcagcctttgcccaggagctcaacgagctggattactatgactcccacaatgtccacacccggtgccagaagatctgggaccagtgggacgccctcggctctctgaccaacagtcgcagggaagccctggagaaaacagagaagcagctggaggccatagaccatctgcacctggagtatgccaagcgcgtggcccccttcaacaactggatggagagcgccatggaggacctccaggacatgttcatcatctacaccatcgaggacactgagggcctgatctcagcccacgaccagttcaagtccaccctgccggacgctgacagggagcacgaggccatcctggccatccacaaggaggcccagaggatcgctgagcgcaaccacatcaagctgtcaggcagcaacccctacaccaccgtcaccccacagatcatcaactccaagtgggggaaggtgcagcagctggtgccaaaacgggaccacgccctcctggaggagcagagcaaccagcagtccaacaagcacctgcgctgccagttcgccagccaggccaacgtcgtggggccctggatccagaccaagatggaggagatcgggctcatctccactgagatgaacgggaccctggaggaccagctgagccacctgaagcagtgtgaaaacagcatcgtggactacaagcctaacctggacctgctggagcagcagcaccagctcatccaggaggccctcatcttcgacaacaagcacaccatggagcacatccgcgtgggcagggagcagctgctcaccaccattgccccaaccatcatcgaggtggagaaccagatcctcacccgcgacgtcaaaggcatcagccaggagcagatgcagcagttccgggcgtccttcaaccacttcgacaaggatcatggtggggtgctggggcctgaggggttcaaggcctgcctcatcagcctgggctatgacgtggagaacgaccggcagggtgaggccgagttcaaccgcatcatgagcctggtcgaccccaaccatagcggccttgtgaccttccaagccttcatcgacttcatgtcgcaggagaccacccggacccaacaccccctatggcctccaggaggggccggggcagccccacagtcccgttcctccactctgtatctatgcaaagcactctctgctgtcctcccggactcacttgccattgccaggagatgggggccccaaccagcaccccgctttcgcagcagaggagctgagttggcagaccggacccccctga

SEQ ID NO: 10496 - protein, 533 aa, Homo sapiens
MLKLRRRAESQVTFDRQKYIGRVCIGLYKGTTGSAEDLISWEYDQPPTTPCPHSGCPLAWVLGKEAMLGHQDYKTAMLSDIKALILKHEAFESYLAAAHQHRVEQIAAFAQELNELDYYDSHNVHTRCQKIWDQWDALGSLTNSRREALEKTEKQLEAIDHLHLEYAKRVAPFNNWMESAMEDLQDMFIIYTIEDTEGLISAHDQFKSTLPDADREHEAILAIHKEAQRIAERNHIKLSGSNPYTTVTPQIINSKWGKVQQLVPKRDHALLEEQSNQQSNKHLRCQFASQANVVGPWIQTKMEEIGLISTEMNGTLEDQLSHLKQCENSIVDYKPNLDLLEQQHQLIQEALIFDNKHTMEHIRVGREQLLTTIAPTIIEVENQILTRDVKGISQEQMQQFRASFNHFDKDHGGVLGPEGFKACLISLGYDVENDRQGEAEFNRIMSLVDPNHSGLVTFQAFIDFMSQETTRTQHPLWPPGGAGAAPQSRSSTLYLCKALSAVLPDSLAIARRWGPQPAPRFRSRGAELADRTP

SEQ ID NO: 10497 - DNA, 686 bp, Homo sapiens
agactgtgaaaatataccaaaagttgaagagcagctgaattccaactaaacagtaccatatgctgctaatttgctcatagctgagttgctgagttcaacaaattctgagaaagtatgatccatagacattgtgcaaggttttgcatatatggaggaattgtgaattgaagtttcccaagacttcacgtaggatttggaaactttcaagactggaacagccagaaagtagaatcctcattgaacacttgcaacattcagacaagatccaaggaaagctacactgttttaaagtctcgctctgtcaccaggttggagtgcagtggcgcaatctcagctaactgcaacctctgcctcccgagttccagcgattctcctgcctcaacctccctaggagctgggactacagatgcatggagtcatgggagaagtccatgtgaagaagaagcagagattggaatgatgtatttacaagccaaggaatgacaattgccagcagccaccagaagcaagaggcaaggaagtgttcttccctagagctttgggaaagagcatgcccagtcgacacctcgatttggactttagcctcaagagtatgagaacagatttatattgttttaagtcacccagtttgtggcaatttgttacagaagccctaagaaactaataaatacatactttaaaagttt

SEQ ID NO: 10498 - protein, 38 aa, Homo sapiens
MTIASSHQKQEARKCSSLELWERACPVDTSIWTLASRV

SEQ ID NO: 10499 - DNA, 2022 bp, Homo sapiens
atgctcagctcagctcggccctcgcctttgatttattttttttctgggcggccgctgcgacccgggactgacttcgggatgggaagtggagcccccggagctgctaccgtggcggcggcgctgtgaggagcagccagggggaggcagctgcggctcgccggtgagtatccgggaagcgccaccatggggctccgtaagaagagcaccaagaacccccccgttctcagccaggaattcatcctgcagaatcatgcggacatcgtctcctgcgtggggatgttcttcctgctggggcttgtgttcgagggaacagcagaagcatccatcgtgtttctcactcttcagcacagtgttgctgtccctgcagcagaggaacaagccacgggctcaaagtccctctattattatggtgtcaaagatttggccacggttttcttctacatgctggtggcaatcattattcatgccacaattcaggaatatgtgttggataaaattaacaagagaatgcagttcaccaaagcgaaacaaaacaagtttaacgagtctggtcagtttagtgtgttctactttttttcttgtatttggggcacattcattttaatctctgaaaactgcctgtcagacccaactcttatatggaaggctcgtccccatagcatgatgacatttcaaatgaagtttttctacatatcccagttggcttactggtttcatgcttttcctgaactctacttccagaaaaccaaaaaacaagacatccctcgtcaacttgtctacattggtcttcacctcttccacattactggagcttatctcttgtacttgaatcatttgggacttcttcttttggtactgcattattttgttgaattactttcccacatgtgcggcctgttttactttagtgatgaaaagtaccagaaaggcatatctctgtgggccattgtgtttatcttgggtagacttgtgactttaattgtttccgtactcactgttgggtttcacctggctggatcgcagaatcggaatcctgatgcccttactggaaatgtaaatgtgttggcagctaaaattgctgttctgtcgtccagttgcacgatccaagcctacgtaacatggaacttaattactctctggcttcagaggtgggtagaagattctaatattcaggcctcatgtatgaaaaagaaacggtcgagatcttctaaaaaaagaacagaaaacggagtgggagtggaaacttcaaatagagtagactgtccgccaaagaggaaagagaaatcttcataatctttgcaagcgcattgattaatgtctgcaaaggaatctgctctttgaggtttctttctgcactagagatttttctgtttttgaaaatagttcgtgctcttcggtttttgttattgaactgtttcatgtattttttaaagacatttgaggggaggaggattattatgaatgggaaaaaaagattttggttgagactaaattactcatcgtcaaaataatgtcaaaatagttttggggatcaccactatattttgttttgatttttaacctttcaacattttcctaatgatttgcagagataactgcacaattttgcatatcaatgatactggttcttactcccaccagtgtttcataatactaacaagatggtctctcctagcaagattatgtgtttaatgcttgctttggggtaaaataaaagtacgaaaaaggtggaagtcaaatcagtattctgtaattgttagaatttattttttaagaacttacaactcagaaaagattgctagactcaccaaaataataaatgttctttattttacaggtagtgattattagtgcttcatccccatttaaaaaaacacagtactaatgggtaacacatatggaggtttgctgccatatatattgcatcaaaatatcattaattaatataaaaatattaaaatcattcctgtccattccacttgtaaatgggaattcatgaaattaaatattactttaaaaagg

SEQ ID NO: 10500 - protein, 369 aa, Homo sapiens
MGLRKKSTKNPPVLSQEFILQNHADIVSCVGMFFLLGLVFEGTAEASIVFLTLQHSVAVPAAEEQATGSKSLYYYGVKDLATVFFYMLVAIIIHATIQEYVLDKINKRMQFTKAKQNKFNESGQFSVFYFFSCIWGTFILISENCLSDPTLIWKARPHSMMTFQMKFFYISQLAYWFHAFPELYFQKTKKQDIPRQLVYIGLHLFHITGAYLLYLNHLGLLLLVLHYFVELLSHMCGLFYFSDEKYQKGISLWAIVFILGRLVTLIVSVLTVGFHLAGSQNRNPDALTGNVNVLAAKIAVLSSSCTIQAYVTWNLITLWLQRWVEDSNIQASCMKKKRSRSSKKRTENGVGVETSNRVDCPPKRKEKSS

SEQ ID NO: 10501 - DNA, 733 bp, Homo sapiens
ggctcacacatgcgcactaagaggcaaaatggcagtctttaactgttgacatgacctccttggaacattcagactgagaactacctgtaatttgagcgaaaaaaatcttcttttggaaactccttaagatatagtctgccttactgcacgctattgagatatagtatctggaaacgttgaacagatcactgatgctcttttcatttctggaggctggagagtccaaggtcaggaggctacatctgcttggcatctgttggttggaatgtgggtatggttgctggaggtgaaatagaaattctgaaccaggagcacattttggaaatgaggtcaccactgcacaacaacagagtaaaagaagtctgtgtcctgaaaccgagaaacaccattccagtcctgtagctcctgccttattttaacaagagacagaaagaaattcctattttacctaaggccctgttagtttgagctttctctaacttttggctgatacttagcaatcagcaagaaactttatgattttgtttttgctcctaggtctacctgaatgaaggaaaaagactgtcccgcgtattaatttcaactagaaaagagataaagcgaattaattttaaaaatatttctactaacctctagattcagaatatacattcacagcaggctgatttatgctgtgataagaagcaatctccaagtttccgtggctcaacgcaataaatgtatacctaactct

SEQ ID NO: 10502 - protein, 32 aa, Homo sapiens
MLFSFLEAGESKVRRLHLLGICWLECGYGCWR

SEQ ID NO: 10503 - DNA, 387 bp, Homo sapiens
gcattactttcatatattatctcacttatttttatattttaatggaaatatctactcagcatgataaaacagttttgtttttctcatattgccagaaggaatacacagtttctttaatatgaaaggcaattttatacatccgcacaaagagtaacacttcattcatagtatgctacacgtataggaaggttggtgaatatctgcagtttgtactttcgagttgattgctttcactataccttactgccttttttaagaatttatatattaaaaatatattttaatcttgttatttgattaaaacccaatttgtacaattcatgatactggaaaaattacaaggtttgataaatttattctgaataaaattaagatatgtaatttgaa

SEQ ID NO: 10504 - protein, 42 aa, Homo sapiens
YATRIGRLVNICSLYFRVDCFHYTLLPFLRIYILKIYFNLVI

SEQ ID NO: 10505 - DNA, 464 bp, Homo sapiens
actgcctgaccatcacctgatggtcatctgacattcccaggactccagataagagcccaggccaaaggacaccttgattttgaccttgtcagacctggagttgaaaaaccagctgcacccttctagaattcttacttacaaaactggagatgttacaagacaagatgatttcactggaagctgagttttgccagctttggggaaatgctgatgcagaacatcatttatttaaggctgatactcatggatagaagagtcaaagtgcgaatatatgcacccttctatacggattctgcagaaagatatgcttgggtcatgactcagctatttacaaagttgctggtgactaattgctggaaagaagctgggacgttctgtggcccctccattttatatcccctccctttggttctctaggaaattgagttcaggaaagctaccaggaataaaactcttacttttta

SEQ ID NO: 10506 - protein, 70 aa, Homo sapiens
MLMQNIIYLRLILMDRRVKVRIYAPFYTDSAERYAWVMTQLFTKLLVTNCWKEAGTFCGPSILYPLPLVL

SEQ ID NO: 10507 - DNA, 600 bp, Homo sapiens
ggaacattcagactggtaagagaaaagaattaaacatcaaatcttccctcagggactccagataagagcccaggccaaaggacaccttgattttgaccttgtcagacctggagttgaaaaaccagctgcacccttctagaattcttacttacaaaactggagatgttacaagacaagatgatttcactggaagctgagttttgccagctttggggaaatgctgatgcagaacatcatttatttaaggctgatactcatggatagaagagtcaaagtgcgaatatatgcacccttctatacggattctgcagaaagatatgcttgggtcatgactcaggtgaatttcctatgaaactttgtctttggtaaagcatcccattcttggctgttccatatatatatatatggtaagtttgggagtggccttgctagtaaagaataaattatttacttggttctagctatttacaaagttgctggtgactaattgctggaaagaagctgggacgttctgtggcccctccattttatatcccctccctttggttctctaggaaattgagttcaggaaagctaccaggaataaaactcttacttttt

SEQ ID NO: 10508 - protein, 44 aa, Homo sapiens
MLMQNIIYLRLILMDRRVKVRIYAPFYTDSAERYAWVMTQVNFL

SEQ ID NO: 10509 - DNA, 274 bp, Homo sapiens
ggagatgttacaagacaagatgatttcactggaagctgagttttgccagctttggggaaatgctgatgcagaacatcatttatttaaggctgatactcatggatagaagagtcaaagtgcgaatatatgcacccttctatacggattctgcagaaagatatgcttgggtcatgactcagacaatttggagagaattccctgaaacattcactgtacaactctactttcttgaatacttactataattaaagttcatttctgatttacataaaga

SEQ ID NO: 10510 - protein, 61 aa, Homo sapiens
MLMQNIIYLRLILMDRRVKVRIYAPFYTDSAERYAWVMTQTIWREFPETFTVQLYFLEYLL

SEQ ID NO: 10511 - DNA, 797 bp, Homo sapiens
tctgactgtcttatttcagaaaggcagccatcaagctctgagattctttcctccacttggtctattctgctactaatacttcagctcagcccagttcagaactcctgttggagagatgattcagctgtttgcaggaaaaaaggccctctgactttcaccccaagatgagaccatctagttgcaggaaagcaagctcagggatcccacagattctgcactatggagtggaccagcctttcaacccccaccatcatcagtcattgcctcagagcagtccacaggaaacataaccttgacccaaataaggattgtgaaggaagagagaaatgtggaagagaagaggaagcagaagaaaagaaaaggaatcaagatcttacactacctgaaaagcctaaaatatttacctttatacaaatctttccctttgtagaaaaattttgacaatccctgctctagagagaggaagaaaactccaaggatttaccaggtttctgaaggtaaactactgaggaacaaaaccactaataaaattcctgcaagaataatgtattttttgagtttatcacatggagtttttttcttaaccaaaggataattgagcccacaaataaagacaaaatatccactaaaaatatatcacgtagaaaccattttgaaaattatgaaaagagtatttaactagcctaaatgtaggtagaactatatgtctgataaaaaataaaaagcacacacttaaagcacacaacttgctaagttgttgaaattctcaacacaatcaagattatatattcatatac

SEQ ID NO: 10512 - protein, 73 aa, Homo sapiens
MEWTSLSTPTIISHCLRAVHRKHNLDPNKDCEGREKCGREEEAEEKKRNQDLTLPEKPKIFTFIQIFPFVEKF

SEQ ID NO: 10513 - DNA, 384 bp, Homo sapiens
attagctgagggctcgcggggtgcgggggagcctgggaatggtggggttcagtttgggactggcaatccagtgcataaaggacaccctagaagtctcgtgttgcacctcgggggaccctgctggggcccaaaagccaggctgaactctcgaacttctgggctcaagcgattctcttgcctcagcctcctgagtagctgaagctacaggtgtaagttactgtgtttggtatgcatacttaggaaaggccatgtgaccacacaccaagaagctagctgtctgccagccaggaagagagccctgaccagtaatcaaattggctgaagacttgatcttggactccttgtctccagaaatgtgagaaaataaaaatttctgttaagtca

SEQ ID NO: 10514 - protein, 34 aa, Homo sapiens
MVGFSLGLAIQCIKDTLEVSCCTSGDPAGAQKPG

SEQ ID NO: 10515 - DNA, 469 bp, Homo sapiens
gtgcgggggagcctgggaatggtggggttcagtttgggactggcaatccagtgcataaaggacaccctagaagtctcgtgttgcacctcgggggaccctgctggggcccaaaagccagggcttggatcttcctctgatagttctacttcattctgtcaaagatccaattcccgaaagagtttttttcatcatcttcaaacatccagaattggctcacacaattacagaggctgagaggccatactatctgtcatgtgcatgcaggagaaccaggaatgctggtggtgtaattcagtacaagtcagaagacctgggaaccagggagctgatggtgccctcagtgtattggatgatacctgccaatactggaaaggccatgtgaccacacaccaagaagctagctgtctgccagccaggaagagagccctgaccagtaatcaaattggctgaagacttgatcttggactcc

SEQ ID NO: 10516 - protein, 71 aa, Homo sapiens
MVGFSLGLAIQCIKDTLEVSCCTSGDPAGAQKPGLGSSSDSSTSFCQRSNSRKSFFHHLQTSRIGSHNYRG

SEQ ID NO: 10517 - DNA, 1962 bp, Homo sapiens
cttggaattctccctctcaggaaactaacagcctgctatgaagcccaagccacaaagagaggccaaggggaaataaacagagtgtgattatatgcaaaacctacaagaatgaggacctccaaactcagtgtacagagtgattttctgctgaaacaattggcttttaaaaaattgtgtgactgaccagcagcagtggctcacatctgtaatcccagcactttgggaggccgagaaaataaaagagacatcagtgtgtgaatgacgactttctgttgctgacttggaagacagaggaattgggtcatgagccgaggaaggtgggcagcttctaaaaggcggaaaagaactgaattgaattcaaatcaaaaaaggtctgaacctcatttaaaagatggttttgtaactgaagaattgaaaggatttctttatgaactagcatcatcttaagacaaaggataaggaccctgaagacagcattatagtgaatcccagaggtgctctccaaaatggtgctaatacagccaagaatacaggtatgaggaaggatgtggaagggtaccttacaggagaaagcaccacttatccaccaagatggcagaggccttcttttctgacccgtggtacaaaaagaaaacattataaggagagacaataggcaaaaaagagcacacgagaagaaacatagaatgaaagaaaagagagggtcaaagagaagaaaaataagatcacatgaaggtgataatacaattttatatagaacacggcaatttgcaatccacaagctgatctaatatttaatgtttaagaaatccaggctgtgtaaataaattttggaaatgagaactctccaagagcagactcaaggtgatctgggctggatcttactccttccatgtctcaggtggccccaggaggacaacattgtcaaataaagtttagcctaaagctgactccttacttattttaagttcagcctaaagatttatctgtacatcatgaactatagcctaaacggaagtataaacaggctacaatctactcttgtgccaatcactgagttttggccaatcgattgcggtcaacagttcaaatcatgtttgaataagacaaatgccgagctgttaccaatctggctgtttctgtacctcacttctgttttgtgtatgtcactttattttttctgtccataaatcctcttccaccacgcagctgcgctgcagtctctgagcctactctggctctggaggcggcccgataggcgaattgttctttgctcaattaaattcttaaatgtaatacggctgaagtttttcctttaacagtatacaactgtgaagtggttttatcaggcatcataggtggagaaatagtagaccagaagtgcaagaggcatatgcaacaccattccctgctgtaccagtattatccagtgacaccttatctggttattaaccaaagctgctttggcataattccagtggctgaagtgagaggaagcgaggatatggctgacattctccaagaagcagtgacttcagaagatgactggcatcttgaacttcaggaaaatgcttggcctttttaactctgaaagtctgtttgaaactcagaagaagaaaattaggtgaatacaaaactgctgccaaacttagaaacttggttaaatatcctgcagaaaatatcatgggcttttcagagtccagttaaatatctacagattatatttccagtttcatacctggggcattaactctattcattttactagctttagtgaattttacttctggagcataacattgcattgaaaatgtgtcctctaacctatgatatttatgtatcgtttaatatgaaatttatgaggttccatttctgatttccaaatggatgcaaattagaacacaggatatttacattctttcatttctaacccacatacataaagtttgactttaaaatgcc

SEQ ID NO: 10518 - protein, 47 aa, Homo sapiens
MSRGRWAASKRRKRTELNSNQKRSEPHLKDGFVTEELKGFLYELASS

SEQ ID NO: 10519 - DNA, 653 bp, Homo sapiens
gctcttggaattctccctctcaggaaactaacagcctgctatgaagcccaagccacaaagagaggccaaggggaaataaacagagtgtgattatatgcaaaacctacaagaatgaggacctccaaactcagtgtacagagtgattttctgctgaaacaattggttggtgtaagaatattggaagcctgaacctagcactgtctgctactggcctgacgtcttttccacaacatgggaagagattgcctgggaaggaagccaactctgtggaaagcataagaaataaccaaagaaagatggcacatcttatctggacagtgttgaagtgaacttttaaaatgaagtaaattttgttgaatcgtagcctgagacaatgaaggggtaatttaggggaagaacccctacctctaagttgccttttttgaccacatgctggaagctgggtgtcggttacaagctgactgtaaaaaacggcaggaaggagaggggcttcttctcagccttacctttaggaaatcaaaaaaaaaccaaaactgaatcctcacttagcggaggggaacaaagaactcagattctaaggacaaggcagaatccattaggtatagggcagaagctaaaaaaaaggagaggactctgattaaaacataaaaccc

SEQ ID NO: 10520 - protein, 35 aa, Homo sapiens
MLEAGCRLQADCKKRQEGEGLLLSLTFRKSKKNQN

SEQ ID NO: 10521 - DNA, 1749 bp, Homo sapiens
ggatgcactcctaagagaagactacctgaaaggcgtgtacactggtctagcagttgagatcagctagtgttccatctatcttctgtcatgtggaggagttcttgctctgtcacctagtctggaatgcaagggcacaatcatagctcactgcagcctcatactcctggactcaaatgatcctcctgcctcaccctcctgagtagttgggactacaggctatactggttattgtggatccaaaaatcctaggacacagactttgccctcaaattatttactgcatagtgggtggcctgaaaagcaaacataagcactaaatatggaaaaatgcaaaaggcaatgggaccataaaaggaacagatctcttctaagatgtcttgatcgactgaccccaaagccagagggtaccaggtcaaaaagcaagaaaacaaacaatactgacattagagagaagcaaagtttctatagaaaacctattacactgtggtataaatcaagatgaacctgcagacatctattttagtttggaagtctggaaaagttcaagattggccatctgcagctggtgagagcctcaggctgcttcccctcatggtggaaggtgaaggggagctggtgtgtgcagagattacatgcttttctaggtcatcattctaggctttgttgaagcatgcatttttggcatgagggtggcagcctttgcactatgtgcatggctgaggagttaggatctggagggtgatgaaagcaaaggtgctgctggttactcttggttcatctagcaatagatgatctgaatgttagagttcgccaaatattgttcctgggcagtctttgctctaccaaatcaactttctccatgggggagctagaagtcaccccacattctccgccatggccagctctacattctaagagaaccaatggctctacccaacatattcttctcaccacagatgacaaagacacaaggagccaagacagatcattcaagcatattcattgcctctatcttcatcccattaaataacatcccgccaaccaaagcaagttatctgcataagaataaatattccacctactctactgcaaggccctgcaagagtcatgagacaaaaggatcctctgtggacagcacccaagatggaaacaactgacagtctatggccagggctatactctggtgaaactgaaaggtgtctgcatggaagtgtctgactaccaccatccactcaggcaaatgcatttgtttccctctattcattattagaagagaggagattacataccagacatataccaataggttttctcttcataatacctacgtcatctagtagcataacataaggcagaatccttcaaagattttcacctgaacttttcttgagcatctctagacagtcacatgcagaataacaactgggttttaggtgtaccaagttcttagtatggaaaaaagatatcctacaaaattttgtctctacacatgttgaagttcatctctcacccctctctactctcttacttatgcttcaagcaaatggaattactttttttcatactgagacattaaaacaggaaatccttcttcctaggactcctgttcaccaccactacctctacacatagcagatccacgtaagacacttgcatccaagacaagtcagaatgattacatatgaaagttttaattgcactgtatggggatattgctgtgttgtgaattaaataagaattcatattttc

SEQ ID NO: 10522 - protein, 77 aa, Homo sapiens
MALPNIFFSPQMTKTQGAKTDHSSIFIASIFIPLNNIPPTKASYLHKNKYSTYSTARPCKSHETKGSSVDSTQDGNN

SEQ ID NO: 10523 - DNA, 2577 bp, Homo sapiens
acagtgaccgccaccgttgcccggggatgggtccctgagaattggcgaagtaggagccctttgtgattgtgcgtcagagtcggggctgagaccagtcctggccagggcagttaccaggacggtctccggaggccgggattcgcggagggtccgccaggaggaagaaacctcagacagatcgccggggacgcagcgcgggatcccagcctcaggcgtgcacggacggtgtgcggaatcctccatctcaggaaggccccagtattgccaggctgggagaaacccaagccatgaggatagaccatgaataggagttctggttgacaatcccagttcactcccagcttcaaatacacaaggccaagtgccagatacgggcataaaaagcaattttggaagtggacactccagtcccagctgtcctagccctcagctatttgagttgcatccagacatgtaaatcttcccagctgaggcctcatcattgaggtgcagaaaaggggcatgcccattgtgcctgtttctaaattcctgacccacagaacctctaatcagcaatacaactgggatttgatatcagattcatgcgattccgaagaccctgaccaccaaatgcaaaagtgaaatggtctcatcctacctgcaactgaggctgaaaaatacagcatttccgtatggtccaaaggaggaaataatgttatcatctcaccagtctctgtcaagacaagttctgaagtcttcagccaatcatgagtatctgtccctagcttactcatcttaagaaggagccaaaaacatcagacaggtgtgcttactgctcatttattaaagatttaagtttcctttacttggagttcttcatctgtgacacaaactgtgtgtagcatcaacttgaactccttgtcatcatctccagtaaacttgagggaaaacaggaaccagagcaaacatgaagctcgtgcaactctgtgctgtgctgcaaataatggaagtctttctgtctctgaccaaacagttatgtgtcttctgccagcatccataaaactgaagcaggctaacttgtaagctcagatccttcacagttcttgacaatagtcccttaaaactgtctgcagatgcacatctcttggaaaaattttgcatccttttaagaataattaatatcctagttaatgacaactatataacaggatagatcactttaagcttctacccagattagtataacttttaggtaaataatgtatatgccattttttctaaggttatctagccatttttgatgtggaaaacaatattgtgtaagataagctgagcatatttttcacttcgtttttgttttgcaaaacaattttattgcttttgttaatgccccaatcatcaatactgcttggcataagagccaagtttgaagaattatcatgttgcaaatgtattttgctcatttatttcaaattagtagacagaattgagaggtggaaaattttagaaaaatcttggttaatcatacttggaatttggttatgtaatatctctttcccttttggggaatacaaaggttcataaactagtgataatcttcactcttggaacctttagatgctatcatgatgttagcacagaagataaatttataatgttgcagtgaggtaaggaaataaaacatgtaagtctttgaaaacaacactatgagagcccttgcaggctaaaaattagacaccaaagcattttttgttacttttggagaataaaagaagtgtgcccctcaatgtcttgtgggagaaaatatatagtttgatacacttgtcaatatctctaactcaaaaatgatgagtataaggagtgacccttattgtagtcttatatttctctccaacaattaagagagttggtggggatgttttttccatgagttcatcccgggccccaggagattttcatcttgtattctctttataatcctatcttagtgtttcatcctcatggctaagttcagcaatacttctgcattccagccagtaaaatgtgtaagaagagatgtaaaaacaaccggctttgtctttatggagattaacttaaatttatgctcataatataattcatgttatacttgatcaaaattaatcactgataagagactatagaaggtaatctcctgcttgtggtcatatgtacttaggattctattactaaacaaaatgaaagaatgcattatatggacaattagtggtctctagtacaaagaaattaccaggtcatttccaattctcaatattaaaaaaaaagtttatttcttactgcactatcaaattggaaaggtcagtacaggggcattcaataatagtaaaaatatgaatagcaatcatatgtatcacaacagaatcatttaaaaagatgtatatttaaaatatgattattgcattttatttcctgtggcagaaaattataaattggagaaaaatcacatttgattgatgtctgttacatggatttttaaaatttgtatcaatgaatgctttttaaaggtaaactaattgaggcctaccaaagataaataaatctttagttattttggtaaat

SEQ ID NO: 10524 - protein, 51 aa, Homo sapiens
MVSSYLQLRLKNTAFPYGPKEEIMLSSHQSLSRQVLKSSANHEYLSLAYSS

SEQ ID NO: 10525 - DNA, 696 bp, Homo sapiens
cggtaatgagcttgtattatgactcaatagcatcactttatcactttaacgcagatggaggcctaaataaccatagggcaatggttcttcttagatgcagaaggacacatttatataatcttagggaccccatctctgaggtcactcataatttatattaattcattattattgccattgccccaagaatagataaggataagacatcctgtagcacaggtagcagagatataaactattcttattcttgtgtcttgtctataggaagggagtgtatcctggtgtatgacagcatatagtagagaccagtgtcaattagggcctgtgaactgagacagggtgactggctaagtccacaacccattagaaacccagaaataatcaaatcatgagggatcatggaaaggaagctgaatttgctgagttttgccacgtgggcattgcatgcctatgtgattaaccaccaataaaaacctgggacatcaaaaaataaataagctgctttaattgccaagaattcacatgtggttgtatgcagcattactgggagattgaagtgtatctgcatgtgattctactgtgatggacacttgtaaatttgtgcctggagtctcctggaatttgccctgagaatctttttcctttgttgataagaatctgcatccttttgttttaataaacgataaacatgagtat

SEQ ID NO: 10526 - protein, 51 aa, Homo sapiens
MSLYYDSIASLYHFNADGGLNNHRAMVLLRCRRTHLYNLRDPISEVTHNLY

SEQ ID NO: 10527 - DNA, 541 bp, Homo sapiens
tcttgtgtcttgtctataggaagggagtgtatcctggtgtatgacagcatatagtagagaccagtgtcaattagggcctgtgaactgagacagggtgactggctaagtccacaacccattagaaacccagaaataatcaaatcatggagagattagtccagggacaataaatatggattagggaagaatgtgttaactcagcaggccagggtttcttcaaccctgcacattcaaagagggatcatggaaaggaagctgaatttgctgagttttgccacgtgggcattgcatgcctatgtgattaaccaccaataaaaacctgggacatcaaaaaataaataagctgctttaattgccaagaattcacatgtggttgtatgcagcattactgggagattgaagtgtatctgcatgtgattctactgtgatggacacttgtaaatttgtgcctggagtctcctggaatttgccctgagaatctttttcctttgttgataagaatctgcatccttttgttttaataaacgataaacatgagtat

SEQ ID NO: 10528 - protein, 44 aa, Homo sapiens
IWIREECVNSAGQGFFNPAHSKRDHGKEAEFAEFCHVGIACLCD

SEQ ID NO: 10529 - DNA, 817 bp, Homo sapiens
gtaggagccctgtgtgatcgtgcgtcagagtcggggctgagaccagtcctggccagggcagttaccaggacggtctccggaggccgggatgcgcggaggctccaccagcaggaagaaacgccaggaggaagaaacctgagacagatcgccggggacgcagcgcgggatcccagcctcaggcttgcgcggacggtgtgcggctacccaaggtgcgaaaaggaaagaaggccaaagggaagaaggtggtgccgacccttgctgtcttgaaaaagcaggagaccgtgaaagtggtgaatcttccgtttgagaaatttggcactggacaggacattttggcattggacagaacatccagcccaaaaggcacctcacttgctttgtcaaatggccccattatactaggttgcaacagcagagagccatcctctataagcagctagaagtgccttctgtgattaatcagttcaccagggccttggaccaccaaacagctgctcagtggggtaagctggctggcaagtacagaccacagacaaagcaagagaagcagcagagactgttggcctgggctgagaagaaagcaaaggagacatccccactaagagatcacctgtccttttaacgggggttaactctgtcaccaccttagtgaagaaaaagaaggctcagctggtggtgactgcacaggacatagatcccattgagttggttgtcttcctgcctgccctgtattgtaaactgagcgttccttactgcattgtctaatggaaggcaagcttgagacatctaggattaaaaaacaaacaaacgaacaaac

SEQ ID NO: 10530 - protein, 140 aa, Homo sapiens
SCVRVGAETSPGQGSYQDGLRRPGCAEAPPAGRNARRKKPETDRRGRSAGSQPQACADGVRLPKVRKGKKAKGKKVVPTLAVLKKQETVKVVNLPFEKFGTGQDILALDRTSSPKGTSLALSNGPIILGCNSREPSSISS

SEQ ID NO: 10531 - DNA, 8192 bp, Homo sapiens
agagtcggggctgagaccagtcctggccagggcagttaccaggacggtctccggaggccgggatgcgcggaggctccaccagcaggaagaaacgccaggaggaagaaacctgagacagatcgccggggacgcagcgcgggatcccagcctcaggcttgcgcggacggtgtgcgggtgagtctccccaaaagtggcgcccttgtgatgtcgaggacaggtctgcctgtgtgcccgtgggctgctctctctccggtggctcgtagtcgcggagatcagaacccggcaacttcaggagctgcctgggggtgggtgttacctgctgtatgtctgtgtgcgttatgggtgtgtgtgtgtgtgtgtgtgtgtgcgcgtccgcgcgtgcgtgtctgtgtgcccacttctgtctctctcttacgtctctctctctctctcccttctcgctctttccttcgccctctctttctctctctgtccgtctgtgtgttcgtgtgccttgggacacgtgtgccctgtgcgccggagggtgggtttcttgcacgtcggcctttcttctggtcagcctctccccgcgtctctgcctgggtcgtgtggccggttggcagtcgttttcccggcggttccggtttggggctctgtgaaggcctgggcaaagtgggcgtctgcgtcgcagccgcaggggttttcatcccctccccatccggagcagcctctttgctaggctagatccagacgaccgctccccaagcaaggacaacggcctcccaggcgctcattgtccagccgcaggagggtgcccgcagacctttaagtagatggttctcacgcctctcgccctctgccctcatcgagaaatcttgccacagctcgacccagggacggagaatgaagccggcaaggggatggggcaagtatctctgtccgtcaaaggtagtatagaagtccagcacagaggcatatccattattgtgcccaccacctcatcttcgggcttggtgaagggcaagtggcactgcaggaaatagtagcctggttctctgtccttaagtagttccaagattgctgtccacaccagtacttgggcttgtgagagtggagggccctccaacagttcagaaacaggcagtctgccgtaggggtgagaggagcaaaagacacccccacgtattcttttccatgttacaccaagtccctcagagtataatctctgctagattcttacttccttatttttctgtgttcaagttccttcttgtggttctctgagaggctctagcactctcccctcaatatacatattggaattaactattatttatccataactttgctttctctttcttcgaataactagagtccaatatctatagtccttcatattgaagaaaaacctcagaaatatacttcttagtaactcaccacccaagagcaaatcataatggaaattataaaatatttttaattaaaaaatatttactacagtataaaatgtttcattttagagggaaatttagaaccttaaattcttattttatgagggcagcaaattaatatttgaaatgttttgaatttatttgaagaacttagaaatgtcatcagaaataaaaggaaataaaaaatacatgcatagtcattaagaatacagggaaaggaaagtcaagaaatatgaccaaaagtttgttagttgttttaggagccatacaataacaaaactgtggagaaatggcttgataaaaataagagaagaaacaagtatgcattttcaggaatcaaaataggaaataattatacatcttgtgtgaagaattttttttgttgtttggaaaggatcagttgttaaatattttaggtttttgggctatatggtttgttgtaactaattaattctattgttgtggcataaattgacaatatgtcaatgaatgagcatgacagtgttgtattaatactttatttataagtactgtctggcttattggccacaatttattgagttttgttataaaaaatacaaatatcaagaaggtaaattagtgtagtatgaaaacgtttaattcaataaatttggaaatatatgtaaaatgtgtacaattacttgaaacatgcatttttccaaaagtaacctaaagtgaaaagaaaaatctgagttgtgctacaacaaatgcatttaatcagtagtcagaaatcatctcataaagataatttcaagccatgatgactttactggcaagttgtatcaaacatgaaacaaaacaataattccaatcttacatagaattctttctgagcatgaaacaggaaagaatatactctatttcattttattatgctattatgactctgatattataacctgaccaggatagtaaagggaaaggaaattaaacaccaatgtaatttatgaaaataatgaaggaaaacttaaaaaactaccatgcagaaataagcaatgcattaaaatgtaagacatcacagccaatgtttattctaagaaaccctgggaagcaataatggcctcatataaaggtatcaattaatatgatacaccacaacaaataacttaacaatattataagcatatttaattttattttcttaaaaagtcatacattttaacaatcccaaattaaaagagaatctagtttaactgataacatttgttttcaaaagttctattgaaattataacacttaacaatggaatgttaaaatatttcctttgtgattgggaacaaaataaacatagatggtacaagcaattttatttatccttttgcaggtcttagacactgggataggattgtaaatattaaaaaaataagaattatgaaagagaaaacagattactatgttaccaatgacactaagtacacagaaaattcaaaatgattgtaagatacattatactaatgaatatgagcttttagcaagatgctttgacacaaacgtattatgcaatattgaaatgcatttccaataagtagagaaccttatttagatgtgtcaatgtggcttactctcacaaacataatatttagtggtatgattaagtcacaaaagaatatgtacagtataactcagtttaaataaagttcaaataaacatagacataacattgacataaatatattcttgaatcgaaagaccttaatgaaatcacttgtccccaaaattaatctttgtaactagtgcatccaaagtaaaacccagtaaggtttgatttagatattgacaagctaattccagaatttatgtaaactctaaaaatattaaaattcagttaataatttattgaggaagaaagaatatattacaggaaatattataagacttaattaatgcaatgtggtattaacaaagtaataaataatcaatgaaatgaaataggtagactacagtaaggaaaatatttataagaacctgtgatatgtaagaaagctagtattatagatcagtggtgaaaaataaatttgccaataaatgagagtgagaaaactggttatacatatgaaaaataattaaagtgattctttaccttatataacacctaacagtcaattccttggcgatcaatatttaaatgtaaagccaggcaaaaattacagaaaacccgacagttaaacaaacaaaatggcttgtacatgtgctttattaaatgtataatataagtgtccaccatacattttagaatcactttaacttatttttaacacaaaaatgcaaatgaaaatgttttatatgtacattattacttatacaacagattgaccaaaaaaagtctgacaagaaagacttctggcaaagatatagagcaataataatttcatatgctttcctggaaatggaaattatatccattttaaaaagaggcttgtattactcagtaatattgaagatgaccatatattctaatcaacaattgactttcactccttattttgtatgtacgtgattggccattaagaaatgtgatccaaaatatttacaggctcagttaagtactataaacaatgcaaaagttaaacaacagtagaatgtggtagattaatacagtggaatactacactttagaaaaaaatagataactttatttaggtatgttaatgtggcttactctcacaaacataatatacagtggtatgattaagtcacaaaaggatatgtacaatataattcagtttaaataaagttcaagaacacaaaacagcaagttggattgtttataaaaggtttactggacactaaatctataaaggtaataatagaaattattttaacacatccttcaattacctttcattcctccagaaatttgttgaaaccccttgaatgcctatgacctttctcatttcctccactgtttaatttccttttatactttgtttaaaactttgaatggacatatgagagatgaagtcatatttttctaaataagttcaaaaatattttgctttaaaatataagtagtgattaaatttctaagaattgagcaatagttgaatgttataaatttagttttcatgagtatttctctctccacatttcttcttctcaacttgctcatatcccttcaaatgacaaaatacttagaagtatttgagtcaagttagatatatttttgaagatattatttgcttatttatctatgagaggtcaacaacaacttccatgaatattaggaaagcaaatgtcggtagctctattcacttcaatatttaattcacctatatctgaaatttaaatgtcagtgataagagtgacagaaagtgacaatttctttaggtaacacagcactaggtggcaatactttaatattgtcactattacatttttcagatatacaatgtatactttaccaagaatcctagtctattatgttctaaggatgagctgtctttatacgaattcacaataaatagctgtgtaaataagagttaccatttttattttatagcataaaatgtatttcaaatagttgtacaaatcagatatgttataaaagaaacgtctttcctattattgaattacccaaagttgcttacctaacatagaatcttgtggaggaaaataggccagtgaaattcagtgattattcattatgatcaaggtgattagtacagaaatctccatgactattctgtgcagtgtcttttctttaacaatattttataatcattcttatttttactttctgtagacaaatcctttcttgttttgcctccttttaggtacttttgggattataaagtatatagtaaaaacaaatgcacacacaaaactattcggttggtatacttaattctgttagaatagatttagtctaggtgtattccagtggtttcttactgagagtccatcctagtcccctcattattacttgagtgttcaatgatggtttttccttcttgttaacaggaaatagttttggtttctgctaaaaatggcagttgccaccagtatgtgtgagttttattttatttcttagaaaataactatattttatattttgtgaatatcttagttgtgcatttaatttgctaagcagaatcaatgcaatcactatcatattctatagtttttcctaacagattgatagagtaaaatgtatggttttctaatttttagcatgtgtgtccaataaaatgactttatataatttttttcttgttggttcattttttttccaatcaaagtttctcctttagtttctcatataattgattcaaaactcctaagtgatgatcacagtaaccttaggtatttcttaattctccataataaatatagcatctgagtctaatttcttctgggagatttattaacttttaagatagcatgtgtcacttacataatctaacaatgcattttgcatactaaaatgatgaaacattcttaatgaatttaaatagctactttatcagaaacaggagtcataagttgaatttttatgtgagtagtagagctaagaatatttgtagaacagctctccatgatgggctccaacaggatgaagtaagaccacctatcaaggaagtaagatcaatcccaaaatgaactgtacatgaaattctgctctaagatctttttgctttttaaaatgatttcagaaaaggctaatttttgtaatggactacaatacttgttttgctacataagcttttaggatttttttcttttatttttattttaaaattaatttttgagcagcattcttgactgcaagaaagcttctgtcagtttcccaaattactcaaataacatgtattttacactgaaaatcatgagctccttaactcaaagcttttccttgctgttttcataactatttaccatacaattacttgtaaatgaaatgtataacataaatatgagctaacataaaggaaaatgtttaaatattttttaaacttctgaaaaaagataaaactctcggtttttaagaacattgtatctttcattttatccttctttctcctccaaatatattaataactatccttctatttgttaccttcttttacttaaagggactaaagtataaaccaggtaattaatacacaaaactttattctgtcccttgcttgtagcactacttcattccagtttcctcagagtttattatacaaatcagacagatttgtaaataagtattttacagtctacatttatttgattatgaaaatggaaacatagaataaaatgtgaacagataataagctttacttttgtgtttctccatcttttcaagttgatcaggtatatggatggcattttaaataatgtgttaaatttagagaatacattaaatggaaaagaaaattgtgggaaataggaaagcctttccattaagggtttagatataaaatgttctattcagtcacaaactaaacctaaaatgagagattttttttgtttaactgaaagagctagagagtaattaaaggtaattggcatgttattattcttaaaaggttcgcttttctgttctaagaataccagggaacaattgaatagataaaaagcaaactataaattgccaaatagatcttttgtataataatacatctcccaagacaaaagatatttcagacccataaaaaataagggaagtgtatttgcctgactggtcttgcatcttgcctgaccacaatgaatttgcatcagattttaaactcccagagtgataaaatatcttaatgtgttaagagggaatcaaaagtgaatgtgattaacttgaaggaactagttggcagactttaacattaggctagtagaaactatttaataaataaaactgaaagcagaaaaatacttttcttaaataattattagtggcagattgatactgttaatattattgattcaatatgggaagtcctccctcttgccctttctctacccagatattgcatacttttgcaaaataagaacaatacaaactattattattattattatttatttgttttttttttttggagacagagtctcgctctatcgcccaggctggagtgtagtggcgcgatcttggctcactcaacctccgcctcccgggttcactccattctcctgcctcagcctcccgactagctgggactgcaggctcccgccaccatgcccggctaattttttgtattttgtttagtagagacggggtttcaccgtgttagccacgatggtcttgatctcctgacctcgtgatccgcccgcctcggcctcccaaagtgctgggattacaggcttgagccactgcgcccggccacaaactcattattcagtcacttatttactactctattcctcaatgaactcttttgtagacttctaccccatctataaccaatgcagtggtactcctccctctcatatttaatttctcagctcaagtaagacttcctcagagttttaatccaattaatcttaatctaattaaaatagaaacccttacccatttattctgtccaaagcaacatgtttcccctcccgtccccttcccctccccttctcttccccttctcttccccttcccttccacttcctttccttccccttctttccccttgccttccttcctgccttctttcttttccttctttctgtcttttctaatacaaggcttgaccactggggtaaaattgtcaaaatgtaaaaaggagataattaaaaaataaatagtacctaagtagtatgctaaaa

SEQ ID NO: 10532 - protein, 172 aa, Homo sapiens
MSRTGLPVCPWAALSPVARSRGDQNPATSGAAWGWVLPAVCLCALWVCVCVCVCARPRVRVCVPTSVSLLRLSLSLPSRSFLRPLFLSLSVCVFVCLGTRVPCAPEGGFLARRPFFWSASPRVSAWVVWPVGSRFPGGSGLGLCEGLGKVGVCVAAAGVFIPSPSGAASLLG

SEQ ID NO: 10533 - DNA, 691 bp, Homo sapiens
ttcagtggcttgaaaccaataaatagaacattaatgaagaatatgagatgaagcaagttccagcaccatcacaggcaaccaaaatcctcgtgtaggagtttgataggtggcagattctgaaagctgagataatgtttgtgctcgaagtatatcccaaacgactgcagaaaagtaaaatttatttaaggaaagcctaaaatactacaaattttagcagttttgagataatttgcctatgtaagctgatatgaaattaatccattattcaagtttttcagaaattaactgtgaagatgaaattttctgctataaatatggcagcaaatgaagtaatgatgacactgttgagaaaatttggttatgaaatagccacatgcttgttctgacattctacaaatattccatgaggttgttttccatattggctccctggaaagccttagaaattctcaagaagtcttggctactgattccagatatccgtgtcaaggtggagcaaagtctcttcctcttgttgactggaacacagaaaattactatcatctgcaccaccccaccctacctttatctgtaaaataattgctatatttttatgatgccattgtaatcaaccaactgtatcactttttaaaattgtatctgaggctaaatataatttactgcctaaaatttaaatatattaataaactta

SEQ ID NO: 10534 - protein, 66 aa, Homo sapiens
MLVLTFYKYSMRLFSILAPWKALEILKKSWLLIPDIRVKVEQSLFLLLTGTQKITIICTTPPYLYL

SEQ ID NO: 10535 - DNA, 618 bp, Homo sapiens
cagtggcttgaaaccaataaatagaacattaatgaagaatatgagatgaagcaagttccagcaccatcacaggcaaccaaaatcctcgtgtaggagtttgataggtggcagattctgaaagctgagataatgtttgtgctcgaagtatatcccaaacgactgcagaaaagtaaaatttatttaaggaaagcctaaaatactacaaattttagcagttttgagataatttgcctatagaatctctatttaaaccaacacaaatgcccaacaacgatacactggattaagaaaacatggcacatatacaccatggaatactatgcagccataaaaaatgaagagttcacgtcctttgtagggacatggatgaaactgggaaccatcattttcagcaaactatcgcaaggacaaaaacccaaacactgcatgttctcactcataagtgggaattgaacaatgagaacacatggacacaggaaggggaacatcacactctggggactgttgtgggaggggggaggggggagggatagcattaggagatatacctaatgctaaatgacgagttaatgggtgcagcacaccaacatggccgatgtatacatatgtaacaaacct

SEQ ID NO: 10536 - protein, 56 aa, Homo sapiens
MDETGNHHFQQTIARTKTQTLHVLTHKWELNNENTWTQEGEHHTLGTVVGGGRGEG

SEQ ID NO: 10537 - DNA, 643 bp, Homo sapiens
acacaactttaaatgctaagaaaaatagcagaatttgtaaatggggaagactgtgacaaatatttagacttccatgattgtaaggggctgaaagtctgaaagtaggtgaagaatacagacaacaagcactatacgatgggtagcccatggcttaagcctcaaaaaaaaatttttccagagtcacaagaggatgggagaggagcagtctgcaagcagccgtaggagcaagaccttgagacgtgtccatcaatgctacgatagattctgctttggagatcaacatgctgtatatcacaataatgatgggactcacggcatggaggatggacagaggagctttctcctggagtggtatttctggaatttctagtgtcaggtgctacttaatatctctcacaagaaaagaagaaatccctctgccttttaatgttctgggaatagaaagaataaaggagactgaggtgaatccaccaaggagtatagcaatttctatttgtctccttaatagtccaacacttcactcacacaacaatgttacgtagtttcatcaaatgatgagtccagcccctttcttctgcagaaaatgtcagttcactgctccttgcctacaaaatagaaattagagagataccagcttttctag

SEQ ID NO: 10538 - protein, 86 aa, Homo sapiens
MLYITIMMGLTAWRMDRGAFSWSGISGISSVRCYLISLTRKEEIPLPFNVLGIERIKETEVNPPRSIAISICLLNSPTLHSHNNVT

SEQ ID NO: 10539 - DNA, 289 bp, Homo sapiens
agtacaagcaactcttcctgtcttcttatccagagtcacaagaggatgggagaggagcagtctgcaagcagccgtaggagcaagaccttgagacgtgtccatcaatgctacacagagtctcgctctgttgccaggctggaatgtaatggcacaatctcggctcacttcaacctctgcctcccgaattcaagcaattctcctgcctcagcttccctgagtatctgagactacagatgcccaccaccatgcctggctaatttttgtatttttagaagagacagggtttcat

SEQ ID NO: 10540 - protein, 59 aa, Homo sapiens
MGEEQSASSRRSKTLRRVHQCYTESRSVARLECNGTISAHFNLCLPNSSNSPASASLSI

SEQ ID NO: 10541 - DNA, 561 bp, Homo sapiens
aatccatgtcaaactaagaaaaaaagtcaggaaaaatcatcacatttcttgaatgcagaggaatttggggaccaaaacttgaaaggaaataaggaaaggagaactatgcagaaggagaagttgaatatgccttcaaaactgggacatgagagagtctggctctgttgtcgcccaggctggagtgcagtggcgcgtctcggctcaccgcaagcttcgcctcccgggttcatgccattctcctgcctcagcctcctgaatagctgggagtacaggcgcctgccaccacgcctggctaatttttttgtatttttaggagagacagggtttcactgagttagccaggatggtctcaatctcctcacctcatgatctggctgccttggcctcccaaagtgctgggattatagctgtgagccactgcacccggtgtccactgatgatattcttatggagagcctcagatgtgaactatcagcagttcacaacctgcttttgaagaaatgtgttctgaaagaggatctgggtgatccacctaagcatccaaaacaatgaagaactacc

SEQ ID NO: 10542 - protein, 75 aa, Homo sapiens
MQKEKLNMPSKLGHERVWLCCRPGWSAVARLGSPQASPPGFMPFSCLSLLNSWEYRRLPPRLANFFVFLGETGFH

SEQ ID NO: 10543 - DNA, 800 bp, Homo sapiens
cagagctcgcacttacgcatttataatccaaagaaggccaagggtaactggtaactctcagaagcagaaaaagaagcttgggacggactccccttcagagctctgtagggaccaattttgctgatgctgtctcttccagatccttcaagattggaaaaagaaggtgatgagcatttttaaactcagttcactgagcactgagcaattgcttaagggaaggtcaaagaacagaaaaaaatatttgaagaaaagaagaaaagatctaaccttcattatacaggtgcaaacaggattgcacagattgccttttgtgataaaaagaggaagaaaaatggcagcaacccagattattattatacttaaatggtctctcacactttatgaagatctttgtgtaaaagtattaagcagtccatttaacagagaagtatgtttgtttcacatgtatcagaaaatgtgagtcttaattaaaatagatcctgacgtcaaatgctattgatgagcagttattattctatatgctatattttatatcagtgtaatgtgtatgaagttttaaaagaccttctaggtttctgccagatagtgatacagtgataaaatatcagcagttcaaaaaaaaaagaatgaaaggtttatatgaatgatgacactgaaaaaaaaaaacagaccctcagaactaaggtatctcttgataaataaagctgttagatgttatgtggcaatatcagatgtcaggagacagaaagaaagtattagttgcttccaagggatctgatataatgaatatagtaattagg

SEQ ID NO: 10544 - protein, 97 aa, Homo sapiens
MSIFKLSSLSTEQLLKGRSKNRKKYLKKRRKDLTFIIQVQTGLHRLPFVIKRGRKMAATQIIIILKWSLTLYEDLCVKVLSSPFNREVCLFHMYQKM

SEQ ID NO: 10545 - DNA, 640 bp, Homo sapiens
ctcttgtggaacaatgagaaatcagagaaagaacaagaggtcatctgcagccaaacctggtcaaagaacagaaaaaaatatttgaagaaaagaagaaaagatctaaccttcattatacaggtgcaaacaggattgcacagattgccttttgtgataaaaagaggaagaaaaatggcagcaacccagattattattatacttaaatggtctctcacactttatgaagatctttgtgtaaaagtattaagcagtccatttaacagagaagtatgtttgtttcacatgtatcagaaaatgtgagtcttaattaaaatagatcctgacgtcaaatgctattgatgagcagttattattctatatgctatattttatatcagtgtaatgtgtatgaagttttaaaagaccttctaggtttctgccagatagtgatacagtgataaaatatcagcagttcaaaaaaaaaagaatgaaaggtttatatgaatgatgacactgaaaaaaaaaaacagaccctcagaactaaggtatctcttgataaataaagctgttagatgttatgtggcaatatcagatgtcaggagacagaaagaaagtattagttgcttccaagggatctgatataatgaatatagtaattagg

SEQ ID NO: 10546 - protein, 44 aa, Homo sapiens
MMTLKKKNRPSELRYLLINKAVRCYVAISDVRRQKESISCFQGI

SEQ ID NO: 10547 - DNA, 487 bp, Homo sapiens
cagagctcgcacttacgcatttataatccaaagaaggccaagggtaactggtaactctcagaagcagaaaaagaagcttgggacggactccccttcagagctctgtagggaccaattttgctgatgctgtctcttccagatccttcaagattggaaaaagaaggtgatgagcatttttaaactcagttcactgagcactgagcaattgcttaagggaaggtcaaagaacagaaaaaaatatttgaagaaaagaagaaaagatctaaccttcattatacaggtgcaaacaggattgcacagattgccttttgtgataaaaagaggaagaaaaatggcagcaacccagattattattatacttaaatggtctctcacactttatgaagatctttgtgtaaaagtattaagcagtccatttaacagagaagtatgtttgtttcacatgtatcagaaaatgtgagtcttaattaaaatagatcctgacgtc

SEQ ID NO: 10548 - protein, 97 aa, Homo sapiens; identical to SEQ ID NO: 10544

SEQ ID NO: 10549 - DNA, 327 bp, Homo sapiens
ctcttgtggaacaatgagaaatcagagaaagaacaagaggtcatctgcagccaaacctggtcaaagaacagaaaaaaatatttgaagaaaagaagaaaagatctaaccttcattatacaggtgcaaacaggattgcacagattgccttttgtgataaaaagaggaagaaaaatggcagcaacccagattattattatacttaaatggtctctcacactttatgaagatctttgtgtaaaagtattaagcagtccatttaacagagaagtatgtttgtttcacatgtatcagaaaatgtgagtcttaattaaaatagatcctgacgtc

SEQ ID NO: 10550 - protein, 42 aa, Homo sapiens
MAATQIIIILKWSLTLYEDLCVKVLSSPFNREVCLFHMYQKM

SEQ ID NO: 10551 - DNA, 2138 bp, Homo sapiens
atgtgagaagaagcaatcagaagattggcaggatttaggaatctatttgaaatattcattacctattttgaattggtcttaaaaatttaaagaaatataaagctggataattaaagataaataataaaggaagaatacaaggtttctatgctgtgaagcaactgagattattatgattttggggcagtgaatttgtttctagaagttttgttggaactaaggcagaaaggaagaagaacaaatgaccttggaatgaaaaactttaagttactccacctaaccactatgaatgatagtcttgtctcaccaaccccagcccatcatctgttggacttggagctcacactttaaaaaagaagatcattctaactgcccctcatgactactgaagaggctatgcctgaaaaagcaaaatgtcctacattagagatcaccaagcaagacttttttcaagaagcaaaaactctcattgcccaacattatgagaaaataaatgagaataaagttcaaggtacttctataaatgtttttagaaagaaacaccaaaaaccgaaatctggcaaatacatacctttggagattgacaaaaaggtaacacgtgatgtggtgcaagaacatcgggccgcactcagaaggatttgctttcccaaggagctttccaaaagcgagcatcttcaggaacccccacaacgaatctccttcaaggaaccacacatttttagtagaagagaaagatgcaggcccatagatctaattacaaaaggtatgtagtgaacctgttccctgctcatgtattcaattccaagtgtattcagatgacaagttaaattggataaaatcatgactattattgaaccagtgagtaaaaaaatggagacagcaaagcaacagcactttgaggagtccagaaacagaatgttggaattactctatccctttcctgtccatctttacttacaacctgggacctctaacttggaacttctgaaagaacctgacaaagcattctatgactggagaggatttgtgctgacaaggtctttccgtttggcttgtgactcccgtcgagttagtttctctcaatcatcatcaatatttcgggattattattctaaaacctttaaaacccttattaaaaaggagcgacaacctatcaagccagaaccaaaatcacaacccaggataaaaggtactccaaataaaactgataaacttgacagtaaagttaaaagaattggaccacacatagaaatcttccaagtgttccgagaaagaaaaaaattcatgattaccccaaaattgattagaatggtcaccgtcatgcaggcacatgtcaggggatggcttgaacggaaaagattgcaaagagtaatgaccaaggctttggatcatggaccagatatgaaagcagttattaacatgtatggcagactaatccaccgtgttagatatcgacgtggtctttggaggacaagacaaattctcaacttagcagagctagaggagtggatggaccgaaaaaaattctatgaaataatgtttgctaagagggaagattggccaaaaattgaaagaaatgagctccccaatttcttcagtgactgtggtcatttcccaactcagaaacaagttgatgatacttgggacctggtccatcaagacacacccaggatcaatattttgcatccttcaatccaatcgagttgacactcagtattaaccatcacaagctccaagaaggttaagagacattaacagactgaaaaacaacctgcagcgtatagctgcccagctatgcccagcctagaccagatgaaccccacctgactcacatgagctaactaaatgtttatcattgatatgataaacacatatgagatggcaaagaaaaatattctgaactaatcaaaaagtccaaagcaattgaaatgttatttacactctatcctcctgaaggtgcacatgtgcctgacagtacactactcaagtcgacttggttgagacccatagtaaatggggaagaaggttatagatatatagttttccacctgaaattatcagaaggtgacctatatctatttgtgtttgttgtttagagtctatttgcactttgttaaaataaacaaattaaaaggaaa

SEQ ID NO: 10552 - protein, 288 aa, Homo sapiens; identical to SEQ ID NO: 938

SEQ ID NO: 10553 - DNA, 443 bp, Homo sapiens
gaagttagcatctattatagccatggatgcattttctgttccatctgttacataaaacatatctctatattaaattgttttctttactcttcgtatctgttaacttccctctaatttcttcagtgtcatagtgtattcattttgattgttaatttgttcattaacttatctattcatttattcatttgtttatttaacaaatgatttccatatataagtttacaacagttaacaaagtctgtacctccttacggtttacattctggtacagagagaaatacaataaataaatgaataaatgcatattaggcagtgatatgtgagtgctaatgagacaatacagcattcagacattcgcaatgcatattggttggggataagatttactttttttcaggccgggcgcggtggctcacaactgtagtcccagctactcgggaggc

SEQ ID NO: 10554 - protein, 34 aa, Homo sapiens
MHFLFHLLHKTYLYIKLFSLLFVSVNFPLISSVS

SEQ ID NO: 10555 - DNA, 1250 bp, Homo sapiens
actttgcaatgcttggaaagtgtctcaggtgtgagttggtggagcctgcactcccagcagctaaggtagaagcatatgggaaactgcattccgatccagggaagtataggaagcagtaataaaagtgggaagacctattataagttcgttgcagtcatccagctgctgattttctctcgagggctcacccccctggactctgggtggtcctgggaggatgtgaaccctgtaccctgactcccatcactgaggccaagagtctggacccctcctcctcctcctgccccagcacagcagggaacccggcaggacagctgtcctctaggactcttgagttcactcacttcagccaccaagcgctgactgtgtttccaccaaagggcagttcctgcggcttctactccccctctccaaggtgccagggttactgcctgtcctccagccttccatggcatcactgtctctccagatcatctcattcaattctctcattgctccagtgagcctggatggttttctgttgccgacaacaaaaaaccccaactgataccattccccttccccaaggtcacttacccagggcaaggtccagcctgagatttgagttcctactgagtcccctacaggggcacagctatgagctgaattgtgcctctctccaggttcattcctaacccctgagacctcagaatgggacagtatttggacacacggtctttcttgagctaatacaggttaaatagtttactgaggggatcctcatccaatacaactggtgtccttataagaggaaattgggacacacattagtgtgcagtgggaagtccatgtgaggacggacaaagaagcttggccatccacaagcccaggagagagactcagaacaaatcaatctgcggacaccttgatcttgggcttctagcctccagaactgtgagaaaatacatttctgttgggtaagcggcccagcctgtggtcctttgtcacggcagccctggcagacgaatgcaggccgcacttcccaccgccatggtgccactgtctgtggacagcatgccagcctcatcgcacgagttatccctgaagatgctcaaattagcaggctgttcttagaaccaaatttcctggacaggcttcagaaaacattctccctggtgatacagacatctgaaaacacacacacacacacacacacccaagaaaacaaaaaacaaacaaaaatgccaaaaacaaataaaaaacccatgacc

SEQ ID NO: 10556 - protein, 53 aa, Homo sapiens
MGNCIPIQGSIGSSNKSGKTYYKFVAVIQLLIFSRGLTPLDSGWSWEDVNPVP

SEQ ID NO: 10557 - DNA, 1586 bp, Homo sapiens
gtgacaagcgtttttcggttctgccaggggatctgagtggcacacaacaacatccactatgaaatgtggtgtgtgctgggtgggggctgactgaggagctcgagagtaggagtgaggcaggctattttaaagaggtggcaagggaaggcctctctgagcaaaggcagagactttaggcaaagacttgattggtgtgaggaagtgagccattcaaagtcaagggcaccagaggttctaagcagaggaaacagcaaatgcaaagcagagaacaagcttggcacatttgagaaccaacaataagtccagtgtgtctggagccacaggagtcaaggagacagcagctggcagttcagccaatgggctaccaggaaaccagatggcagagagcctggtagaccacggtagaagcatatgggaaactgcattccgatccagggaagtataggaagcagtaataaaagtgggaagacctattataagttcgttgcagtcatccagctgctgattttctctcgagggctcacccccctggactctgggtggtcctgggaggatgtgaaccctgtaccctgactcccatcactgaggccaagagtctggacccctcctcctcctcctgccccagcacagcagggaacccggcaggacagctgtcctctaggactcttgagttcactcacttcagccaccaagcgctgactgtgtttccaccaaagggcagttcctgcggcttctactccccctctccaaggtgccagggttactgcctgtcctccagccttccatggcatcactgtctctccagatcatctcattcaattctctcattgctccagtgagcctggatggttttctgttgccgacaacaaaaaaccccaactgataccattccccttccccaaggtcacttacccagggcaaggtccagcctgagatttgagttcctactgagtcccctacaggggcacagctatgagctgaattgtgcctctctccaggttcattcctaacccctgagacctcagaatgggacagtatttggacacacggtctttcttgagctaatacaggttaaatagtttactgaggggatcctcatccaatacaactggtgtccttataagaggaaattgggacacacattagtgtgcagtgggaagtccatgtgaggacggacaaagaagcttggccatccacaagcccaggagagagactcagaacaaatcaatctgcggacaccttgatcttgggcttctagcctccagaactgtgagaaaatacatttctgttgggtaagcggcccagcctgtggtcctttgtcacggcagccctggcagacgaatgcaggccgcacttcccaccgccatggtgccactgtctgtggacagcatgccagcctcatcgcacgagttatccctgaagatgctcaaattagcaggctgttcttagaaccaaatttcctggacaggcttcagaaaacattctccctggtgatacagacatctgaaaacacacacacacacacacacacccaagaaaacaaaaaacaaacaaaaatgccaaaaacaaataaaaaacccatgacc

SEQ ID NO: 10558 - protein, 53 aa, Homo sapiens; identical to SEQ ID NO: 10556

SEQ ID NO: 10559 - DNA, 1238 bp, Homo sapiens
agagaacaagcttggcacatttgagaaccaacaataagtccagtgtgtctggagccacaggagtcaaggagacagcagctggcagttcagccaatgggctaccaggaaaccagatggcagagagcctggtagaccacggtagaagcatatgggaaactgcattccgatccagggaagtataggaagcagtaataaaagtgggaagatgtgaaccctgtaccctgactcccatcactgaggccaagagtctggacccctcctcctcctcctgccccagcacagcagggaacccggcaggacagctgtcctctaggactcttgagttcactcacttcagccaccaagcgctgactgtgtttccaccaaagggcagttcctgcggcttctactccccctctccaaggtgccagggttactgcctgtcctccagccttccatggcatcactgtctctccagatcatctcattcaattctctcattgctccagtgagcctggatggttttctgttgccgacaacaaaaaaccccaactgataccattccccttccccaaggtcacttacccagggcaaggtccagcctgagatttgagttcctactgagtcccctacaggggcacagctatgagctgaattgtgcctctctccaggttcattcctaacccctgagacctcagaatgggacagtatttggacacacggtctttcttgagctaatacaggttaaatagtttactgaggggatcctcatccaatacaactggtgtccttataagaggaaattgggacacacattagtgtgcagtgggaagtccatgtgaggacggacaaagaagcttggccatccacaagcccaggagagagactcagaacaaatcaatctgcggacaccttgatcttgggcttctagcctccagaactgtgagaaaatacatttctgttgggtaagcggcccagcctgtggtcctttgtcacggcagccctggcagacgaatgcaggccgcacttcccaccgccatggtgccactgtctgtggacagcatgccagcctcatcgcacgagttatccctgaagatgctcaaattagcaggctgttcttagaaccaaatttcctggacaggcttcagaaaacattctccctggtgatacagacatctgaaaacacacacacacacacacacacccaagaaaacaaaaaacaaacaaaaatgccaaaaacaaataaaaaacccatgacc

SEQ ID NO: 10560 - protein, 54 aa, Homo sapiens
MVFCCRQQKTPTDTIPLPQGHLPRARSSLRFEFLLSPLQGHSYELNCASLQVHS

SEQ ID NO: 10561 - DNA, 448 bp, Homo sapiens
cagtagtgaagatccctggaagagggaggccatgaagagggatgcagatacctggcaagcccacctcccttctatgccacctgccagccttctctgacattcccaaaccagggaccaacaccgccaatcagggaagatttacacgcatttaattatagaaccagttcaagtctctggaggctggatgtccggccttcaccctggcacagtgggctgtgggctctgcggtccagttgctagtcaggagacgtcctggtggcccctgattcgtgttcacgttcacatcactgttcctgcggttctctacacattcaccttggtattagctctctttgcccctggtccagcatacctcttcagcttccaagtatgggtcaccttccttatgtaaatttcctcttgggactgtattttcttttaaataaaaattggccttgtccgagaactt

SEQ ID NO: 10562 - protein, 68 aa, Homo sapiens [sequence omitted]

SEQ ID NO: 10563 - DNA, 595 bp, Homo sapiens
catcagtattaaaactccccttcagagagcaaaccaccatttggagggaaactgctttggaaagcgagtgaactttttctggaaattaatgcaagtcaaaaatcttcaaagaaagattttaattgaaaatcaaggttgtgagtgattttgccttaattccaaggggaatgaatgctggctagtgcttgccatttcagagctgctggaggctagttaagaaaacagaaccagagttttttaaaaaactgtgctgagaccaggcagttcagggcattttctcgtgaatgagctttgcacaatcagctcaggaagttgctagcctaggatctgaactgctcaaatccaaaatttgctagcctaatagccaataaaaaaaaaccaaaagagagggggaaaaatacatgcagtgtcttcttgaaggattagctgaagaattataccaattttttttttaatgctcaaatctccagacaagtgagagtacgaaagagattctcttgttaagaatgaaaagggggaaagaattcacctctcctttcaggtgtagaaggaggaaagcaatgaatagaaaagggaaatggtttcctcctttttg

SEQ ID NO: 10564 - protein, 37 aa, Homo sapiens
NSPSESKPPFGGKLLWKASELFLEINASQKSSKKDFN

SEQ ID NO: 10565 - DNA, 639 bp, Homo sapiens
acaccttttgccacccccgccagtggacatggaaggagtgccgcacacacccgccctgaatgcagaagcagcagtcagccttctaatagcacccgaagggctcctcatgctggtgcaaccccgctgccactgctcctgagcctatgttcccttctctccaccatgcaccttctgacatcatgactcactggagaaccaggccaggatcccaaccaccccgtgtctcagtgggcctgggcgggagccctgtgctgccaggaggagcagagataacattgattgtccagaagctctacgatggagacaggttgtcattggaagtccaacaagagacagaggcaagtgagctttatggagcacctactgtgtgccaggccccatgcaacgggcttctgtggaggcctgcccctgccatcttcacaaccctcaggtgagccagctttagctttacattttatagatgaaaaaagctgagagttgatgagactaagatactatttgtgagaccaaaagaaagaggaaaatctcatttaatctccaggatttgttaaattaggcaaagacaagaaggaacttttatgtgaggacagactgaagtcctggcattttccagctcagaaagtctgagaaaggatatgc

SEQ ID NO: 10566 - protein, 36 aa, Homo sapiens
MEGVPHTPALNAEAAVSLLIAPEGLLMLVQPRCHCS

SEQ ID NO: 10567 - DNA, 408 bp, Homo sapiens
tgaaagaatgaaagaatctctgaagtgttgattggctgtttctggaacttggcccaagttcctactacagatgtaccatgtccacttttctcagaattcaagtttcctggttgggccctgacttaaatgtgcagtgttagaaaaaagtgaattatttcacccaaatgaagaagcaacacattgtgccatttgaaattctcaagtgaagtgcaaaagtttccttgtccgtttacaatccacttctgagtaatctgacccaacgtcatcagagagaaaatggcttccttggggagtgctgaaagcattagagagatgtgaccagagatctccgtcacactgattcctcccttaccttgccaggagcactgggccagcctacattggctactcagcgcttgtcgaggttgg

SEQ ID NO: 10568 - protein, 40 aa, Homo sapiens
KNERISEVLIGCFWNLAQVPTTDVPCPLFSEFKFPGWALT

SEQ ID NO: 10569 - DNA, 2482 bp, Homo sapiens
cagcttcctagtgggaagtaaaactcatagcaattctctcagtcatccatgatatatagctaggtggggccagatgatttgaaaattaacatattgttcattttaggtgctttgttttcattttaagttgtttctgcatctagtttgaagctgcttggcataaagatgagcctttctgatagaagtgtgtgagaacatacattgtagagttgcttgatggcatgcactttatcctcattgccactttatcttagtacctcattttgttcctggcattacctgtttcccatcctcttccccctttcctactaggattaaggtcagtaattgataggaagagtatccatacttctattctaataaactgtgtcttttgtagtttgatggtatccatgtggtgagtggatctcttgatacatcaatccgtgtttgggatgtggagacagggaattgcattcacacgttaacagggcaccagtcgttaacaagtggaatggaactcaaagacaatattcttgtctctgggaatgcagattctacagttaaaatctgggatatcaaaacaggacagtgtttacaaacattgcaaggtcccaacaagcatcagagtgctgtgacctgtttacagttcaacaagaactttgtaattaccagctcagatgatggaactgtaaaactatgggacttgaaaacgggtgaatttattcgaaacctagtcacattggagagtggggggagtgggggagttgtgtggcggatcagagcctcaaacacaaagctggtgtgtgcagttgggagtcggaatgggactgaagaaaccaagctgctggtgctggactttgatgtggacatgaagtgaagagcagaaaagatgaatttgtccaattgtgtagacgatatactccctgcccttccccctgcaaaaagaaaaaaagaaaagaaaaagaaaaaaatcccttgttctcagtggtgcaggatgttggcttggggcaacagattgaaaagacctacagactaagaaggaaaagaagaagagatgacaaaccataactgacaagagaggcgtctgctgtctcatcacataaaaggcttcacttttgactgagggcagctttgcaaaatgagactttctaaatcaaaccaggtgcaattatttctttattttcttctccagtggtcattgggcagtgttaatgctgaaacatcattacagattctgctagcctgttcttttaccactgacagctagacacctagaaaggaactgcaataatatcaaaacaagtactggttgactttctaattagagagcatctgcaacaaaaagtcatttttctggagtggaaaagcttaaaaaaattactgtgaattgtttttgtacagttatcatgaaaagcttttttttttttttttttgccaaccattgccaatgtcaatcaatcacagtattagcctctgttaatctatttactgttgcttccatatacattcttcaatgcatatgttgctcaaaggtggcaagttgtcctgggttctgtgagtcctgagatggatttaattcttgatgctggtgctagaagtaggtcttcaaatatgggattgttgtcccaaccctgtactgtactcccagtggccaaacttatttatgctgctaaatgaaagaaagaaaaaagcaaattatttttttttattttttttctgctgtgacgttttagtcccagactgaattccaaatttgctctagtttggttatggaaaaaagactttttgccactgaaacttgagccatctgtgcctctaagaggctgagaatggaagagtttcagataataaagagtgaagtttgcctgcaagtaaagaattgagagtgtgtgcaaagcttattttcttttatctgggcaaaaattaaaacacattccttggaacagagctattacttgcctgttctgtggagaaacttttctttttgagggctgtggtgaatggatgaacgtacatcgtaaaactgacaaaatattttaaaaatatataaaacacaaaattaaaataaagttgctggtcagtcttagtgttttacagtatttgggaaaacaactgttacagttttattgctctgagtaactgacaaagcagaaactattcagtttttgtagtaaaggcgtcacatgcaaacaaacaaaatgaatgaaacagtcaaatggtttgcctcattctccaagagccacaactcaagctgaactgtgaaagtggtttaacactgtatcctaggcgatcttttttcctccttctgtttatttttttgtttgttttatttatagtctgatttaaaacaatcagattcaagttggttaattttagttatgtaacaacctgacatgatggaggaaaacaacctttaaagggattgtgtctatggtttgattcacttagaaattttattttcttataacttaagtgcaataaaatgtgttttttcatgtta

SEQ ID NO: 10570 - protein, 121 aa, Homo sapiens
MELKDNILVSGNADSTVKIWDIKTGQCLQTLQGPNKHQSAVTCLQFNKNFVITSSDDGTVKLWDLKTGEFIRNLVTLESGGSGGVVWRIRASNTKLVCAVGSRNGTEETKLLVLDFDVDMK

SEQ ID NO: 10571 - DNA, 3686 bp, Homo sapiens
attgctgaatcctggactgcaccattctgtgttcaagggaagatgtaatctgatccctctgctgctgagggaggaatctgttcagtcaaggctttgacagggcatagtctcctccaataatcttctccgttctctctcattattccctcgagttcttctcagtcaagctgcatgtatgtatgtgtgtcccgagaagcggtttgatactgagctgcatttgcctttactgtggagttttgttgccggttctgctccctaatcttccttttctgacgtgcctgagcatgtccacattagaatctgtgacatacctacctgaaaaaggtttatattgtcagagactgccaagcagccggacacacgggggcacagaatcactgaaggggaaaaatacagaaaatatgggtttctacggcacattaaaaatgattttttacaaaatgaaaagaaagttggaccatggttctgaggtccgctctttttctttgggaaagaaaccatgcaaagtctcagaatatacaagtaccactgggcttgtaccatgttcagcaacaccaacaacttttggggacctcagagcagccaatggccaagggcaacaacgacgccgaattacatctgtccagccacctacaggcctccaggaatggctaaaaatgtttcagagctggagtggaccagagaaattgcttgctttagatgaactcattgatagttgtgaaccaacacaagtaaaacatatgatgcaagtgatagaaccccagtttcaacgagacttcatttcattgctccctaaagagttggcactctatgtgctttcattcctggaacccaaagacctgctacaagcagctcagacatgtcgctactggagaattttggctgaagacaaccttctctggagagagaaatgcaaagaagaggggattgatgaaccattgcacatcaagagaagaaaagtaataaaaccaggtttcatacacagtccatggaaaagtgcatacatcagacagcacagaattgatactaactggaggcgaggagaactcaaatctcctaaggtgctgaaaggacatgatgatcatgtgatcacatgcttacagttttgtggtaaccgaatagttagtggttctgatgacaacactttaaaagtttggtcagcagtcacaggcaaatgtctgagaacattagtgggacatacaggtggagtatggtcatcacaaatgagagacaacatcatcattagtggatctacagatcggacactcaaagtgtggaatgcagagactggagaatgtatacacaccttatatgggcatacttccactgtgcgttgtatgcatcttcatgaaaaaagagttgttagcggttctcgagatgccactcttagggtttgggatattgagacaggccagtgtttacatgttttgatgggtcatgttgcagcagtccgctgtgttcaatatgatggcaggagggttgttagtggagcatatgattttatggtaaaggtgtgggatccagagactgaaacctgtctacacacgttgcaggggcatactaatagagtctattcattacagtttgatggtatccatgtggtgagtggatctcttgatacatcaatccgtgtttgggatgtggagacagggaattgcattcacacgttaacagggcaccagtcgttaacaagtggaatggaactcaaagacaatattcttgtctctgggaatgcagattctacagttaaaatctgggatatcaaaacaggacagtgtttacaaacattgcaaggtcccaacaagcatcagagtgctgtgacctgtttacagttcaacaagaactttgtaattaccagctcagatgatggaactgtaaaactatgggacttgaaaacgggtgaatttattcgaaacctagtcacattggagagtggggggagtgggggagttgtgtggcggatcagagcctcaaacacaaagctggtgtgtgcagttgggagtcggaatgggactgaagaaaccaagctgctggtgctggactttgatgtggacatgaagtgaagagcagaaaagatgaatttgtccaattgtgtagacgatatactccctgcccttccccctgcaaaaagaaaaaaagaaaagaaaaagaaaaaaatcccttgttctcagtggtgcaggatgttggcttggggcaacagattgaaaagacctacagactaagaaggaaaagaagaagagatgacaaaccataactgacaagagaggcgtctgctgtctcatcacataaaaggcttcacttttgactgagggcagctttgcaaaatgagactttctaaatcaaaccaggtgcaattatttctttattttcttctccagtggtcattgggcagtgttaatgctgaaacatcattacagattctgctagcctgttcttttaccactgacagctagacacctagaaaggaactgcaataatatcaaaacaagtactggttgactttctaattagagagcatctgcaacaaaaagtcatttttctggagtggaaaagcttaaaaaaattactgtgaattgtttttgtacagttatcatgaaaagcttttttttttttttttttgccaaccattgccaatgtcaatcaatcacagtattagcctctgttaatctatttactgttgcttccatatacattcttcaatgcatatgttgctcaaaggtggcaagttgtcctgggttctgtgagtcctgagatggatttaattcttgatgctggtgctagaagtaggtcttcaaatatgggattgttgtcccaaccctgtactgtactcccagtggccaaacttatttatgctgctaaatgaaagaaagaaaaaagcaaattatttttttttattttttttctgctgtgacgttttagtcccagactgaattccaaatttgctctagtttggttatggaaaaaagactttttgccactgaaacttgagccatctgtgcctctaagaggctgagaatggaagagtttcagataataaagagtgaagtttgcctgcaagtaaagaattgagagtgtgtgcaaagcttattttcttttatctgggcaaaaattaaaacacattccttggaacagagctattacttgcctgttctgtggagaaacttttctttttgagggctgtggtgaatggatgaacgtacatcgtaaaactgacaaaatattttaaaaatatataaaacacaaaattaaaataaagttgctggtcagtcttagtgttttacagtatttgggaaaacaactgttacagttttattgctctgagtaactgacaaagcagaaactattcagtttttgtagtaaaggcgtcacatgcaaacaaacaaaatgaatgaaacagtcaaatggtttgcctcattctccaagagccacaactcaagctgaactgtgaaagtggtttaacactgtatcctaggcgatcttttttcctccttctgtttatttttttgtttgttttatttatagtctgatttaaaacaatcagattcaagttggttaattttagttatgtaacaacctgacatgatggaggaaaacaacctttaaagggattgtgtctatggtttgattcacttagaaattttattttcttataacttaagtgcaataaaatgtgttttttcatgtta

SEQ ID NO: 10572 - protein, 627 aa, Homo sapiens; identical to SEQ ID NO: 942

SEQ ID NO: 10573 - DNA, 3587 bp, Homo sapiens
gcacttcaccaagcctcagacaggtcaggacatttggtaggggaaggttgaaagacaaaagcagcaggccttgggttctcagccttttaaaaactattattaaatatatatttttaaaatttagtggttagagcttttagtaatgtgcctgtattacatgtagagagtattcgtcaaccaagaggagttttaaaatgtcaaaaccgggaaaacctactctaaaccatggcttggttcctgttgatcttaaaagtgcaaaagagcctctaccacatcaaactgtgatgaagatatttagcattagcatcattgcccaaggcctccctttttgtcgaagacggatgaaaagaaagttggaccatggttctgaggtccgctctttttctttgggaaagaaaccatgcaaagtctcagaatatacaagtaccactgggcttgtaccatgttcagcaacaccaacaacttttggggacctcagagcagccaatggccaagggcaacaacgacgccgaattacatctgtccagccacctacaggcctccaggaatggctaaaaatgtttcagagctggagtggaccagagaaattgcttgctttagatgaactcattgatagttgtgaaccaacacaagtaaaacatatgatgcaagtgatagaaccccagtttcaacgagacttcatttcattgctccctaaagagttggcactctatgtgctttcattcctggaacccaaagacctgctacaagcagctcagacatgtcgctactggagaattttggctgaagacaaccttctctggagagagaaatgcaaagaagaggggattgatgaaccattgcacatcaagagaagaaaagtaataaaaccaggtttcatacacagtccatggaaaagtgcatacatcagacagcacagaattgatactaactggaggcgaggagaactcaaatctcctaaggtgctgaaaggacatgatgatcatgtgatcacatgcttacagttttgtggtaaccgaatagttagtggttctgatgacaacactttaaaagtttggtcagcagtcacaggcaaatgtctgagaacattagtgggacatacaggtggagtatggtcatcacaaatgagagacaacatcatcattagtggatctacagatcggacactcaaagtgtggaatgcagagactggagaatgtatacacaccttatatgggcatacttccactgtgcgttgtatgcatcttcatgaaaaaagagttgttagcggttctcgagatgccactcttagggtttgggatattgagacaggccagtgtttacatgttttgatgggtcatgttgcagcagtccgctgtgttcaatatgatggcaggagggttgttagtggagcatatgattttatggtaaaggtgtgggatccagagactgaaacctgtctacacacgttgcaggggcatactaatagagtctattcattacagtttgatggtatccatgtggtgagtggatctcttgatacatcaatccgtgtttgggatgtggagacagggaattgcattcacacgttaacagggcaccagtcgttaacaagtggaatggaactcaaagacaatattcttgtctctgggaatgcagattctacagttaaaatctgggatatcaaaacaggacagtgtttacaaacattgcaaggtcccaacaagcatcagagtgctgtgacctgtttacagttcaacaagaactttgtaattaccagctcagatgatggaactgtaaaactatgggacttgaaaacgggtgaatttattcgaaacctagtcacattggagagtggggggagtgggggagttgtgtggcggatcagagcctcaaacacaaagctggtgtgtgcagttgggagtcggaatgggactgaagaaaccaagctgctggtgctggactttgatgtggacatgaagtgaagagcagaaaagatgaatttgtccaattgtgtagacgatatactccctgcccttccccctgcaaaaagaaaaaaagaaaagaaaaagaaaaaaatcccttgttctcagtggtgcaggatgttggcttggggcaacagattgaaaagacctacagactaagaaggaaaagaagaagagatgacaaaccataactgacaagagaggcgtctgctgtctcatcacataaaaggcttcacttttgactgagggcagctttgcaaaatgagactttctaaatcaaaccaggtgcaattatttctttattttcttctccagtggtcattgggcagtgttaatgctgaaacatcattacagattctgctagcctgttcttttaccactgacagctagacacctagaaaggaactgcaataatatcaaaacaagtactggttgactttctaattagagagcatctgcaacaaaaagtcatttttctggagtggaaaagcttaaaaaaattactgtgaattgtttttgtacagttatcatgaaaagcttttttttttttttttttgccaaccattgccaatgtcaatcaatcacagtattagcctctgttaatctatttactgttgcttccatatacattcttcaatgcatatgttgctcaaaggtggcaagttgtcctgggttctgtgagtcctgagatggatttaattcttgatgctggtgctagaagtaggtcttcaaatatgggattgttgtcccaaccctgtactgtactcccagtggccaaacttatttatgctgctaaatgaaagaaagaaaaaagcaaattatttttttttattttttttctgctgtgacgttttagtcccagactgaattccaaatttgctctagtttggttatggaaaaaagactttttgccactgaaacttgagccatctgtgcctctaagaggctgagaatggaagagtttcagataataaagagtgaagtttgcctgcaagtaaagaattgagagtgtgtgcaaagcttattttcttttatctgggcaaaaattaaaacacattccttggaacagagctattacttgcctgttctgtggagaaacttttctttttgagggctgtggtgaatggatgaacgtacatcgtaaaactgacaaaatattttaaaaatatataaaacacaaaattaaaataaagttgctggtcagtcttagtgttttacagtatttgggaaaacaactgttacagttttattgctctgagtaactgacaaagcagaaactattcagtttttgtagtaaaggcgtcacatgcaaacaaacaaaatgaatgaaacagtcaaatggtttgcctcattctccaagagccacaactcaagctgaactgtgaaagtggtttaacactgtatcctaggcgatcttttttcctccttctgtttatttttttgtttgttttatttatagtctgatttaaaacaatcagattcaagttggttaattttagttatgtaacaacctgacatgatggaggaaaacaacctttaaagggattgtgtctatggtttgattcacttagaaattttattttcttataacttaagtgcaataaaatgtgttttttcatgtta

SEQ ID NO: 10574 - protein, 589 aa, Homo sapiens; identical to SEQ ID NO: 940

SEQ ID NO: 10575 - DNA, 3822 bp, Homo sapiens
ctgcagaatgtgaaaacctttgcatcttctgatagtctagccaaggtccaagaagtagcaagctggcttttggaaatgaatcaggaactgctctctgtgggcagcaaaagacgacgaactggaggctctctgagaggtaacccttcctcaagccaggtagatgaagaacagatgaatcgtgtggtagaggaggaacagcaacagcaactcagacaacaagaggaggagcacactgcaaggaatggtgaagttgttggagtagaacctagacctggaggccaaaatgattcccagcaaggacagttggaagaaaacaataatagatttatttcggtagatgaggactcctcaggaaaccaagaagaacaagaggaagatgaagaacatgctggtgaacaagatgaggaggatgaggaggaggaggagatggaccaggagagtgacgattttgatcagtctgatgatagtagcagagaagatgaacatacacatactaacagtgtcacgaactccagtagtattgtggacctgcccgttcaccaactctcctccccattctatacaaaaacaacaaaaatgaaaagaaagttggaccatggttctgaggtccgctctttttctttgggaaagaaaccatgcaaagtctcagaatatacaagtaccactgggcttgtaccatgttcagcaacaccaacaacttttggggacctcagagcagccaatggccaagggcaacaacgacgccgaattacatctgtccagccacctacaggcctccaggaatggctaaaaatgtttcagagctggagtggaccagagaaattgcttgctttagatgaactcattgatagttgtgaaccaacacaagtaaaacatatgatgcaagtgatagaaccccagtttcaacgagacttcatttcattgctccctaaagagttggcactctatgtgctttcattcctggaacccaaagacctgctacaagcagctcagacatgtcgctactggagaattttggctgaagacaaccttctctggagagagaaatgcaaagaagaggggattgatgaaccattgcacatcaagagaagaaaagtaataaaaccaggtttcatacacagtccatggaaaagtgcatacatcagacagcacagaattgatactaactggaggcgaggagaactcaaatctcctaaggtgctgaaaggacatgatgatcatgtgatcacatgcttacagttttgtggtaaccgaatagttagtggttctgatgacaacactttaaaagtttggtcagcagtcacaggcaaatgtctgagaacattagtgggacatacaggtggagtatggtcatcacaaatgagagacaacatcatcattagtggatctacagatcggacactcaaagtgtggaatgcagagactggagaatgtatacacaccttatatgggcatacttccactgtgcgttgtatgcatcttcatgaaaaaagagttgttagcggttctcgagatgccactcttagggtttgggatattgagacaggccagtgtttacatgttttgatgggtcatgttgcagcagtccgctgtgttcaatatgatggcaggagggttgttagtggagcatatgattttatggtaaaggtgtgggatccagagactgaaacctgtctacacacgttgcaggggcatactaatagagtctattcattacagtttgatggtatccatgtggtgagtggatctcttgatacatcaatccgtgtttgggatgtggagacagggaattgcattcacacgttaacagggcaccagtcgttaacaagtggaatggaactcaaagacaatattcttgtctctgggaatgcagattctacagttaaaatctgggatatcaaaacaggacagtgtttacaaacattgcaaggtcccaacaagcatcagagtgctgtgacctgtttacagttcaacaagaactttgtaattaccagctcagatgatggaactgtaaaactatgggacttgaaaacgggtgaatttattcgaaacctagtcacattggagagtggggggagtgggggagttgtgtggcggatcagagcctcaaacacaaagctggtgtgtgcagttgggagtcggaatgggactgaagaaaccaagctgctggtgctggactttgatgtggacatgaagtgaagagcagaaaagatgaatttgtccaattgtgtagacgatatactccctgcccttccccctgcaaaaagaaaaaaagaaaagaaaaagaaaaaaatcccttgttctcagtggtgcaggatgttggcttggggcaacagattgaaaagacctacagactaagaaggaaaagaagaagagatgacaaaccataactgacaagagaggcgtctgctgtctcatcacataaaaggcttcacttttgactgagggcagctttgcaaaatgagactttctaaatcaaaccaggtgcaattatttctttattttcttctccagtggtcattgggcagtgttaatgctgaaacatcattacagattctgctagcctgttcttttaccactgacagctagacacctagaaaggaactgcaataatatcaaaacaagtactggttgactttctaattagagagcatctgcaacaaaaagtcatttttctggagtggaaaagcttaaaaaaattactgtgaattgtttttgtacagttatcatgaaaagcttttttttttttttttttgccaaccattgccaatgtcaatcaatcacagtattagcctctgttaatctatttactgttgcttccatatacattcttcaatgcatatgttgctcaaaggtggcaagttgtcctgggttctgtgagtcctgagatggatttaattcttgatgctggtgctagaagtaggtcttcaaatatgggattgttgtcccaaccctgtactgtactcccagtggccaaacttatttatgctgctaaatgaaagaaagaaaaaagcaaattatttttttttattttttttctgctgtgacgttttagtcccagactgaattccaaatttgctctagtttggttatggaaaaaagactttttgccactgaaacttgagccatctgtgcctctaagaggctgagaatggaagagtttcagataataaagagtgaagtttgcctgcaagtaaagaattgagagtgtgtgcaaagcttattttcttttatctgggcaaaaattaaaacacattccttggaacagagctattacttgcctgttctgtggagaaacttttctttttgagggctgtggtgaatggatgaacgtacatcgtaaaactgacaaaatattttaaaaatatataaaacacaaaattaaaataaagttgctggtcagtcttagtgttttacagtatttgggaaaacaactgttacagttttattgctctgagtaactgacaaagcagaaactattcagtttttgtagtaaaggcgtcacatgcaaacaaacaaaatgaatgaaacagtcaaatggtttgcctcattctccaagagccacaactcaagctgaactgtgaaagtggtttaacactgtatcctaggcgatcttttttcctccttctgtttatttttttgtttgttttatttatagtctgatttaaaacaatcagattcaagttggttaattttagttatgtaacaacctgacatgatggaggaaaacaacctttaaagggattgtgtctatggtttgattcacttagaaattttattttcttataacttaagtgcaataaaatgtgttttttcatgtta

SEQ ID NO: 10576 - protein, 707 aa, Homo sapiens; identical to SEQ ID NO: 944

SEQ ID NO: 10577 - DNA, 381 bp, Homo sapiens
ccgccatcacgcctggctaattttttgtatttttattggagacggagtttcaccgtgttagccaggattgtctcgatctcctgacctcatgatccgcccgcctcgacctcccaaagtgctgggattaaggcagaaaatggccaatccacactgagttagtatgtaagcaatatcataattgcagcagaatgatgaataaatacttccattgaggataaagatggagcaccttctgaagtttgtcaataagaaaatttcaatacaggagtcactctgttgcccaggatggaatgcagtggtgtgatcttggctcaccgcaacttccacctcccaggttcaagcaattctcctgcctcagcctccgagcagctgggattacag

SEQ ID NO: 10578 - protein, 31 aa, Homo sapiens
MECSGVILAHRNFHLPGSSNSPASASEQLGL

SEQ ID NO: 10579 - DNA, 983 bp, Homo sapiens
gggccattgagaatgctcatttttggctttgcaagatacaagttagtttttcaaagtaggcacataagaaaacattcccaacagactctggtggaaaaaaaatatatatatacacatatatttgcttaaaaaatgaattatttgtattcaaaaggagaagaaactttcttctggcatttttggaggtgatctctgcacacgctggctccattttgccttccatcatgagtagaagcagcccaaggccttcaccacatttcctatcttgaaccttccagcaagaagaatcatgaaccaaataaactgcttttctttataaactattcagcttcatgtattcctttacagcaacactaaatggactaagacaaattgataaagaaaatgtgatatctatacatctctctgtctataaagataagataccaattacaatggaacattgttcagccataaaaagaagaaaattctggaatttcagatgtcatggatgaatctggaggaaattatgcaaagaaaaataagctagacacagaaagacaaatactatataatctcacttatacgtggaatctgaaaagttgaactcggaagcagagactgaatggtagttgccaggggctgggagcagggagaagagaattgaaagaaggaaacgggagatattggtcaaagagacaaacattcagttataaggtgaataagttctggagatctaatatatatagcatggtaacgatcattaattataccatattgtatacttgaaatttgctgaaagtaaatcttaagggttctcaacaaatacatacaaaaaaaagatcaccttacattactatgaaagatgatggatgtgttaactagcttgattttggtaatcatttcacactgtatatgtatatcaagtcatgttatacaccttaaatatataccgttttgtatgtggattacctcaataaagctgtggggtgaggaaagatttg

SEQ ID NO: 10580 - protein, 53 aa, Homo sapiens
MYSFTATLNGLRQIDKENVISIHLSVYKDKIPITMEHCSAIKRRKFWNFRCHG

SEQ ID NO: 10581 - DNA, 607 bp, Homo sapiens
gcagttatggcatgggctgatctacccagtcagcaaggccagattgcagagaaactcagagtctaggaaaatgaatgtctaggaacattcctcaaatagtcctaccagaagacacaaagatgatgcatccggatgaagaatatatcactgagattaatggccctgggttgcagccaaaagcatctcagaggtagaacactgttgcagatggtgatgttaccatttgaaaggtatgatgcatttcctgactgtggtcggctttccatgggtgaaacagaaaagtcttcaaatatcctcaccaactgctttcctagatttttcagccagttacttgaccatattaggaaaagaaaggtgagcttgggcttcaggacatagaaaacaacattagttatgctggaaagtatcaccaaagaagtgcagctcagacaagctgtattctattttgttcttttgaacataaacacctataaagggaccaaaagaaatctaaatgatcaacgggagcaatcctgaataggcaacaacaatcattattgccaagtgattgtcttatcatttgtcatcagtttttttttcagagtaattacatttaaatgtaaatgtg

SEQ ID NO: 10582 - protein, 81 aa, Homo sapiens; identical to SEQ ID NO: 4512

SEQ ID NO: 10583 - DNA, 414 bp, Homo sapiens
ctgagattaatggccctgggttgcagccaaaagcatctcagagggtatgatgcatttcctgactgtggtcggctttccatgggtgaaacagaaaagtcttcaaatatcctcaccaactgctttcctagatttttcagccagttacttgaccatattaggaaaagaaaggtgagcttgggcttcaggacatagaaaacaacattagttatgctggaaagtatcaccaaagaagtgcagctcagacaagctgtattctattttgttcttttgaacataaacacctataaagggaccaaaagaaatctaaatgatcaacgggagcaatcctgaataggcaacaacaatcattattgccaagtgattgtcttatcatttgtcatcagtttttttttcagagtaattacatttaaatgt

SEQ ID NO: 10584 - protein, 60 aa, Homo sapiens
MALGCSQKHLRGYDAFPDCGRLSMGETEKSSNILTNCFPRFFSQLLDHIRKRKVSLGFRT

SEQ ID NO: 10585 - DNA, 743 bp, Homo sapiens
ggctgatctacccagtcagcaaggccagattgcagagaaactcagagtctaggaaaatgaatgtctaggaacattcctcaaatagtcctaccagaagacacaaagatgatgcatccggatgaagaatatatcactgagattaatggccctgggttgcagccaaaagcatctcagaggtagaacactgttgcagatggtgatgttaccatttgaaagtaagaagaaaactagtatctctttacaccaagagtaaaaatagagaagatgcttacaaactgcaacacatagagtttcttgaaatcacagtttgggagtggaggaaaaggctgcttaagtgtttggaaagggagagtaaggatgaaatagagtgggggtatgatgcatttcctgactgtggtcggctttccatgggtgaaacagaaaagtcttcaaatatcctcaccaactgctttcctagatttttcagccagttacttgaccatattaggaaaagaaaggtgagcttgggcttcaggacatagaaaacaacattagttatgctggaaagtatcaccaaagaagtgcagctcagacaagctgtattctattttgttcttttgaacataaacacctataaagggaccaaaagaaatctaaatgatcaacgggagcaatcctgaataggcaacaacaatcattattgccaagtgattgtcttatcatttgtcatcagtttttttttcagagtaattacatttaaatgt

SEQ ID NO: 10586 - protein, 44 aa, Homo sapiens
MKNISLRLMALGCSQKHLRGRTLLQMVMLPFESKKKTSISLHQE

SEQ ID NO: 10587 - DNA, 469 bp, Homo sapiens
atccagaacaactactcaaggacatgtctgaatgagtcactgaaccatggctctgtgaggtcaaagatagtgagacaaaaaggaattgctcaaatactgagatgcatgtcaactcttccaacaacctccagaatttactgagcctgtaacacagcttttgtaatccttttctgtgaaatccagtactgtgtcagcttcgttagggtctaaagtgtacctttcataaaggacctcaagatttattttcctgagctttaaatgagtgaaaatgtgttttgttgaaacttcccaagaagtaactgcattttctatggaatcttccattgtttatgggcctgatgaaagcatttggcacttaatgattcccagactatttcaactttataaaaaatcaagaaaaagaaaaaaaaggtgaaaagtaaatgttttgaatgctaacaataaaatatgtggatttttaaaccttaca

SEQ ID NO: 10588 - protein, 48 aa, Homo sapiens
MCFVETSQEVTAFSMESSIVYGPDESIWHLMIPRLFQLYKKSRKRKKR

SEQ ID NO: 10589 - DNA, 440 bp, Homo sapiens
tgatccactcgctcctcagcttaaagacatggtcaaagatagtgagacaaaaaggaattgctcaaatactgagatgcatgtcaactcttccaacaacctccagaatttactgagcctgtaacacagcttttgtaatccttttctgtgaaatccagtactgtgtcagcttcgttagggtctaaagtgtacctttcataaaggacctcaagatttattttcctgagctttaaatgagtgaaaatgtgttttgttgaaacttcccaagaagtaactgcattttctatggaatcttccattgtttatgggcctgatgaaagcatttggcacttaatgattcccagactatttcaactttataaaaaatcaagaaaaagaaaaaaaaggtgaaaagtaaatgttttgaatgctaacaataaaatatgtggatttttaaaccttac

SEQ ID NO: 10590 - protein, 30 aa, Homo sapiens
MVKDSETKRNCSNTEMHVNSSNNLQNLLSL

SEQ ID NO: 10591 - DNA, 947 bp, Homo sapiens
aagatgcaggtttatgctgttctatcatttagtaagttattatacagatacgctgttgttattttttaaataagtgagtttacaaaaaataagggttcagtggaaatatatgaaataattcacatgctataaaacattaggacaactaatcccgaaggtcaaaaactctctaatgaagagctcgggggtgaagacattctgaatatttagccaccaaaagaagaagtttaatgaaaatatattcctagtaggaatgcattcagaatgttctgtctgaatccaaactttattcattgttggaattaaagtaaacttgtcaatgtttcatggatactggcagaagaaacaagtctcctgggtcagagacaagcaagtagcacagcaagcagcatgagcatcaagtctgcactgattcccctacccaccaggttccacaagggaggcacaacaggccaggaggataccaagcatgcagtgggtttgcatcatcacaactgacaaatgggagcttgggaaatctactgctttttgagtaagcacaaagcaagcctgaaggacaaatgcaatcctaagaaatgcttcaggttaagaagacaggtcaaggtcttgcatttttggcatacccagcaagtatgtacaaggacgcatggggctgaaagaagattgccttgcccaactgatgcttgagaaaattttggtttaaagaattttctgatcaaaattgatttctattcataacaagaaaatctatttattctctctctctttctctgtctctctctcacaaatatgcatgcacacacacgcgcgcacacacacacacgccttttacattgtcttaaactgatactgaaaccttaaatagtaacccccccacaccacctgttcccatgtcaaccagaaactctgtggtgataaaagtaaagatggctttttacacttattca

SEQ ID NO: 10592 - protein, 61 aa, Homo sapiens
MGAWEIYCFLSKHKASLKDKCNPKKCFRLRRQVKVLHFWHTQQVCTRTHGAERRLPCPTDA

SEQ ID NO: 10593 - DNA, 1978 bp, Homo sapiens
ttcttgcccatctcatctgtgtgaaaaagtatccttttttccaattcacagaagctgtgagtccttcagtgctacccccttcagctttgccactggacctgcttaataatgctataactgcctttagtaccttggaagaccttattcgatatcttgaaccagagagatggcagttggacttagaagatctatataggccaacttggcaacttcttggcaaggcttttgtttttggaagaaaatccagagtggtggatctgaaccttctaacagaggaggttgtctcctggttaaacgctgtggtgggaactgtgcctgttgtctccacaattgcaatgaatgtcaatgtgtcccaagcaaagttactaaaaaataccacgaggtccttcagttgagaccaaagaccggtgtcaggggattgcacaaatcactcaccgacgtggccctggagcaccatgaggagtgtgactgtgtgtgcagagggagcacaggaggatagccgcatcaccaccagcagctcttgcccagagctgtgcagtgcagtggctgattctattagagaacgtatgcgttatctccatccttaatctcagttgtttgcttcaaggacctttcatcttcaggatttacagtgcattctgaaagaggagacatcaaacagaattaggagttgtgcaacagctcttttgagaggaggcctaaaggacaggagaaaaggtcttcaatcgtggaaagaaaattaaatgttgtattaaatagatcaccagctagtttcagagttaccatgtacgtattccactagctgggttctgtatttcagttctttcgatacggcttagggtaatgtcagtacaggaaaaaaactgtgcaagtgagcacctgattccgttgccttgcttaactctaaagctccatgtcctgggcctaaaatcgtataaaatctggatttttttttttttttttgctcatattcacatatgtaaaccagaacattctatgtactacaaacctggtttttaaaaaggaactatgttgctatgaattaaacttgtgtcgtgctgataggacagactggatttttcatatttcttattaaaatttctgccatttagaagaagagaactacattcatggtttggaagagataaacctgaaaagaagagtggccttatcttcactttatcgataagtcagtttatttgtttcattgtgtacatttttatattctccttttgacattataactgttggcttttctaatcttgttaaatatatctatttttaccaaaggtatttaatattcttttttatgacaacttagatcaactatttttagcttggtaaatttttctaaacacaattgttatagccagaggaacaaagatgatataaaatattgttgctctgacaaaaatacatgtatttcattctcgtatggtgctagagttagattaatctgcattttaaaaaactgaattggaatagaattggtaagttgcaaagactttttgaaaataattaaattatcatatcttccattcctgttattggagatgaaaataaaaagcaacttatgaaagtagacattcagatccagccattactaacctattccttttttggggaaatctgagcctagctcagaaaaacataaagcaccttgaaaaagacttggcagcttcctgataaagcgtgctgtgctgtgcagtaggaacacatcctatttattgtgatgttgtggttttattatcttaaactctgttccatacacttgtataaatacatggatatttttatgtacagaagtatgtctcttaaccagttcacttattgtactctggcaatttaaaagaaaatcagtaaaatattttgcttgtaaaatgcttaatatcgtgcctaggttatgtggtgactatttgaatcaaaaatgtattgaatcatcaaataaaagaatgtggctattttggggagaaaatta

SEQ ID NO: 10594 - protein, 58 aa, Homo sapiens
MSVQEKNCASEHLIPLPCLTLKLHVLGLKSYKIWIFFFFFAHIHICKPEHSMYYKPGF

SEQ ID NO: 10595 - DNA, 2065 bp, Homo sapiens
ggattatgcagcatagaacaaaaggagagaaaaatgattaaagcaattcacagaagctgtgagtccttcagtgctacccccttcagctttgccactggacctgcttaataatgctataactgcctttagtaccttggaagaccttattcgatatcttgaaccagagagatggcagttggacttagaagatctatataggccaacttggcaacttcttggcaaggcttttgtttttggaagaaaatccagagtggtggatctgaaccttctaacagaggaggtaagattatacagctgcacacctcgtaacttctcagtgtccataagggaagaactaaagagaaccgataccattttctggccaggttgtctcctggttaaacgctgtggtgggaactgtgcctgttgtctccacaattgcaatgaatgtcaatgtgtcccaagcaaagttactaaaaaataccacgaggtccttcagttgagaccaaagaccggtgtcaggggattgcacaaatcactcaccgacgtggccctggagcaccatgaggagtgtgactgtgtgtgcagagggagcacaggaggatagccgcatcaccaccagcagctcttgcccagagctgtgcagtgcagtggctgattctattagagaacgtatgcgttatctccatccttaatctcagttgtttgcttcaaggacctttcatcttcaggatttacagtgcattctgaaagaggagacatcaaacagaattaggagttgtgcaacagctcttttgagaggaggcctaaaggacaggagaaaaggtcttcaatcgtggaaagaaaattaaatgttgtattaaatagatcaccagctagtttcagagttaccatgtacgtattccactagctgggttctgtatttcagttctttcgatacggcttagggtaatgtcagtacaggaaaaaaactgtgcaagtgagcacctgattccgttgccttgcttaactctaaagctccatgtcctgggcctaaaatcgtataaaatctggatttttttttttttttttgctcatattcacatatgtaaaccagaacattctatgtactacaaacctggtttttaaaaaggaactatgttgctatgaattaaacttgtgtcgtgctgataggacagactggatttttcatatttcttattaaaatttctgccatttagaagaagagaactacattcatggtttggaagagataaacctgaaaagaagagtggccttatcttcactttatcgataagtcagtttatttgtttcattgtgtacatttttatattctccttttgacattataactgttggcttttctaatcttgttaaatatatctatttttaccaaaggtatttaatattcttttttatgacaacttagatcaactatttttagcttggtaaatttttctaaacacaattgttatagccagaggaacaaagatgatataaaatattgttgctctgacaaaaatacatgtatttcattctcgtatggtgctagagttagattaatctgcattttaaaaaactgaattggaatagaattggtaagttgcaaagactttttgaaaataattaaattatcatatcttccattcctgttattggagatgaaaataaaaagcaacttatgaaagtagacattcagatccagccattactaacctattccttttttggggaaatctgagcctagctcagaaaaacataaagcaccttgaaaaagacttggcagcttcctgataaagcgtgctgtgctgtgcagtaggaacacatcctatttattgtgatgttgtggttttattatcttaaactctgttccatacacttgtataaatacatggatatttttatgtacagaagtatgtctcttaaccagttcacttattgtactctggcaatttaaaagaaaatcagtaaaatattttgcttgtaaaatgcttaatatcgtgcctaggttatgtggtgactatttgaatcaaaaatgtattgaatcatcaaataaaagaatgtggctattttggggagaaaatta

SEQ ID NO: 10596 - protein, 58 aa, Homo sapiens; identical to SEQ ID NO: 10594

SEQ ID NO: 10597 - DNA, 2904 bp, Homo sapiens
cccgcgtccccaccccctcattcctccctcgccttcacccccacccccaccacttcgccacagctcaggatttgtttaaaccttgggaaactggttcaggtccaggttttgctttgatccttttcaaaaactggagacacagaagagggctctaggaaaaagttttggatgggattatgtggaaactaccctgcgattctctgctgccagagcaggctcggcgcttccaccccagtgcagccttcccctggcggtggtgaaagagactcgggagtcgctgcttccaaagtgcccgccgtgagtgagctctcaccccagtcagccaaatgagcctcttcgggcttctcctgctgacatctgccctggccggccagagacaggggactcaggcggaatccaacctgagtagtaaattccagttttccagcaacaaggaacagaacggtaggaactatatccaagcatctggactggcatagaaaagaggagaaagaacatttaaaaggagtacaagatcctcagcatgagagaattattactgtgtctactaatggaagtattcacagcccaaggtttcctcatacttatccaagaaatacggtcttggtatggagattagtagcagtagaggaaaatgtatggatacaacttacgtttgatgaaagatttgggcttgaagacccagaagatgacatatgcaagtatgattttgtagaagttgaggaacccagtgatggaactatattagggcgctggtgtggttctggtactgtaccaggaaaacagatttctaaaggaaatcaaattaggataagatttgtatctgatgaatattttccttctgaaccagggttctgcatccactacaacattgtcatgccacaattcacagaagctgtgagtccttcagtgctacccccttcagctttgccactggacctgcttaataatgctataactgcctttagtaccttggaagaccttattcgatatcttgaaccagagagatggcagttggacttagaagatctatataggccaacttggcaacttcttggcaaggcttttgtttttggaagaaaatccagagtggtggatctgaaccttctaacagaggaggtaagattatacagctgcacacctcgtaacttctcagtgtccataagggaagaactaaagagaaccgataccattttctggccaggttgtctcctggttaaacgctgtggtgggaactgtgcctgttgtctccacaattgcaatgaatgtcaatgtgtcccaagcaaagttactaaaaaataccacgaggtccttcagttgagaccaaagaccggtgtcaggggattgcacaaatcactcaccgacgtggccctggagcaccatgaggagtgtgactgtgtgtgcagagggagcacaggaggatagccgcatcaccaccagcagctcttgcccagagctgtgcagtgcagtggctgattctattagagaacgtatgcgttatctccatccttaatctcagttgtttgcttcaaggacctttcatcttcaggatttacagtgcattctgaaagaggagacatcaaacagaattaggagttgtgcaacagctcttttgagaggaggcctaaaggacaggagaaaaggtcttcaatcgtggaaagaaaattaaatgttgtattaaatagatcaccagctagtttcagagttaccatgtacgtattccactagctgggttctgtatttcagttctttcgatacggcttagggtaatgtcagtacaggaaaaaaactgtgcaagtgagcacctgattccgttgccttgcttaactctaaagctccatgtcctgggcctaaaatcgtataaaatctggatttttttttttttttttgctcatattcacatatgtaaaccagaacattctatgtactacaaacctggtttttaaaaaggaactatgttgctatgaattaaacttgtgtcgtgctgataggacagactggatttttcatatttcttattaaaatttctgccatttagaagaagagaactacattcatggtttggaagagataaacctgaaaagaagagtggccttatcttcactttatcgataagtcagtttatttgtttcattgtgtacatttttatattctccttttgacattataactgttggcttttctaatcttgttaaatatatctatttttaccaaaggtatttaatattcttttttatgacaacttagatcaactatttttagcttggtaaatttttctaaacacaattgttatagccagaggaacaaagatgatataaaatattgttgctctgacaaaaatacatgtatttcattctcgtatggtgctagagttagattaatctgcattttaaaaaactgaattggaatagaattggtaagttgcaaagactttttgaaaataattaaattatcatatcttccattcctgttattggagatgaaaataaaaagcaacttatgaaagtagacattcagatccagccattactaacctattccttttttggggaaatctgagcctagctcagaaaaacataaagcaccttgaaaaagacttggcagcttcctgataaagcgtgctgtgctgtgcagtaggaacacatcctatttattgtgatgttgtggttttattatcttaaactctgttccatacacttgtataaatacatggatatttttatgtacagaagtatgtctcttaaccagttcacttattgtactctggcaatttaaaagaaaatcagtaaaatattttgcttgtaaaatgcttaatatcgtgcctaggttatgtggtgactatttgaatcaaaaatgtattgaatcatcaaataaaagaatgtggctattttggggagaaaatta

SEQ ID NO: 10598 - protein, 182 aa, Homo sapiens
MPQFTEAVSPSVLPPSALPLDLLNNAITAFSTLEDLIRYLEPERWQLDLEDLYRPTWQLLGKAFVFGRKSRVVDLNLLTEEVRLYSCTPRNFSVSIREELKRTDTIFWPGCLLVKRCGGNCACCLHNCNECQCVPSKVTKKYHEVLQLRPKTGVRGLHKSLTDVALEHHEECDCVCRGSTGG

SEQ ID NO: 10599 - DNA, 3008 bp, Homo sapiens
gcccggagagccgcatctattggcagctttgttattgatcagaaactgctcgccgccgacttggcttccagtctggctgcgggcaacccttgagttttcgcctctgtcctgtcccccgaactgacaggtgctcccagcaacttgctggggacttctcgccgctcccccgcgtccccaccccctcattcctccctcgccttcacccccacccccaccacttcgccacagctcaggatttgtttaaaccttgggaaactggttcaggtccaggttttgctttgatccttttcaaaaactggagacacagaagagggctctaggaaaaagttttggatgggattatgtggaaactaccctgcgattctctgctgccagagcaggctcggcgcttccaccccagtgcagccttcccctggcggtggtgaaagagactcgggagtcgctgcttccaaagtgcccgccgtgagtgagctctcaccccagtcagccaaatgagcctcttcgggcttctcctgctgacatctgccctggccggccagagacaggggactcaggcggaatccaacctgagtagtaaattccagttttccagcaacaaggaacagaacggagtacaagatcctcagcatgagagaattattactgtgtctactaatggaagtattcacagcccaaggtttcctcatacttatccaagaaatacggtcttggtatggagattagtagcagtagaggaaaatgtatggatacaacttacgtttgatgaaagatttgggcttgaagacccagaagatgacatatgcaagtatgattttgtagaagttgaggaacccagtgatggaactatattagggcgctggtgtggttctggtactgtaccaggaaaacagatttctaaaggaaatcaaattaggataagatttgtatctgatgaatattttccttctgaaccagggttctgcatccactacaacattgtcatgccacaattcacagaagctgtgagtccttcagtgctacccccttcagctttgccactggacctgcttaataatgctataactgcctttagtaccttggaagaccttattcgatatcttgaaccagagagatggcagttggacttagaagatctatataggccaacttggcaacttcttggcaaggcttttgtttttggaagaaaatccagagtggtggatctgaaccttctaacagaggaggtaagattatacagctgcacacctcgtaacttctcagtgtccataagggaagaactaaagagaaccgataccattttctggccaggttgtctcctggttaaacgctgtggtgggaactgtgcctgttgtctccacaattgcaatgaatgtcaatgtgtcccaagcaaagttactaaaaaataccacgaggtccttcagttgagaccaaagaccggtgtcaggggattgcacaaatcactcaccgacgtggccctggagcaccatgaggagtgtgactgtgtgtgcagagggagcacaggaggatagccgcatcaccaccagcagctcttgcccagagctgtgcagtgcagtggctgattctattagagaacgtatgcgttatctccatccttaatctcagttgtttgcttcaaggacctttcatcttcaggatttacagtgcattctgaaagaggagacatcaaacagaattaggagttgtgcaacagctcttttgagaggaggcctaaaggacaggagaaaaggtcttcaatcgtggaaagaaaattaaatgttgtattaaatagatcaccagctagtttcagagttaccatgtacgtattccactagctgggttctgtatttcagttctttcgatacggcttagggtaatgtcagtacaggaaaaaaactgtgcaagtgagcacctgattccgttgccttgcttaactctaaagctccatgtcctgggcctaaaatcgtataaaatctggatttttttttttttttttgctcatattcacatatgtaaaccagaacattctatgtactacaaacctggtttttaaaaaggaactatgttgctatgaattaaacttgtgtcgtgctgataggacagactggatttttcatatttcttattaaaatttctgccatttagaagaagagaactacattcatggtttggaagagataaacctgaaaagaagagtggccttatcttcactttatcgataagtcagtttatttgtttcattgtgtacatttttatattctccttttgacattataactgttggcttttctaatcttgttaaatatatctatttttaccaaaggtatttaatattcttttttatgacaacttagatcaactatttttagcttggtaaatttttctaaacacaattgttatagccagaggaacaaagatgatataaaatattgttgctctgacaaaaatacatgtatttcattctcgtatggtgctagagttagattaatctgcattttaaaaaactgaattggaatagaattggtaagttgcaaagactttttgaaaataattaaattatcatatcttccattcctgttattggagatgaaaataaaaagcaacttatgaaagtagacattcagatccagccattactaacctattccttttttggggaaatctgagcctagctcagaaaaacataaagcaccttgaaaaagacttggcagcttcctgataaagcgtgctgtgctgtgcagtaggaacacatcctatttattgtgatgttgtggttttattatcttaaactctgttccatacacttgtataaatacatggatatttttatgtacagaagtatgtctcttaaccagttcacttattgtactctggcaatttaaaagaaaatcagtaaaatattttgcttgtaaaatgcttaatatcgtgcctaggttatgtggtgactatttgaatcaaaaatgtattgaatcatcaaataaaagaatgtggctattttggggagaaaatta

SEQ ID NO: 10600 - protein, 345 aa, Homo sapiens; identical to SEQ ID NO: 946

SEQ ID NO: 10601 - DNA, 1066 bp, Homo sapiens
ttcttgcccatctcatctgtgtgaaaaagtatccttttttccaattcacagaagctgtgagtccttcagtgctacccccttcagctttgccactggacctgcttaataatgctataactgcctttagtaccttggaagaccttattcgatatcttgaaccagagagatggcagttggacttagaagatctatataggccaacttggcaacttcttggcaaggcttttgtttttggaagaaaatccagagtggtggatctgaaccttctaacagaggaggttgtctcctggttaaacgctgtggtgggaactgtgcctgttgtctccacaattgcaatgaatgtcaatgtgtcccaagcaaagttactaaaaaataccacgaggtccttcagttgagaccaaagaccggtgtcaggggattgcacaaatcactcaccgacgtggccctggagcaccatgaggagtgtgactgtgtgtgcagagggagcacaggaggatagccgcatcaccaccagcagctcttgcccagagctgtgcagtgcagtggctgattctattagagaacgtatgcgttatctccatccttaatctcagttgtttgcttcaaggacctttcatcttcaggatttacagtgcattctgaaagaggagacatcaaacagaattaggagttgtgcaacagctcttttgagaggaggcctaaaggacaggagaaaaggtcttcaatcgtggaaagaaaattaaatgttgtattaaatagatcaccagctagtttcagagttaccatgtacgtattccactagctgggttctgtatttcagttctttcgatacggcttagggtaatgtcagtacaggaaaaaaactgtgcaagtgagcacctgattccgttgccttgcttaactctaaagctccatgtcctgggcctaaaatcgtataaaatctggatttttttttttttttttgctcatattcacatatgtaaaccagaacattctatgtactacaaacctggtttttaaaaaggaactatgttgctatgaattaaacttgtgtcgtgctgatagg

SEQ ID NO: 10602 - protein, 58 aa, Homo sapiens; identical to SEQ ID NO: 10594

SEQ ID NO: 10603 - DNA, 1153 bp, Homo sapiens
ggattatgcagcatagaacaaaaggagagaaaaatgattaaagcaattcacagaagctgtgagtccttcagtgctacccccttcagctttgccactggacctgcttaataatgctataactgcctttagtaccttggaagaccttattcgatatcttgaaccagagagatggcagttggacttagaagatctatataggccaacttggcaacttcttggcaaggcttttgtttttggaagaaaatccagagtggtggatctgaaccttctaacagaggaggtaagattatacagctgcacacctcgtaacttctcagtgtccataagggaagaactaaagagaaccgataccattttctggccaggttgtctcctggttaaacgctgtggtgggaactgtgcctgttgtctccacaattgcaatgaatgtcaatgtgtcccaagcaaagttactaaaaaataccacgaggtccttcagttgagaccaaagaccggtgtcaggggattgcacaaatcactcaccgacgtggccctggagcaccatgaggagtgtgactgtgtgtgcagagggagcacaggaggatagccgcatcaccaccagcagctcttgcccagagctgtgcagtgcagtggctgattctattagagaacgtatgcgttatctccatccttaatctcagttgtttgcttcaaggacctttcatcttcaggatttacagtgcattctgaaagaggagacatcaaacagaattaggagttgtgcaacagctcttttgagaggaggcctaaaggacaggagaaaaggtcttcaatcgtggaaagaaaattaaatgttgtattaaatagatcaccagctagtttcagagttaccatgtacgtattccactagctgggttctgtatttcagttctttcgatacggcttagggtaatgtcagtacaggaaaaaaactgtgcaagtgagcacctgattccgttgccttgcttaactctaaagctccatgtcctgggcctaaaatcgtataaaatctggatttttttttttttttttgctcatattcacatatgtaaaccagaacattctatgtactacaaacctggtttttaaaaaggaactatgttgctatgaattaaacttgtgtcgtgctgatagg

SEQ ID NO: 10604 - protein, 58 aa, Homo sapiens; identical to SEQ ID NO: 10594

SEQ ID NO: 10605 - DNA, 1931 bp, Homo sapiens
cccgcgtccccaccccctcattcctccctcgccttcacccccacccccaccacttcgccacagctcaggatttgtttaaaccttgggaaactggttcaggtccaggttttgctttgatccttttcaaaaactggagacacagaagagggctctaggaaaaagttttggatgggattatgtggaaactaccctgcgattctctgctgccagagcaggctcggcgcttccaccccagtgcagccttcccctggcggtggtgaaagagactcgggagtcgctgcttccaaagtgcccgccgtgagtgagctctcaccccagtcagccaaatgagcctcttcgggcttctcctgctgacatctgccctggccggccagagacaggggactcaggcggaatccaacctgagtagtaaattccagttttccagcaacaaggaacagaacggagtacaagatcctcagcatgagagaattattactgtgtctactaatggaagtattcacagcccaaggtttcctcatacttatccaagaaatacggtcttggtatggagattagtagcagtagaggaaaatgtatggatacaacttacgtttgatgaaagatttgggcttgaagacccagaagatgacatatgcaagtatgattttgtagaagttgaggaacccagtgatggaactatattagggcgctggtgtggttctggtactgtaccaggaaaacagatttctaaaggaaatcaaattaggataagatttgtatctgatgaatattttccttctgaaccagggttctgcatccactacaacattgtcatgccacaattcacagaagctgtgagtccttcagtgctacccccttcagctttgccactggacctgcttaataatgctataactgcctttagtaccttggaagaccttattcgatatcttgaaccagagagatggcagttggacttagaagatctatataggccaacttggcaacttcttggcaaggcttttgtttttggaagaaaatccagagtggtggatctgaaccttctaacagaggaggtaagattatacagctgcacacctcgtaacttctcagtgtccataagggaagaactaaagagaaccgataccattttctggccaggttgtctcctggttaaacgctgtggtgggaactgtgcctgttgtctccacaattgcaatgaatgtcaatgtgtcccaagcaaagttactaaaaaataccacgaggtccttcagttgagaccaaagaccggtgtcaggggattgcacaaatcactcaccgacgtggccctggagcaccatgaggagtgtgactgtgtgtgcagagggagcacaggaggatagccgcatcaccaccagcagctcttgcccagagctgtgcagtgcagtggctgattctattagagaacgtatgcgttatctccatccttaatctcagttgtttgcttcaaggacctttcatcttcaggatttacagtgcattctgaaagaggagacatcaaacagaattaggagttgtgcaacagctcttttgagaggaggcctaaaggacaggagaaaaggtcttcaatcgtggaaagaaaattaaatgttgtattaaatagatcaccagctagtttcagagttaccatgtacgtattccactagctgggttctgtatttcagttctttcgatacggcttagggtaatgtcagtacaggaaaaaaactgtgcaagtgagcacctgattccgttgccttgcttaactctaaagctccatgtcctgggcctaaaatcgtataaaatctggatttttttttttttttttgctcatattcacatatgtaaaccagaacattctatgtactacaaacctggtttttaaaaaggaactatgttgctatgaattaaacttgtgtcgtgctgatagg

SEQ ID NO: 10606 - protein, 345 aa, Homo sapiens; identical to SEQ ID NO: 946

SEQ ID NO: 10607 - DNA, 544 bp, Homo sapiens
tcaaatcagcctccccaaaattcagaggctagggtttttcaaggataaccaatcttaagttctacaatagtgatgctatctgcaagagtaactggggaagttgcaaatattttgaccttgggaataatggctcataatcctttacttctacaccttaacaaagttcaggcttctctcatcctcctaacctcatagtgtttcattcattttacagtgacagttgagtttggggaaaggtgtattaaaacttaagctgtaaactaaatttctcccaaagttagctttgtctaggaatgactaagggcagtttggaagttaaaggcaagatgagggttgattaaatcagagccctttcactgtcataatcttctcacagttacaatttttgtagacagtttcaatattgatgagctatttagcatgtcttgaactctgttataacattaatgtaatgtctagttgtatccactaggatgccaaccctgcttcattcataataacgtggcaagtgtcaccaaatgacttaccatatgatccacacatt

SEQ ID NO: 10608 - protein, 40 aa, Homo sapiens
MLSARVTGEVANILTLGIMAHNPLLLHLNKVQASLILLTS

SEQ ID NO: 10609 - DNA, 267 bp, Homo sapiens
tttatttgaaagatatattatcttttgccccagagcacaagctgtgggagaaacaaaatgaccaatttcaatattattgacattataaacatttatactgaagacaaaccaaagaataacttagagtgttaaatgtccattctgttatagaagagatggcctttctcttttttcttcgtgttgaacagggaaattttacatgggacaatcatggtggaaggggaagcaaacacatccttcttcacatgtcagcaggaaggagaagtg

SEQ ID NO: 10610 - protein, 36 aa, Homo sapiens
MAFLFFLRVEQGNFTWDNHGGRGSKHILLHMSAGRR

SEQ ID NO: 10611 - DNA, 780 bp, Homo sapiens
ctgggctgaatctaagcttatcaaccttccttctagttacagagatggaaagggaatatgaccatcactcatgtggaagttgagccattagaagaaagtccacacatcttatctgccagtaaaaacctagtctcaccagatgtctcttcattcaagcaagaaagcccttttttcaattctatgaagggtgagagaggtgagtaagctgcagaaaagctggaagccagcagacgttggttcatgaggttcaagaaaagaagctgtctccataacaaaaaaggacaaagtgaagctgtggcaagctatccagaagataagctaagctgacagatgaaggtggctacactaaacaacggatcgtcgatgtaggtgaaacagtcttcagttggaagaaggtgtcatctagaactttcatagctagtgaggaaaagtcaaaggctagcttcaaagaaccattggacaagtagactctcttgttagggactaacaccattggtgaattgaagttaaaatcaatgctcatttacctttctgaaaatactagatcctttaagaattatgttaaatctctgcttgtgttctagaaatagaacaacaaagcctgggtgacagtatatctatttttacagcatggtttactgaagattttaaacccactactcagaaagaaaaaaagattcctttcaaaatattactgctcattgataacgcacctggtcacccaaaagttctgatgcagatgtacaaggatattaatgctgttttcatgcctgctaacac

SEQ ID NO: 10612 - protein, 48 aa, Homo sapiens
MTITHVEVEPLEESPHILSASKNLVSPDVSSFKQESPFFNSMKGERGE

SEQ ID NO: 10613 - DNA, 383 bp, Homo sapiens
ttctagttacagagatggaaagggaatatgaccatcactcatgtggaagttgagccattagaagaaagtccacacatcttatctgccagtaaaaacctagtctcaccagatgtctcttcattcaagcaagctgttccatatcatcaataaaatgctgaggaatcaattactctgagatggaagagaagttaatagagtacacaaagaaaggagattctacctaagaatgacagctgctcccgaggaagaaaacatgagttggaacagaaaaagaatcaaaagcaaatactttcttgtattgaaaaaccacaaacaaaacaaaacaatgacctgagtgtgcatataaagtttccctatgtcctttataaacttaatggaaaagt

SEQ ID NO: 10614 - protein, 40 aa, Homo sapiens
MTITHVEVEPLEESPHILSASKNLVSPDVSSFKQAVPYHQ

SEQ ID NO: 10615 - DNA, 422 bp, Homo sapiens
ctagttacagagatggaaagggaatatgaccatcactcatgtggaagttgagccattagaagaaagtccacacatcttatctgccagtaaaaacctagtctcaccagatgtctcttcattcaagcaaggctagtgactgttctaaacagaatcataagatctgactgtgaccaataatggagaacttgcacttgcaaagaaatggttgtggagaagcttcccatttctatatctggacacaactatgtgaggaggtgatgctggaacaggcctactgtctgaagttcacaggctgaggatgacaggaaaaaataaaagatttaactaacctggtgatgatgccactgagcccttgaattaaccctgaaactgtgctaactatagacatcttattatatgagacaataaacaatatttaagct

SEQ ID NO: 10616 - protein, 35 aa, Homo sapiens
MTITHVEVEPLEESPHILSASKNLVSPDVSSFKQG

SEQ ID NO: 10617 - DNA, 582 bp, Homo sapiens
tttggagagatcataacaataatgtttctggtgttagacatttcagaatgaatgtcgtaacctaggcagaaatagaatatggggagaaaaatatacttgtgcatgtatgtgcatacatacacacacacacacaaaaaaatggccaaaaaaatgctgctaaagtcctagattttcagatccaaactgcaaaagttatcaactaccaaatgcagcaactagcattaaatgaatccccaaaactttataaatctaaaccttcttccaaccatgctttctattccttttccttagagtaacaacaaaatacaaagcgttagggtttcaaatcagccaatgacagtttacaatctctcctcatagccttttaactcagggaactctaaggtggtcatcagtttctattagcttcttaggctcccatccacctaattggctgaaattttctggaagcccacaaagctcatgtgtctttctctcaaaagggggaaatgcaactagcattggaaaaaactactaaagagggaatcctcaaggaacccactgaactctgtccctttattttcagttcttgaaaacaaggtg

SEQ ID NO: 10618 - protein, 59 aa, Homo sapiens
QFTISPHSLLTQGTLRWSSVSISFLGSHPPNWLKFSGSPQSSCVFLSKGGNATSIGKNY

SEQ ID NO: 10619 - DNA, 861 bp, Homo sapiens
cccgcgtccccaccccctcattcctccctcgccttcacccccacccccaccacttcgccacagctcaggatttgtttaaaccttgggaaactggttcaggtccaggttttgctttgatccttttcaaaaactggagacacagaagagggctctaggaaaaagttttggatgggattatgtggaaactaccctgcgattctctgctgccagagcaggctcggcgcttccaccccagtgcagccttcccctggcggtggtgaaagagactcgggagtcgctgcttccaaagtgcccgccgtgagtgagctctcaccccagtcagccaaatgagcctcttcgggcttctcctgctgacatctgccctggccggccagagacaggggactcaggcggaatccaacctgagtagtaaattccagttttccagcaacaaggaacagaacgatgagaatgcctattgtggaatgattaagttctgggacggtgcttctgagttgtagcagaaagaatcatacacccaggaacaaaacaaaacctactttgtctgttgcatacagcacaaagagatgtcaatgacaaagttgttggtggaggaatgcctcttctacctgtgttgttggtgagtgatttttagtttactcatagattaagagcatgcgtatcatttttttctcattttctttagccattctgaattttgatttggaatatgccgctcttcgctacggttggtcttattaacatcagttattgtatgtgttctttttctcaagggcttttgtggcatgtggggcaatttactttggtctgctggtcgtgcccttttgccggtatcttgtgtttatggattttccatctctt

SEQ ID NO: 10620 - protein, 57 aa, Homo sapiens
MSLFGLLLLTSALAGQRQGTQAESNLSSKFQFSSNKEQNDENAYCGMIKFWDGASEL

SEQ ID NO: 10621 - DNA, 2733 bp, Homo sapiens
ccgcccgcggtcgccaggttcccccgcggcccgcgctgtccccgctgcggccccgaccgcggcgcgccacggcgcaggctccgcggcccgagcaggcgcgtcagccgagctcggcggtggcgcgggcggctgggacgcagctgcccccgctcggcgcccgctgcacccttagcagccactgccacctgggcccggagcctccacgatctcgcccggcgattgtgggcaggggcgcctccggatcgatcttctgaaattcaagttttcaagatgaagtttttattgacaactgcctttttaattttaatttccttgtgggtggaagaagcctattctaaggaaaagtcttcaaagaaagggaaggggaaaaagaagcagtatctatgcccatctcagcagtcagcagaggaccttgcccgagtacctgccaactccactagcaatatcttgaacaggttattggtcagttatgatcccaggataagaccaaacttcaaaggcattcctgttgatgtagtagtcaacatttttattaacagttttggatccattcaagaaacaacaatggactatagagttaacatcttcctgagacaaaaatggaatgaccccaggctgaagctccccagtgattttaggggttcagatgcactgacagtggatccaacaatgtacaagtgtttatggaaacctgatttattttttgcaaatgaaaaaagtgccaattttcatgatgtgacccaggaaaacatcctcctctttatttttcgtgatggagatgtccttgtcagcatgaggttatctattactctttcatgccctttggacttgacattgtttcccatggatacacaacgttgcaagatgcaactggagagctttggttacacaactgatgatttacgatttatctggcagtcaggagatcctgtgcaattagaaaaaattgccttgcctcaatttgatatcaaaaaggaagatattgaatatggtaactgtacaaaatactataaaggcacgggctactacacatgcgtggaagtcatcttcaccctgaggaggcaggtcggcttttacatgatgggggtctacgccccaactctgctcattgttgttctctcctggctttccttctggatcaacccggacgcgagtgctgccagagtgcccctgggtatcttctcagtcctcagcttggcctctgagtgcacaacccttgccgctgagcttcccaaagtttcctatgtgaaggctcttgatgtttggcttattgcttgccttctctttgggtttgcttccctggtggagtatgcagttgtccaggtgatgctgaacaaccccaaaagggttgaagctgaaaaagccagaattgctaaggctgagcaagcagatggaaaaggtggaaatgtggctaaaaagaatactgtgaatggaacagggactcctgttcatattagcactttgcaggttggtgagaccagatgcaaaaaagtttgtacttctaagtctgatctgagatctaatgacttcagcattgttggaagcttaccaagagattttgaactatccaattatgactgctatggaaaacccattgaagttaacaacggacttgggaaatctcaggctaagaacaacaagaagcctccccctgcgaaacctgttattccaacagcagcaaagcgaattgatctttatgcaagagcattgtttcctttctgcttcttgttcttcaatgttatatattggtctatatatttatgataaatcttttccatttgtacaaaataaaattccatttcattgtgacctactcctttcataaatgccaatctgtgagaacttttgaattttcatagcaacattgcattttggatgccatttgattgtaataaaactgtggcaccttaattttgaatggcagcatgatcatgtaatatctgtgctctaataacgatgtatatatgtatagtgaacatattgcttagtaacaaatgaaggacaagcatactacataatataatccatacaattctcttcagttagtgtaaactgcaaatactacagataattctgataataaaatgatatgcacgctgaatcctgctatggtcaccattctaatgtatgtagtatttcaaatttccttccttgtaactttcaaagaaagccatcttattcttgtaaaattttagatggtattatcacagatttaaaaaggttgtattacatattgtttaaactttgtaagtagaaatatatctgttataattatacaggctctgtggagaaataaagttcaaaatatattaatttgtaaaatcagctcgttttaaagtgtgcttgtgttgtcaaaaatatcagatagtaatacacagtgagcatttttaaacaaagggaaacctatatttatgtaactgtatactgaattctgacaaaataaaaaaagataccttattgacgaaatatttaggataaacaaaattctatttaatccaccttaaaacctaaatgtattttcatggatttcatttgttggtacatattacacaaaacattgtgccttaaaatgagtcatacatcttttaaattggaatgcagtaatagatatgtgattttacatcatttttaagaaaccaaggggaagtaataagttgaaaaagaaatccataactattaaaagattttaacttttttattttattaaaatgcttgcatattttaagtaaaatt

SEQ ID NO: 10622 - protein, 497 aa, Homo sapiens; identical to SEQ ID NO: 948

SEQ ID NO: 10623 - DNA, 3126 bp, Homo sapiens
ccgcccgcggtcgccaggttcccccgcggcccgcgctgtccccgctgcggccccgaccgcggcgcgccacggcgcaggctccgcggcccgagcaggcgcgtcagccgagctcggcggtggcgcgggcggctgggacgcagctgcccccgctcggcgcccgctgcacccttagcagccactgccacctgggcccggagcctccacgatctcgcccggcgattgtgggcaggggcgcctccggatcgatcttctgaaattcaagttttcaagatgaagtttttattgacaactgcctttttaattttaatttccttgtgggtggaagaagcctattctaaggaaaagtcttcaaagaaagggaaggggaaaaagaagcagtatctatgcccatctcagcagtcagcagaggaccttgcccgagtacctgccaactccactagcaatatcttgaacaggttattggtcagttatgatcccaggataagaccaaacttcaaaggcattcctgttgatgtagtagtcaacatttttattaacagttttggatccattcaagaaacaacaatggactatagagttaacatcttcctgagacaaaaatggaatgaccccaggctgaagctccccagtgattttaggggttcagatgcactgacagtggatccaacaatgtacaagtgtttatggaaacctgatttattttttgcaaatgaaaaaagtgccaattttcatgatgtgacccaggaaaacatcctcctctttatttttcgtgatggagatgtccttgtcagcatgaggttatctattactctttcatgccctttggacttgacattgtttcccatggatacacaacgttgcaagatgcaactggagagctttggttacacaactgatgatttacgatttatctggcagtcaggagatcctgtgcaattagaaaaaattgccttgcctcaatttgatatcaaaaaggaagatattgaatatggtaactgtacaaaatactataaaggcacgggctactacacatgcgtggaagtcatcttcaccctgaggaggcaggtcggcttttacatgatgggggtctacgccccaactctgctcattgttgttctctcctggctttccttctggatcaacccggacgcgagtgctgccagagtgcccctgggtatcttctcagtcctcagcttggcctctgagtgcacaacccttgccgctgagcttcccaaagtttcctatgtgaaggctcttgatgtttggcttattgcttgccttctctttgggtttgcttccctggtggagtatgcagttgtccaggtgatgctgaacaaccccaaaagggttgaagctgaaaaagccagaattgctaaggctgagcaagcagatggaaaaggtggaaatgtggctaaaaagaatactgtgaatggaacagggactcctgttcatattagcactttgcaggttggtgagaccagatgcaaaaaagtttgtacttctaagtctgatctgagatctaatgacttcagcattgttggaagcttaccaagagattttgaactatccaattatgactgctatggaaaacccattgaagttaacaacggacttgggaaatctcaggctaagaacaacaagaagcctccccctgcgaaacctgttattccaacagcagcaaagcgaattgatctttatgcaagagcattgtttcctttctgcttcttgttcttcaatgttatatattggtctatatatttatgataaatcttttccatttgtacaaaataaaattccatttcattgtgacctactcctttcataaatgccaatctgtgagaacttttgaattttcatagcaacattgcattttggatgccatttgattgtaataaaactgtggcaccttaattttgaatggcagcatgatcatgtaatatctgtgctctaataacgatgtatatatgtatagtgaacatattgcttagtaacaaatgaaggacaagcatactacataatataatccatacaattctcttcagttagtgtaaactgcaaatactacagataattctgataataaaatgatatgcacgctgaatcctgctatggtcaccattctaatgtatgtagtatttcaaatttccttccttgtaactttcaaagaaagccatcttattcttgtaaaattttagatggtattatcacagatttaaaaaggttgtattacatattgtttaaactttgtaagtagaaatatatctgttataattatacaggctctgtggagaaataaagttcaaaatatattaatttgtaaaatcagctcgttttaaagtgtgcttgtgttgtcaaaaatatcagatagtaatacacagtgagcatttttaaacaaagggaaacctatatttatgtaactgtatactgaattctgacaaaataaaaaaagataccttattgacgaaatatttaggataaacaaaattctatttaatccaccttaaaacctaaatgtattttcatggatttcatttgttggtacatattacacaaaacattgtgccttaaaatgagtcatacatcttttaaattggaatgcagtaatagatatgtgattttacatcatttttaagaaaccaaggggaagtaataagttgaaaaagaaatccataactattaaaagattttaacttttttattttattaaaatgcttgcatattttaagtaaaattaaaaatgtttactgaatttatttttttatttgaatattttgggattagttacaaaatatttagagattaaataaataatagctttgtttgtgttagacttcacttctacttgtattttctttcttgttaaaagtctagacaactgagatttacttactttgaacttgttccaatccaaaagtaagcactaagtctcattttatgagaccaccatttcttaatatcacatccagtgcacctttgtctttctgccatatctgaaataaaactatcagtaattcacatagataaacataagactaaagaagtatatttacattatctggagagttttgttgcagctacgagtttgtatggcaaattcaataataaagtattgtttatgcaaattgc

SEQ ID NO: 10624 - protein, 497 aa, Homo sapiens; identical to SEQ ID NO: 948

SEQ ID NO: 10625 - DNA, 1903 bp, Homo sapiens
gctcggcgcccgctgcacccttagcagccactgccacctgggcccggagcctccacgatctcgcccggcgattgtgggcaggggcgcctccggatcgatcttctgaaattcaagttttcaagatgaagtttttattgacaactgcctttttaattttaatttccttgtgggtggaagaagcctattctaaggaaaagtcttcaaagaaagggaaggggaaaaagaagcagtatctatgcccatcgttggtgagaccagatgcaaaaaagtttgtacttctaagtctgatctgagatctaatgacttcagcattgttggaagcttaccaagagattttgaactatccaattatgactgctatggaaaacccattgaagttaacaacggacttgggaaatctcaggctaagaacaacaagaagcctccccctgcgaaacctgttattccaacagcagcaaagcgaattgatctttatgcaagagcattgtttcctttctgcttcttgttcttcaatgttatatattggtctatatatttatgataaatcttttccatttgtacaaaataaaattccatttcattgtgacctactcctttcataaatgccaatctgtgagaacttttgaattttcatagcaacattgcattttggatgccatttgattgtaataaaactgtggcaccttaattttgaatggcagcatgatcatgtaatatctgtgctctaataacgatgtatatatgtatagtgaacatattgcttagtaacaaatgaaggacaagcatactacataatataatccatacaattctcttcagttagtgtaaactgcaaatactacagataattctgataataaaatgatatgcacgctgaatcctgctatggtcaccattctaatgtatgtagtatttcaaatttccttccttgtaactttcaaagaaagccatcttattcttgtaaaattttagatggtattatcacagatttaaaaaggttgtattacatattgtttaaactttgtaagtagaaatatatctgttataattatacaggctctgtggagaaataaagttcaaaatatattaatttgtaaaatcagctcgttttaaagtgtgcttgtgttgtcaaaaatatcagatagtaatacacagtgagcatttttaaacaaagggaaacctatatttatgtaactgtatactgaattctgacaaaataaaaaaagataccttattgacgaaatatttaggataaacaaaattctatttaatccaccttaaaacctaaatgtattttcatggatttcatttgttggtacatattacacaaaacattgtgccttaaaatgagtcatacatcttttaaattggaatgcagtaatagatatgtgattttacatcatttttaagaaaccaaggggaagtaataagttgaaaaagaaatccataactattaaaagattttaacttttttattttattaaaatgcttgcatattttaagtaaaattaaaaatgtttactgaatttatttttttatttgaatattttgggattagttacaaaatatttagagattaaataaataatagctttgtttgtgttagacttcacttctacttgtattttctttcttgttaaaagtctagacaactgagatttacttactttgaacttgttccaatccaaaagtaagcactaagtctcattttatgagaccaccatttcttaatatcacatccagtgcacctttgtctttctgccatatctgaaataaaactatcagtaattcacatagataaacataagactaaagaagtatatttacattatctggagagttttgttgcagctacgagtttgtatggcaaattcaataataaagtattgtttatgcaaattgc

SEQ ID NO: 10626 - protein, 101 aa, Homo sapiens
MPIVGETRCKKVCTSKSDLRSNDFSIVGSLPRDFELSNYDCYGKPIEVNNGLGKSQAKNNKKPPPAKPVIPTAAKRIDLYARALFPFCFLFFNVIYWSIYL

SEQ ID NO: 10627 - DNA, 3016 bp, Homo sapiens
gcggcgtgcccgggaggacgcgcgctgccctgcgcgggagaggggcgcggggcgcctggcagcggcagccgggtccccgctgcggtggcgcccgcggagacgctccgggtggagagatgcagagggccgggatcgatcttctgaaattcaagttttcaagatgaagtttttattgacaactgcctttttaattttaatttccttgtgggtggaagaagcctattctaaggaaaagtcttcaaagaaagggaaggggaaaaagaagcagtatctatgcccatctcagcagtcagcagaggaccttgcccgagtacctgccaactccactagcaatatcttgaacaggttattggtcagttatgatcccaggataagaccaaacttcaaaggcattcctgttgatgtagtagtcaacatttttattaacagttttggatccattcaagaaacaacaatggactatagagttaacatcttcctgagacaaaaatggaatgaccccaggctgaagctccccagtgattttaggggttcagatgcactgacagtggatccaacaatgtacaagtgtttatggaaacctgatttattttttgcaaatgaaaaaagtgccaattttcatgatgtgacccaggaaaacatcctcctctttatttttcgtgatggagatgtccttgtcagcatgaggttatctattactctttcatgccctttggacttgacattgtttcccatggatacacaacgttgcaagatgcaactggagagctttggttacacaactgatgatttacgatttatctggcagtcaggagatcctgtgcaattagaaaaaattgccttgcctcaatttgatatcaaaaaggaagatattgaatatggtaactgtacaaaatactataaaggcacgggctactacacatgcgtggaagtcatcttcaccctgaggaggcaggtcggcttttacatgatgggggtctacgccccaactctgctcattgttgttctctcctggctttccttctggatcaacccggacgcgagtgctgccagagtgcccctgggtatcttctcagtcctcagcttggcctctgagtgcacaacccttgccgctgagcttcccaaagtttcctatgtgaaggctcttgatgtttggcttattgcttgccttctctttgggtttgcttccctggtggagtatgcagttgtccaggtgatgctgaacaaccccaaaagggttgaagctgaaaaagccagaattgctaaggctgagcaagcagatggaaaaggtggaaatgtggctaaaaagaatactgtgaatggaacagggactcctgttcatattagcactttgcaggttggtgagaccagatgcaaaaaagtttgtacttctaagtctgatctgagatctaatgacttcagcattgttggaagcttaccaagagattttgaactatccaattatgactgctatggaaaacccattgaagttaacaacggacttgggaaatctcaggctaagaacaacaagaagcctccccctgcgaaacctgttattccaacagcagcaaagcgaattgatctttatgcaagagcattgtttcctttctgcttcttgttcttcaatgttatatattggtctatatatttatgataaatcttttccatttgtacaaaataaaattccatttcattgtgacctactcctttcataaatgccaatctgtgagaacttttgaattttcatagcaacattgcattttggatgccatttgattgtaataaaactgtggcaccttaattttgaatggcagcatgatcatgtaatatctgtgctctaataacgatgtatatatgtatagtgaacatattgcttagtaacaaatgaaggacaagcatactacataatataatccatacaattctcttcagttagtgtaaactgcaaatactacagataattctgataataaaatgatatgcacgctgaatcctgctatggtcaccattctaatgtatgtagtatttcaaatttccttccttgtaactttcaaagaaagccatcttattcttgtaaaattttagatggtattatcacagatttaaaaaggttgtattacatattgtttaaactttgtaagtagaaatatatctgttataattatacaggctctgtggagaaataaagttcaaaatatattaatttgtaaaatcagctcgttttaaagtgtgcttgtgttgtcaaaaatatcagatagtaatacacagtgagcatttttaaacaaagggaaacctatatttatgtaactgtatactgaattctgacaaaataaaaaaagataccttattgacgaaatatttaggataaacaaaattctatttaatccaccttaaaacctaaatgtattttcatggatttcatttgttggtacatattacacaaaacattgtgccttaaaatgagtcatacatcttttaaattggaatgcagtaatagatatgtgattttacatcatttttaagaaaccaaggggaagtaataagttgaaaaagaaatccataactattaaaagattttaacttttttattttattaaaatgcttgcatattttaagtaaaattaaaaatgtttactgaatttatttttttatttgaatattttgggattagttacaaaatatttagagattaaataaataatagctttgtttgtgttagacttcacttctacttgtattttctttcttgttaaaagtctagacaactgagatttacttactttgaacttgttccaatccaaaagtaagcactaagtctcattttatgagaccaccatttcttaatatcacatccagtgcacctttgtctttctgccatatctgaaataaaactatcagtaattcacatagataaacataagactaaagaagtatatttacattatctggagagttttgttgcagctacgagtttgtatggcaaattcaataataaagtattgtttatgcaaattgc

SEQ ID NO: 10628 - protein, 497 aa, Homo sapiens; identical to SEQ ID NO: 948

SEQ ID NO: 10629 - DNA, 408 bp, Homo sapiens
cagcccgcaatggctgccggtatccgctgctttcttggtgtctgagctgtagagcggacctgtcaaagagggacagctgtttgggtcactttccctctggctgtttgtggcacaggtacatgaggacctcaatcttgtcctggaaagaataccatgcactggaagtctgcgaagaagtgaagacactaaaggggcgcagcgttgtgtttacttggcggcagtggagcgggtccagggcagtcctccttcgccagtctgctcccagttttcgagaggagtctatgctatttttggattttatgacaagaagtctgtaaataccatcacatcattttgcggaacactccacgtctccttcatcactcccagcttcccaacagatggcacacatccatttgtcattcagat

SEQ ID NO: 10630 - protein, 65 aa, Homo sapiens
MRTSILSWKEYHALEVCEEVKTLKGRSVVFTWRQWSGSRAVLLRQSAPSFREESMLFLDFMTRSL

SEQ ID NO: 10631 - DNA, 552 bp, Homo sapiens
atggcttcagaaatgtcagacattgatgaggggatgagaactgaagaatcgtggaggaaacctttaggaacatattggcgggaagatggcggaggtggtcatgggcaaagaaaagcgccggcagcagccgctcctctggctgcccctgtctcgcatccgggtcatcatgaagagcttcccgaggtgtccagcgtccaccaggaggcgctggtgctcacggccaaggcaatggaactctgttcaatatctagcccccttttcataaagacaaagacatggcagtgcgaaggaaaagaaaacactgacagcgatttagcaaatactgcagaggaatcagaaacttttcaatttcttgaagatatattgccaaagaagattttagctagtaaatacccgaaaatacttaaagaggaaagagggaaaaagatgaggagaatgacaatgataatgaaagtgaccatgaccaagttgaatcctaaaccaaagaagtgctttaaaaaccaacctggcgaaggaggactgccctggacccgctccactgccgccaagtaa

SEQ ID NO: 10632 - protein, 183 aa, Homo sapiens
MASEMSDIDEGMRTEESWRKPLGTYWREDGGGGHGQRKAPAAAAPLAAPVSHPGHHEELPEVSSVHQEALVLTAKAMELCSISSPLFIKTKTWQCEGKENTDSDLANTAEESETFQFLEDILPKKILASKYPKILKEERGKKMRRMTMIMKVTMTKLNPKPKKCFKNQPGEGGLPWTRSTAAK

SEQ ID NO: 10633 - DNA, 5682 bp, Homo sapiens
tgtgtgtgtgtgtgtgtgcgcgcgcgcgtgagtgagagaggagagagggagaagagagcgcgagagagggtgagtgtgtgtgagtgcatgggagggtgctgaatattccgagacactgggaccacagcggcagctccgctgaaaactgcattcagccagtcctccggacttctggagcggggacagggcgcagggcatcagcagccaccagcaggacctgggaaatagggattcttctgcctccacttcaggttttagcagcttggtgctaaattgctgtctcaaaatgcagaggatctaatttgcagaggaaaacagccaaagaaggaagaggaggaaaaggaaaaaaaaaggggtatattgtggatgctctacttttcttggaaatgcaaaagattatgcatatttctgtcctcctttctcctgttttatggggactgatttttggtgtctcttctaacagcatacagataggggggctatttcctaggggcgccgatcaagaatacagtgcatttcgagtagggatggttcagttttccacttcggagttcagactgacaccccacatcgacaatttggaggtggcaaacagcttcgcagtcactaatgctttctgctcccagttttcgagaggagtctatgctatttttggattttatgacaagaagtctgtaaataccatcacatcattttgcggaacactccacgtctccttcatcactcccagcttcccaacagatggcacacatccatttgtcattcagatgagacccgacctcaaaggagctctccttagcttgattgaatactatcaatgggacaagtttgcatacctctatgacagtgacagaggcttatcaacactgcaagctgtgctggattctgctgctgaaaagaaatggcaagtgactgctatcaatgtgggaaacattaacaatgacaagaaagatgagatgtaccgatcactttttcaagatctggagttaaaaaaggaacggcgtgtaattctggactgtgaaagggataaagtaaacgacattgtagaccaggttattaccattggaaaacatgttaaagggtaccactacatcattgcaaatctgggatttactgatggagacctattaaaaatccagtttggaggtgcaaatgtctctggatttcagatagtggactatgatgattcgttggtatctaaatttatagaaagatggtcaacactggaagaaaaagaataccctggagctcacacaacaacaattaagtatacttctgctctgacctatgatgccgttcaagtgatgactgaagccttccgcaacctaaggaagcaaagaattgaaatctcccgaagggggaatgcaggagactgtctggcaaacccagcagtgccctggggacaaggtgtagaaatagaaagggccctcaaacaggttcaggttgaaggtctctcaggaaatataaagtttgaccagaatggaaaaagaataaactatacaattaacatcatggagctcaaaactaatgggccccggaagattggctactggagtgaagtggacaaaatggttgttacccttactgagctcccttctggaaatgacacctctgggcttgagaataagactgttgttgtcaccacaattttggaatctccgtatgttatgatgaagaaaaatcatgaaatgcttgaaggcaatgagcgctatgagggctactgtgttgacctggctgcagaaatcgccaaacattgtgggttcaagtacaagttgacaattgttggtgatggcaagtatggggccagggatgcagacacgaaaatttggaatgggatggttggagaacttgtatatgggaaagctgatattgcaattgctccattaactattacccttgtgagagaagaggtgattgacttctcaaagcccttcatgagcctcgggatatctatcatgatcaagaagcctcagaagtccaaaccaggagtgttttcctttcttgatcctttagcctatgagatctggatgtgcattgtttttgcctacattggggtcagtgtagttttattcctggtcagcagatttagcccctacgagtggcacactgaggagtttgaagatggaagagaaacacaaagtagtgaatcaactaatgaatttgggatttttaatagtctctggttttccttgggtgcctttatgcagcaaggatgcgatatttcgccaagatccctctctgggcgcattgttggaggtgtgtggtggttctttaccctgatcataatctcctcctacacggctaacttagctgccttcctgactgtagagaggatggtgtctcccatcgaaagtgctgaggatctttctaagcaaacagaaattgcttatggaacattagactctggctccactaaagagtttttcaggagatctaaaattgcagtgtttgataaaatgtggacctacatgcggagtgcggagccctctgtgtttgtgaggactacggccgaaggggtggctagagtgcggaagtccaaagggaaatatgcctacttgttggagtccacgatgaacgagtacattgagcaaaggaagccttgcgacaccatgaaagttggtggaaacctggattccaaaggctatggcatcgcaacacctaaaggatcctcattaagaaccccagtaaatcttgcagtattgaaactcagtgagcaaggcgtcttagacaagctgaaaaacaaatggtggtacgataaaggtgaatgtggagccaaggactctggaagtaaggaaaagaccagtgccctcagtctgagcaacgttgctggagtattctacatccttgtcgggggccttggtttggcaatgctggtggctttgattgagttctgttacaagtcaagggccgaggcgaaacgaatgaaggtggcaaagaatgcacagaatattaacccatcttcctcgcagaattcacagaattttgcaacttataaggaaggttacaacgtatatggcatcgaaagtgttaaaatttaggggatgaccttgaatgatgccatgaggaacaaggcaaggctgtcaattacaggaagtactggagaaaatggacgtgttatgactccagaatttcccaaagcagtgcatgctgtcccttacgtgagtcctggcatgggaatgaatgtcagtgtgactgatctctcgtgattgataagaaccttttgagtgccttacacaatggttttcttgtgtgtttattgtcaaagtggtgagaggcatccagtatcttgaagacttttctttcagccaagaattcttaaatatgtggagttcatcttgaattgtaaggaatgattaattaaaacacaacatctttttctactcgagttacagacaaagcgtggtggacatgcacagctaacatggaagtactataatttacctgaagtctttgtacagacaacaaacctgtttctgcagccactattgttagtctcttgattcataatgacttaagcacacttgacatcaactgcatcaagatgtgacatgttttataaaaaaaggaaaaaaaacatttaaaactaaaaaatatttttaggtattttcacaaacaaactggcttttaaataaatttgcttccatattggttgaataagacaaaaacaattaaactgagtgggaagtgaataaaaaaaggctttaggtatcgattccatatttttcaaagccaaatatgtaaatgctaaggaaagtaaacaaagaggagattccaatcttgtaatttaatattgttattaaaactttaatgtatcctattctttaacatttggtgttaatataaaattacttggcaatgcttgacatttgaaataaacatttttctattgttttattgcaagtggtccaattaattttgcttagctacagtttggtcataaatcaagtgagtttaaagacactaccaagttgttaggtgcccagagaaaatttctcccttttaaaaaggccaggtgatttttcaaatgtaatcttgcccccaaagtaatatctgaatatctttttgacatgtctaaatatatatatatataaagaaatatttgttaacacaaaagcatttgatctatgtagataaatgctaatagatttaaaaagctaatattaacaaataccagaatacgtgaagttccatttttaaagtgtttgagcttacagaagagaaacattcattttaaatgaagtaaaaaatgccttgaaagtaattctttagatagttgcccattgattaaattccaaaaactaaatatgtttttagctttaaaattataaaagctgtcataaactttatatattatgaattttaaaatatgtttgagtctcctgcaatatagtttcatcccattgacatcaattaaaaataaccctaatatattatttttatatttattcctcaggtggaatggctattttaatatgcccagtgtggataaaatgtcacatttctgtaacttttgactaaagagcctatatttatctagttaatgaatttaaaggatctatctttcccttcataaaatacctcttatttccattaaagccccccaagtttaattaatttaggattttgaatgattattgacatccaatagttatttttaatatttgtattcttgttatttctggaagaaagcctttgtgtagcacttggtattttgcaaagtgcttttaaaacattcttacttaccgtatttcatagaagggaaggaaaaatgtaaggtttaacagtaagcacttgcattgaacatggaggcatgtggtatcatgatattcttcactaaatttagctgtccctaatcacagatcctaaggtaatataatataattttagtgcatttctcctcatcaggaatgctggaggtgcattttaagttttaataataagtgctagaatgaccaaattgcagactaattgtttccatattgtacttaaaatgagtttttaaaagtgaaaaagaaatgactatatacaatcaatgctatttattgtacctctgggcctactcttctaaaaattgtagcttatcgatttttctctgtcaagcttgaactaatgtaaataattgaaataatgtaaagttatattttcatgtttttatagatacaacatgacaagaatacataatgtaagagtatttcaactatggataatgttgattggataatgcacatctcagttacaagcagtactcatagtttaatatccatgtaacggtgcatcaatatattgctatataaatatgtctgtgtgcatataagtgaaaagtggtcaaacaagagtgatgacagctgtctaaaggtttttttattcattttatataaaaactgttatggaaagaccaaaatgtttatgaactattcttatgtaaatttacaattgtcctttactgtacttttttgtttacagtatagtaccttattttctgctgtgttaagtgggtgtcaaactccaagaagacatacactttctataacttctattgaagatattggaatttccaatttttcatgtgtactatgtcagaaaatgctttcgattttatttttaaatctaacatcggatggcttttccggagtgttgtaaaaacttcaatcatacataaaacatgttcttacaaaaggcaaa

SEQ ID NO: 10634 - protein, 883 aa, Homo sapiens
MQKIMHISVLLSPVLWGLIFGVSSNSIQIGGLFPRGADQEYSAFRVGMVQFSTSEFRLTPHIDNLEVANSFAVTNAFCSQFSRGVYAIFGFYDKKSVNTITSFCGTLHVSFITPSFPTDGTHPFVIQMRPDLKGALLSLIEYYQWDKFAYLYDSDRGLSTLQAVLDSAAEKKWQVTAINVGNINNDKKDEMYRSLFQDLELKKERRVILDCERDKVNDIVDQVITIGKHVKGYHYIIANLGFTDGDLLKIQFGGANVSGFQIVDYDDSLVSKFIERWSTLEEKEYPGAHTTTIKYTSALTYDAVQVMTEAFRNLRKQRIEISRRGNAGDCLANPAVPWGQGVEIERALKQVQVEGLSGNIKFDQNGKRINYTINIMELKTNGPRKIGYWSEVDKMVVTLTELPSGNDTSGLENKTVVVTTILESPYVMMKKNHEMLEGNERYEGYCVDLAAEIAKHCGFKYKLTIVGDGKYGARDADTKIWNGMVGELVYGKADIAIAPLTITLVREEVIDFSKPFMSLGISIMIKKPQKSKPGVFSFLDPLAYEIWMCIVFAYIGVSVVLFLVSRFSPYEWHTEEFEDGRETQSSESTNEFGIFNSLWFSLGAFMQQGCDISPRSLSGRIVGGVWWFFTLIIISSYTANLAAFLTVERMVSPIESAEDLSKQTEIAYGTLDSGSTKEFFRRSKIAVFDKMWTYMRSAEPSVFVRTTAEGVARVRKSKGKYAYLLESTMNEYIEQRKPCDTMKVGGNLDSKGYGIATPKGSSLRTPVNLAVLKLSEQGVLDKLKNKWWYDKGECGAKDSGSKEKTSALSLSNVAGVFYILVGGLGLAMLVALIEFCYKSRAEAKRMKVAKNAQNINPSSSQNSQNFATYKEGYNVYGIESVKI

SEQ ID NO: 10635 - DNA, 7232 bp, Homo sapiens
tgtgtgtgtgtgtgtgtgcgcgcgcgcgtgagtgagagaggagagagggagaagagagcgcgagagagggtgagtgtgtgtgagtgcatgggagggtgctgaatattccgagacactgggaccacagcggcagctccgctgaaaactgcattcagccagtcctccggacttctggagcggggacagggcgcagggcatcagcagccaccagcaggacctgggaaatagggattcttctgcctccacttcaggttttagcagcttggtgctaaattgctgtctcaaaatgcagaggatctaatttgcagaggaaaacagccaaagaaggaagaggaggaaaaggaaaaaaaaaggggtatattgtggatgctctacttttcttggaaatgcaaaagattatgcatatttctgtcctcctttctcctgttttatggggactgatttttggtgtctcttctaacagcatacagataggggggctatttcctaggggcgccgatcaagaatacagtgcatttcgagtagggatggttcagttttccacttcggagttcagactgacaccccacatcgacaatttggaggtggcaaacagcttcgcagtcactaatgctttctgctcccagttttcgagaggagtctatgctatttttggattttatgacaagaagtctgtaaataccatcacatcattttgcggaacactccacgtctccttcatcactcccagcttcccaacagatggcacacatccatttgtcattcagatgagacccgacctcaaaggagctctccttagcttgattgaatactatcaatgggacaagtttgcatacctctatgacagtgacagaggcttatcaacactgcaagctgtgctggattctgctgctgaaaagaaatggcaagtgactgctatcaatgtgggaaacattaacaatgacaagaaagatgagatgtaccgatcactttttcaagatctggagttaaaaaaggaacggcgtgtaattctggactgtgaaagggataaagtaaacgacattgtagaccaggttattaccattggaaaacatgttaaagggtaccactacatcattgcaaatctgggatttactgatggagacctattaaaaatccagtttggaggtgcaaatgtctctggatttcagatagtggactatgatgattcgttggtatctaaatttatagaaagatggtcaacactggaagaaaaagaataccctggagctcacacaacaacaattaagtatacttctgctctgacctatgatgccgttcaagtgatgactgaagccttccgcaacctaaggaagcaaagaattgaaatctcccgaagggggaatgcaggagactgtctggcaaacccagcagtgccctggggacaaggtgtagaaatagaaagggccctcaaacaggttcaggttgaaggtctctcaggaaatataaagtttgaccagaatggaaaaagaataaactatacaattaacatcatggagctcaaaactaatgggccccggaagattggctactggagtgaagtggacaaaatggttgttacccttactgagctcccttctggaaatgacacctctgggcttgagaataagactgttgttgtcaccacaattttggtaatttgctacatatgccatgttttactttgtattttcttatggctaatatctgcaggagtagctatttatattttaggagaataatatctgttttgcttcttttgcaatgttttaatcatttatttcatatttactctgttaaaaggaatacacaagatctagctaaagcattgaaaatgttccccattttctttaaggaacgctacagtttacacagataattcctaccctggtgcttacatcggtgaacaattggggaatgtcttgaagagtgttcctcatgtttctgcgagttattcacctttccattcccacccgatactgtgtaaattctttctttccctttgttacatgatttcatgatgatgtcaagttgtctttattctatctaatgaaagatgatctccttaaaaataaggattatttcccttgtttttactccaaatttcagcactggttggcacatagctagtacacaaaaaatgcatattgaatgaataaggaaaaattgaactggatcttcaacacccaggctttggatagatggaagagagatgtggatcagcatgacaagctgttggtgaaatgaaatggagaaaatggtgttcgttataggacagaattttgtgacaaactattttgttgtattttcttttacaaaaaaaaatgggcttagcagtgaagttgtaaattggtgtgatttattctcctaacaatattgagagcagatatagatagattggtaagggatttgaattaaaacattagtaggcaattgaaaatctcttgataagtgcaaattagacatttgaggatttttgcctttatcatgccattgagaggaactatctcactgagaccccaaatatcctcagtgccactttccaatggagaatattggactgtgttgattcattttttcttgcttcctttttcttatgtttacagggggaagctactctctagctatccttgtagcatcattctaggatattgtatctcacagatgaagtgagacctgaagcctgcgggggtagaatcagtacatcatcatgacaatgatcctgtcagtttgtgtatcactgaccatgaacctgatttccacatgaaccttatctttgggacagcagtgacacagggttttgggtgaatgctggttttgggattggcctaaccttaatcaaggataagggtgtggtgaatccaaacttgaataaaataggttttgagcagtaatattttgctctaagtcctagcagtgacaaacatggctagagaacatacaaagagtttgtggttttgagtatcttgttaactcagtatgcttgcatacaagccgtcttaatgaattatagtgatagacattccgaggctttctggggggaagcattatgcttaaattattcctctactgttgtgtgttcaccatctatattcttcattcactctggctaatgggtaataattaaaccagaagatttgattcaatgagagtacataattaacacagatattttaatcagctaaagcaaagtcttttcatataggaatctccgtatgttatgatgaagaaaaatcatgaaatgcttgaaggcaatgagcgctatgagggctactgtgttgacctggctgcagaaatcgccaaacattgtgggttcaagtacaagttgacaattgttggtgatggcaagtatggggccagggatgcagacacgaaaatttggaatgggatggttggagaacttgtatatgggaaagctgatattgcaattgctccattaactattacccttgtgagagaagaggtgattgacttctcaaagcccttcatgagcctcgggatatctatcatgatcaagaagcctcagaagtccaaaccaggagtgttttcctttcttgatcctttagcctatgagatctggatgtgcattgtttttgcctacattggggtcagtgtagttttattcctggtcagcagatttagcccctacgagtggcacactgaggagtttgaagatggaagagaaacacaaagtagtgaatcaactaatgaatttgggatttttaatagtctctggttttccttgggtgcctttatgcagcaaggatgcgatatttcgccaagatccctctctgggcgcattgttggaggtgtgtggtggttctttaccctgatcataatctcctcctacacggctaacttagctgccttcctgactgtagagaggatggtgtctcccatcgaaagtgctgaggatctttctaagcaaacagaaattgcttatggaacattagactctggctccactaaagagtttttcaggagatctaaaattgcagtgtttgataaaatgtggacctacatgcggagtgcggagccctctgtgtttgtgaggactacggccgaaggggtggctagagtgcggaagtccaaagggaaatatgcctacttgttggagtccacgatgaacgagtacattgagcaaaggaagccttgcgacaccatgaaagttggtggaaacctggattccaaaggctatggcatcgcaacacctaaaggatcctcattaagaaccccagtaaatcttgcagtattgaaactcagtgagcaaggcgtcttagacaagctgaaaaacaaatggtggtacgataaaggtgaatgtggagccaaggactctggaagtaaggaaaagaccagtgccctcagtctgagcaacgttgctggagtattctacatccttgtcgggggccttggtttggcaatgctggtggctttgattgagttctgttacaagtcaagggccgaggcgaaacgaatgaaggtggcaaagaatgcacagaatattaacccatcttcctcgcagaattcacagaattttgcaacttataaggaaggttacaacgtatatggcatcgaaagtgttaaaatttaggggatgaccttgaatgatgccatgaggaacaaggcaaggctgtcaattacaggaagtactggagaaaatggacgtgttatgactccagaatttcccaaagcagtgcatgctgtcccttacgtgagtcctggcatgggaatgaatgtcagtgtgactgatctctcgtgattgataagaaccttttgagtgccttacacaatggttttcttgtgtgtttattgtcaaagtggtgagaggcatccagtatcttgaagacttttctttcagccaagaattcttaaatatgtggagttcatcttgaattgtaaggaatgattaattaaaacacaacatctttttctactcgagttacagacaaagcgtggtggacatgcacagctaacatggaagtactataatttacctgaagtctttgtacagacaacaaacctgtttctgcagccactattgttagtctcttgattcataatgacttaagcacacttgacatcaactgcatcaagatgtgacatgttttataaaaaaaggaaaaaaaacatttaaaactaaaaaatatttttaggtattttcacaaacaaactggcttttaaataaatttgcttccatattggttgaataagacaaaaacaattaaactgagtgggaagtgaataaaaaaaggctttaggtatcgattccatatttttcaaagccaaatatgtaaatgctaaggaaagtaaacaaagaggagattccaatcttgtaatttaatattgttattaaaactttaatgtatcctattctttaacatttggtgttaatataaaattacttggcaatgcttgacatttgaaataaacatttttctattgttttattgcaagtggtccaattaattttgcttagctacagtttggtcataaatcaagtgagtttaaagacactaccaagttgttaggtgcccagagaaaatttctcccttttaaaaaggccaggtgatttttcaaatgtaatcttgcccccaaagtaatatctgaatatctttttgacatgtctaaatatatatatatataaagaaatatttgttaacacaaaagcatttgatctatgtagataaatgctaatagatttaaaaagctaatattaacaaataccagaatacgtgaagttccatttttaaagtgtttgagcttacagaagagaaacattcattttaaatgaagtaaaaaatgccttgaaagtaattctttagatagttgcccattgattaaattccaaaaactaaatatgtttttagctttaaaattataaaagctgtcataaactttatatattatgaattttaaaatatgtttgagtctcctgcaatatagtttcatcccattgacatcaattaaaaataaccctaatatattatttttatatttattcctcaggtggaatggctattttaatatgcccagtgtggataaaatgtcacatttctgtaacttttgactaaagagcctatatttatctagttaatgaatttaaaggatctatctttcccttcataaaatacctcttatttccattaaagccccccaagtttaattaatttaggattttgaatgattattgacatccaatagttatttttaatatttgtattcttgttatttctggaagaaagcctttgtgtagcacttggtattttgcaaagtgcttttaaaacattcttacttaccgtatttcatagaagggaaggaaaaatgtaaggtttaacagtaagcacttgcattgaacatggaggcatgtggtatcatgatattcttcactaaatttagctgtccctaatcacagatcctaaggtaatataatataattttagtgcatttctcctcatcaggaatgctggaggtgcattttaagttttaataataagtgctagaatgaccaaattgcagactaattgtttccatattgtacttaaaatgagtttttaaaagtgaaaaagaaatgactatatacaatcaatgctatttattgtacctctgggcctactcttctaaaaattgtagcttatcgatttttctctgtcaagcttgaactaatgtaaataattgaaataatgtaaagttatattttcatgtttttatagatacaacatgacaagaatacataatgtaagagtatttcaactatggataatgttgattggataatgcacatctcagttacaagcagtactcatagtttaatatccatgtaacggtgcatcaatatattgctatataaatatgtctgtgtgcatataagtgaaaagtggtcaaacaagagtgatgacagctgtctaaaggtttttttattcattttatataaaaactgttatggaaagaccaaaatgtttatgaactattcttatgtaaatttacaattgtcctttactgtacttttttgtttacagtatagtaccttattttctgctgtgttaagtgggtgtcaaactccaagaagacatacactttctataacttctattgaagatattggaatttccaatttttcatgtgtactatgtcagaaaatgctttcgattttatttttaaatctaacatcggatggcttttccggagtgttgtaaaaacttcaatcatacataaaacatgttcttacaaaaggcaaa

SEQ ID NO: 10636 - protein, 456 aa, Homo sapiens
MMKKNHEMLEGNERYEGYCVDLAAEIAKHCGFKYKLTIVGDGKYGARDADTKIWNGMVGELVYGKADIAIAPLTITLVREEVIDFSKPFMSLGISIMIKKPQKSKPGVFSFLDPLAYEIWMCIVFAYIGVSVVLFLVSRFSPYEWHTEEFEDGRETQSSESTNEFGIFNSLWFSLGAFMQQGCDISPRSLSGRIVGGVWWFFTLIIISSYTANLAAFLTVERMVSPIESAEDLSKQTEIAYGTLDSGSTKEFFRRSKIAVFDKMWTYMRSAEPSVFVRTTAEGVARVRKSKGKYAYLLESTMNEYIEQRKPCDTMKVGGNLDSKGYGIATPKGSSLRTPVNLAVLKLSEQGVLDKLKNKWWYDKGECGAKDSGSKEKTSALSLSNVAGVFYILVGGLGLAMLVALIEFCYKSRAEAKRMKVAKNAQNINPSSSQNSQNFATYKEGYNVYGIESVKI

SEQ ID NO: 10637 - DNA, 5682 bp, Homo sapiens
tgtgtgtgtgtgtgtgtgcgcgcgcgcgtgagtgagagaggagagagggagaagagagcgcgagagagggtgagtgtgtgtgagtgcatgggagggtgctgaatattccgagacactgggaccacagcggcagctccgctgaaaactgcattcagccagtcctccggacttctggagcggggacagggcgcagggcatcagcagccaccagcaggacctgggaaatagggattcttctgcctccacttcaggttttagcagcttggtgctaaattgctgtctcaaaatgcagaggatctaatttgcagaggaaaacagccaaagaaggaagaggaggaaaaggaaaaaaaaaggggtatattgtggatgctctacttttcttggaaatgcaaaagattatgcatatttctgtcctcctttctcctgttttatggggactgatttttggtgtctcttctaacagcatacagataggggggctatttcctaggggcgccgatcaagaatacagtgcatttcgagtagggatggttcagttttccacttcggagttcagactgacaccccacatcgacaatttggaggtggcaaacagcttcgcagtcactaatgctttctgctcccagttttcgagaggagtctatgctatttttggattttatgacaagaagtctgtaaataccatcacatcattttgcggaacactccacgtctccttcatcactcccagcttcccaacagatggcacacatccatttgtcattcagatgagacccgacctcaaaggagctctccttagcttgattgaatactatcaatgggacaagtttgcatacctctatgacagtgacagaggcttatcaacactgcaagctgtgctggattctgctgctgaaaagaaatggcaagtgactgctatcaatgtgggaaacattaacaatgacaagaaagatgagatgtaccgatcactttttcaagatctggagttaaaaaaggaacggcgtgtaattctggactgtgaaagggataaagtaaacgacattgtagaccaggttattaccattggaaaacatgttaaagggtaccactacatcattgcaaatctgggatttactgatggagacctattaaaaatccagtttggaggtgcaaatgtctctggatttcagatagtggactatgatgattcgttggtatctaaatttatagaaagatggtcaacactggaagaaaaagaataccctggagctcacacaacaacaattaagtatacttctgctctgacctatgatgccgttcaagtgatgactgaagccttccgcaacctaaggaagcaaagaattgaaatctcccgaagggggaatgcaggagactgtctggcaaacccagcagtgccctggggacaaggtgtagaaatagaaagggccctcaaacaggttcaggttgaaggtctctcaggaaatataaagtttgaccagaatggaaaaagaataaactatacaattaacatcatggagctcaaaactaatgggccccggaagattggctactggagtgaagtggacaaaatggttgttacccttactgagctcccttctggaaatgacacctctgggcttgagaataagactgttgttgtcaccacaattttggaatctccgtatgttatgatgaagaaaaatcatgaaatgcttgaaggcaatgagcgctatgagggctactgtgttgacctggctgcagaaatcgccaaacattgtgggttcaagtacaagttgacaattgttggtgatggcaagtatggggccagggatgcagacacgaaaatttggaatgggatggttggagaacttgtatatgggaaagctgatattgcaattgctccattaactattacccttgtgagagaagaggtgattgacttctcaaagcccttcatgagcctcgggatatctatcatgatcaagaagcctcagaagtccaaaccaggagtgttttcctttcttgatcctttagcctatgagatctggatgtgcattgtttttgcctacattggggtcagtgtagttttattcctggtcagcagatttagcccctacgagtggcacactgaggagtttgaagatggaagagaaacacaaagtagtgaatcaactaatgaatttgggatttttaatagtctctggttttccttgggtgcctttatgcagcaaggatgcgatatttcgccaagatccctctctgggcgcattgttggaggtgtgtggtggttctttaccctgatcataatctcctcctacacggctaacttagctgccttcctgactgtagagaggatggtgtctcccatcgaaagtgctgaggatctttctaagcaaacagaaattgcttatggaacattagactctggctccactaaagagtttttcaggagatctaaaattgcagtgtttgataaaatgtggacctacatgcggagtgcggagccctctgtgtttgtgaggactacggccgaaggggtggctagagtgcggaagtccaaagggaaatatgcctacttgttggagtccacgatgaacgagtacattgagcaaaggaagccttgcgacaccatgaaagttggtggaaacctggattccaaaggctatggcatcgcaacacctaaaggatcctcattaagaaatgcggttaacctcgcagtactaaaactgaatgaacaaggcctgttggacaaattgaaaaacaaatggtggtacgacaaaggagagtgcggcagcgggggaggtgattccaaggaaaagaccagtgccctcagtctgagcaacgttgctggagtattctacatccttgtcgggggccttggtttggcaatgctggtggctttgattgagttctgttacaagtcaagggccgaggcgaaacgaatgaaggtggcaaagaatgcacagaatattaacccatcttcctcgcagaattcacagaattttgcaacttataaggaaggttacaacgtatatggcatcgaaagtgttaaaatttaggggatgaccttgaatgatgccatgaggaacaaggcaaggctgtcaattacaggaagtactggagaaaatggacgtgttatgactccagaatttcccaaagcagtgcatgctgtcccttacgtgagtcctggcatgggaatgaatgtcagtgtgactgatctctcgtgattgataagaaccttttgagtgccttacacaatggttttcttgtgtgtttattgtcaaagtggtgagaggcatccagtatcttgaagacttttctttcagccaagaattcttaaatatgtggagttcatcttgaattgtaaggaatgattaattaaaacacaacatctttttctactcgagttacagacaaagcgtggtggacatgcacagctaacatggaagtactataatttacctgaagtctttgtacagacaacaaacctgtttctgcagccactattgttagtctcttgattcataatgacttaagcacacttgacatcaactgcatcaagatgtgacatgttttataaaaaaaggaaaaaaaacatttaaaactaaaaaatatttttaggtattttcacaaacaaactggcttttaaataaatttgcttccatattggttgaataagacaaaaacaattaaactgagtgggaagtgaataaaaaaaggctttaggtatcgattccatatttttcaaagccaaatatgtaaatgctaaggaaagtaaacaaagaggagattccaatcttgtaatttaatattgttattaaaactttaatgtatcctattctttaacatttggtgttaatataaaattacttggcaatgcttgacatttgaaataaacatttttctattgttttattgcaagtggtccaattaattttgcttagctacagtttggtcataaatcaagtgagtttaaagacactaccaagttgttaggtgcccagagaaaatttctcccttttaaaaaggccaggtgatttttcaaatgtaatcttgcccccaaagtaatatctgaatatctttttgacatgtctaaatatatatatatataaagaaatatttgttaacacaaaagcatttgatctatgtagataaatgctaatagatttaaaaagctaatattaacaaataccagaatacgtgaagttccatttttaaagtgtttgagcttacagaagagaaacattcattttaaatgaagtaaaaaatgccttgaaagtaattctttagatagttgcccattgattaaattccaaaaactaaatatgtttttagctttaaaattataaaagctgtcataaactttatatattatgaattttaaaatatgtttgagtctcctgcaatatagtttcatcccattgacatcaattaaaaataaccctaatatattatttttatatttattcctcaggtggaatggctattttaatatgcccagtgtggataaaatgtcacatttctgtaacttttgactaaagagcctatatttatctagttaatgaatttaaaggatctatctttcccttcataaaatacctcttatttccattaaagccccccaagtttaattaatttaggattttgaatgattattgacatccaatagttatttttaatatttgtattcttgttatttctggaagaaagcctttgtgtagcacttggtattttgcaaagtgcttttaaaacattcttacttaccgtatttcatagaagggaaggaaaaatgtaaggtttaacagtaagcacttgcattgaacatggaggcatgtggtatcatgatattcttcactaaatttagctgtccctaatcacagatcctaaggtaatataatataattttagtgcatttctcctcatcaggaatgctggaggtgcattttaagttttaataataagtgctagaatgaccaaattgcagactaattgtttccatattgtacttaaaatgagtttttaaaagtgaaaaagaaatgactatatacaatcaatgctatttattgtacctctgggcctactcttctaaaaattgtagcttatcgatttttctctgtcaagcttgaactaatgtaaataattgaaataatgtaaagttatattttcatgtttttatagatacaacatgacaagaatacataatgtaagagtatttcaactatggataatgttgattggataatgcacatctcagttacaagcagtactcatagtttaatatccatgtaacggtgcatcaatatattgctatataaatatgtctgtgtgcatataagtgaaaagtggtcaaacaagagtgatgacagctgtctaaaggtttttttattcattttatataaaaactgttatggaaagaccaaaatgtttatgaactattcttatgtaaatttacaattgtcctttactgtacttttttgtttacagtatagtaccttattttctgctgtgttaagtgggtgtcaaactccaagaagacatacactttctataacttctattgaagatattggaatttccaatttttcatgtgtactatgtcagaaaatgctttcgattttatttttaaatctaacatcggatggcttttccggagtgttgtaaaaacttcaatcatacataaaacatgttcttacaaaaggcaaa

SEQ ID NO: 10638 - protein, 883 aa, Homo sapiens
MQKIMHISVLLSPVLWGLIFGVSSNSIQIGGLFPRGADQEYSAFRVGMVQFSTSEFRLTPHIDNLEVANSFAVTNAFCSQFSRGVYAIFGFYDKKSVNTITSFCGTLHVSFITPSFPTDGTHPFVIQMRPDLKGALLSLIEYYQWDKFAYLYDSDRGLSTLQAVLDSAAEKKWQVTAINVGNINNDKKDEMYRSLFQDLELKKERRVILDCERDKVNDIVDQVITIGKHVKGYHYIIANLGFTDGDLLKIQFGGANVSGFQIVDYDDSLVSKFIERWSTLEEKEYPGAHTTTIKYTSALTYDAVQVMTEAFRNLRKQRIEISRRGNAGDCLANPAVPWGQGVEIERALKQVQVEGLSGNIKFDQNGKRINYTINIMELKTNGPRKIGYWSEVDKMVVTLTELPSGNDTSGLENKTVVVTTILESPYVMMKKNHEMLEGNERYEGYCVDLAAEIAKHCGFKYKLTIVGDGKYGARDADTKIWNGMVGELVYGKADIAIAPLTITLVREEVIDFSKPFMSLGISIMIKKPQKSKPGVFSFLDPLAYEIWMCIVFAYIGVSVVLFLVSRFSPYEWHTEEFEDGRETQSSESTNEFGIFNSLWFSLGAFMQQGCDISPRSLSGRIVGGVWWFFTLIIISSYTANLAAFLTVERMVSPIESAEDLSKQTEIAYGTLDSGSTKEFFRRSKIAVFDKMWTYMRSAEPSVFVRTTAEGVARVRKSKGKYAYLLESTMNEYIEQRKPCDTMKVGGNLDSKGYGIATPKGSSLRNAVNLAVLKLNEQGLLDKLKNKWWYDKGECGSGGGDSKEKTSALSLSNVAGVFYILVGGLGLAMLVALIEFCYKSRAEAKRMKVAKNAQNINPSSSQNSQNFATYKEGYNVYGIESVKI

SEQ ID NO: 10639 - DNA, 5240 bp, Homo sapiens
gaggagagagggagaagagagcgcgagagagggggggctatttcctaggggcgccgatcaagaatacagtgcatttcgagtagggatggttcagttttccacttcggagttcagactgacaccccacatcgacaatttggaggtggcaaacagcttcgcagtcactaatgctttctgctcccagttttcgagaggagtctatgctatttttggattttatgacaagaagtctgtaaataccatcacatcattttgcggaacactccacgtctccttcatcactcccagcttcccaacagatggcacacatccatttgtcattcagatgagacccgacctcaaaggagctctccttagcttgattgaatactatcaatgggacaagtttgcatacctctatgacagtgacagaggcttatcaacactgcaagctgtgctggattctgctgctgaaaagaaatggcaagtgactgctatcaatgtgggaaacattaacaatgacaagaaagatgagatgtaccgatcactttttcaagatctggagttaaaaaaggaacggcgtgtaattctggactgtgaaagggataaagtaaacgacattgtagaccaggttattaccattggaaaacatgttaaagggtaccactacatcattgcaaatctgggatttactgatggagacctattaaaaatccagtttggaggtgcaaatgtctctggatttcagatagtggactatgatgattcgttggtatctaaatttatagaaagatggtcaacactggaagaaaaagaataccctggagctcacacaacaacaattaagtatacttctgctctgacctatgatgccgttcaagtgatgactgaagccttccgcaacctaaggaagcaaagaattgaaatctcccgaagggggaatgcaggagactgtctggcaaacccagcagtgccctggggacaaggtgtagaaatagaaagggccctcaaacaggttcaggttgaaggtctctcaggaaatataaagtttgaccagaatggaaaaagaataaactatacaattaacatcatggagctcaaaactaatgggccccggaagattggctactggagtgaagtggacaaaatggttgttacccttactgagctcccttctggaaatgacacctctgggcttgagaataagactgttgttgtcaccacaattttggaatctccgtatgttatgatgaagaaaaatcatgaaatgcttgaaggcaatgagcgctatgagggctactgtgttgacctggctgcagaaatcgccaaacattgtgggttcaagtacaagttgacaattgttggtgatggcaagtatggggccagggatgcagacacgaaaatttggaatgggatggttggagaacttgtatatgggaaagctgatattgcaattgctccattaactattacccttgtgagagaagaggtgattgacttctcaaagcccttcatgagcctcgggatatctatcatgatcaagaagcctcagaagtccaaaccaggagtgttttcctttcttgatcctttagcctatgagatctggatgtgcattgtttttgcctacattggggtcagtgtagttttattcctggtcagcagatttagcccctacgagtggcacactgaggagtttgaagatggaagagaaacacaaagtagtgaatcaactaatgaatttgggatttttaatagtctctggttttccttgggtgcctttatgcagcaaggatgcgatatttcgccaagatccctctctgggcgcattgttggaggtgtgtggtggttctttaccctgatcataatctcctcctacacggctaacttagctgccttcctgactgtagagaggatggtgtctcccatcgaaagtgctgaggatctttctaagcaaacagaaattgcttatggaacattagactctggctccactaaagagtttttcaggagatctaaaattgcagtgtttgataaaatgtggacctacatgcggagtgcggagccctctgtgtttgtgaggactacggccgaaggggtggctagagtgcggaagtccaaagggaaatatgcctacttgttggagtccacgatgaacgagtacattgagcaaaggaagccttgcgacaccatgaaagttggtggaaacctggattccaaaggctatggcatcgcaacacctaaaggatcctcattaagaaccccagtaaatcttgcagtattgaaactcagtgagcaaggcgtcttagacaagctgaaaaacaaatggtggtacgataaaggtgaatgtggagccaaggactctggaagtaaggaaaagaccagtgccctcagtctgagcaacgttgctggagtattctacatccttgtcgggggccttggtttggcaatgctggtggctttgattgagttctgttacaagtcaagggccgaggcgaaacgaatgaaggtggcaaagaatgcacagaatattaacccatcttcctcgcagaattcacagaattttgcaacttataaggaaggttacaacgtatatggcatcgaaagtgttaaaatttaggggatgaccttgaatgatgccatgaggaacaaggcaaggctgtcaattacaggaagtactggagaaaatggacgtgttatgactccagaatttcccaaagcagtgcatgctgtcccttacgtgagtcctggcatgggaatgaatgtcagtgtgactgatctctcgtgattgataagaaccttttgagtgccttacacaatggttttcttgtgtgtttattgtcaaagtggtgagaggcatccagtatcttgaagacttttctttcagccaagaattcttaaatatgtggagttcatcttgaattgtaaggaatgattaattaaaacacaacatctttttctactcgagttacagacaaagcgtggtggacatgcacagctaacatggaagtactataatttacctgaagtctttgtacagacaacaaacctgtttctgcagccactattgttagtctcttgattcataatgacttaagcacacttgacatcaactgcatcaagatgtgacatgttttataaaaaaaggaaaaaaaacatttaaaactaaaaaatatttttaggtattttcacaaacaaactggcttttaaataaatttgcttccatattggttgaataagacaaaaacaattaaactgagtgggaagtgaataaaaaaaggctttaggtatcgattccatatttttcaaagccaaatatgtaaatgctaaggaaagtaaacaaagaggagattccaatcttgtaatttaatattgttattaaaactttaatgtatcctattctttaacatttggtgttaatataaaattacttggcaatgcttgacatttgaaataaacatttttctattgttttattgcaagtggtccaattaattttgcttagctacagtttggtcataaatcaagtgagtttaaagacactaccaagttgttaggtgcccagagaaaatttctcccttttaaaaaggccaggtgatttttcaaatgtaatcttgcccccaaagtaatatctgaatatctttttgacatgtctaaatatatatatatataaagaaatatttgttaacacaaaagcatttgatctatgtagataaatgctaatagatttaaaaagctaatattaacaaataccagaatacgtgaagttccatttttaaagtgtttgagcttacagaagagaaacattcattttaaatgaagtaaaaaatgccttgaaagtaattctttagatagttgcccattgattaaattccaaaaactaaatatgtttttagctttaaaattataaaagctgtcataaactttatatattatgaattttaaaatatgtttgagtctcctgcaatatagtttcatcccattgacatcaattaaaaataaccctaatatattatttttatatttattcctcaggtggaatggctattttaatatgcccagtgtggataaaatgtcacatttctgtaacttttgactaaagagcctatatttatctagttaatgaatttaaaggatctatctttcccttcataaaatacctcttatttccattaaagccccccaagtttaattaatttaggattttgaatgattattgacatccaatagttatttttaatatttgtattcttgttatttctggaagaaagcctttgtgtagcacttggtattttgcaaagtgcttttaaaacattcttacttaccgtatttcatagaagggaaggaaaaatgtaaggtttaacagtaagcacttgcattgaacatggaggcatgtggtatcatgatattcttcactaaatttagctgtccctaatcacagatcctaaggtaatataatataattttagtgcatttctcctcatcaggaatgctggaggtgcattttaagttttaataataagtgctagaatgaccaaattgcagactaattgtttccatattgtacttaaaatgagtttttaaaagtgaaaaagaaatgactatatacaatcaatgctatttattgtacctctgggcctactcttctaaaaattgtagcttatcgatttttctctgtcaagcttgaactaatgtaaataattgaaataatgtaaagttatattttcatgtttttatagatacaacatgacaagaatacataatgtaagagtatttcaactatggataatgttgattggataatgcacatctcagttacaagcagtactcatagtttaatatccatgtaacggtgcatcaatatattgctatataaatatgtctgtgtgcatataagtgaaaagtggtcaaacaagagtgatgacagctgtctaaaggtttttttattcattttatataaaaactgttatggaaagaccaaaatgtttatgaactattcttatgtaaatttacaattgtcctttactgtacttttttgtttacagtatagtaccttattttctgctgtgttaagtgggtgtcaaactccaagaagacatacactttctataacttctattgaagatattggaatttccaatttttcatgtgtactatgtcagaaaatgctttcgattttatttttaaatctaacatcggatggcttttccggagtgttgtaaaaacttcaatcatacataaaacatgttcttacaaaaggcaaa

SEQ ID NO: 10640 - protein, 836 aa, Homo sapiens
MVQFSTSEFRLTPHIDNLEVANSFAVTNAFCSQFSRGVYAIFGFYDKKSVNTITSFCGTLHVSFITPSFPTDGTHPFVIQMRPDLKGALLSLIEYYQWDKFAYLYDSDRGLSTLQAVLDSAAEKKWQVTAINVGNINNDKKDEMYRSLFQDLELKKERRVILDCERDKVNDIVDQVITIGKHVKGYHYIIANLGFTDGDLLKIQFGGANVSGFQIVDYDDSLVSKFIERWSTLEEKEYPGAHTTTIKYTSALTYDAVQVMTEAFRNLRKQRIEISRRGNAGDCLANPAVPWGQGVEIERALKQVQVEGLSGNIKFDQNGKRINYTINIMELKTNGPRKIGYWSEVDKMVVTLTELPSGNDTSGLENKTVVVTTILESPYVMMKKNHEMLEGNERYEGYCVDLAAEIAKHCGFKYKLTIVGDGKYGARDADTKIWNGMVGELVYGKADIAIAPLTITLVREEVIDFSKPFMSLGISIMIKKPQKSKPGVFSFLDPLAYEIWMCIVFAYIGVSVVLFLVSRFSPYEWHTEEFEDGRETQSSESTNEFGIFNSLWFSLGAFMQQGCDISPRSLSGRIVGGVWWFFTLIIISSYTANLAAFLTVERMVSPIESAEDLSKQTEIAYGTLDSGSTKEFFRRSKIAVFDKMWTYMRSAEPSVFVRTTAEGVARVRKSKGKYAYLLESTMNEYIEQRKPCDTMKVGGNLDSKGYGIATPKGSSLRTPVNLAVLKLSEQGVLDKLKNKWWYDKGECGAKDSGSKEKTSALSLSNVAGVFYILVGGLGLAMLVALIEFCYKSRAEAKRMKVAKNAQNINPSSSQNSQNFATYKEGYNVYGIESVKI

SEQ ID NO: 10641 - DNA, 3282 bp, Homo sapiens
ccttacccaaagtttcagatttttagtagctcatagtaacatattattgtggcctttttcccacttcatttttttgtgacaagagttgccacagaagccaaagaaaaacaaattaaaacaaaacaaacaaaaagtctaaaatttgctcaccctgtctgacaagtatgttttatcgtttcaagaaatgcggttaacctcgcagtactaaaactgaatgaacaaggcctgttggacaaattgaaaaacaaatggtggtacgacaaaggagagtgcggcagcgggggaggtgattccaagtattgaaactcagtgagcaaggcgtcttagacaagctgaaaaacaaatggtggtacgataaaggtgaatgtggagccaaggactctggaagtaaggaaaagaccagtgccctcagtctgagcaacgttgctggagtattctacatccttgtcgggggccttggtttggcaatgctggtggctttgattgagttctgttacaagtcaagggccgaggcgaaacgaatgaaggtggcaaagaatgcacagaatattaacccatcttcctcgcagaattcacagaattttgcaacttataaggaaggttacaacgtatatggcatcgaaagtgttaaaatttaggggatgaccttgaatgatgccatgaggaacaaggcaaggctgtcaattacaggaagtactggagaaaatggacgtgttatgactccagaatttcccaaagcagtgcatgctgtcccttacgtgagtcctggcatgggaatgaatgtcagtgtgactgatctctcgtgattgataagaaccttttgagtgccttacacaatggttttcttgtgtgtttattgtcaaagtggtgagaggcatccagtatcttgaagacttttctttcagccaagaattcttaaatatgtggagttcatcttgaattgtaaggaatgattaattaaaacacaacatctttttctactcgagttacagacaaagcgtggtggacatgcacagctaacatggaagtactataatttacctgaagtctttgtacagacaacaaacctgtttctgcagccactattgttagtctcttgattcataatgacttaagcacacttgacatcaactgcatcaagatgtgacatgttttataaaaaaaggaaaaaaaacatttaaaactaaaaaatatttttaggtattttcacaaacaaactggcttttaaataaatttgcttccatattggttgaataagacaaaaacaattaaactgagtgggaagtgaataaaaaaaggctttaggtatcgattccatatttttcaaagccaaatatgtaaatgctaaggaaagtaaacaaagaggagattccaatcttgtaatttaatattgttattaaaactttaatgtatcctattctttaacatttggtgttaatataaaattacttggcaatgcttgacatttgaaataaacatttttctattgttttattgcaagtggtccaattaattttgcttagctacagtttggtcataaatcaagtgagtttaaagacactaccaagttgttaggtgcccagagaaaatttctcccttttaaaaaggccaggtgatttttcaaatgtaatcttgcccccaaagtaatatctgaatatctttttgacatgtctaaatatatatatatataaagaaatatttgttaacacaaaagcatttgatctatgtagataaatgctaatagatttaaaaagctaatattaacaaataccagaatacgtgaagttccatttttaaagtgtttgagcttacagaagagaaacattcattttaaatgaagtaaaaaatgccttgaaagtaattctttagatagttgcccattgattaaattccaaaaactaaatatgtttttagctttaaaattataaaagctgtcataaactttatatattatgaattttaaaatatgtttgagtctcctgcaatatagtttcatcccattgacatcaattaaaaataaccctaatatattatttttatatttattcctcaggtggaatggctattttaatatgcccagtgtggataaaatgtcacatttctgtaacttttgactaaagagcctatatttatctagttaatgaatttaaaggatctatctttcccttcataaaatacctcttatttccattaaagccccccaagtttaattaatttaggattttgaatgattattgacatccaatagttatttttaatatttgtattcttgttatttctggaagaaagcctttgtgtagcacttggtattttgcaaagtgcttttaaaacattcttacttaccgtatttcatagaagggaaggaaaaatgtaaggtttaacagtaagcacttgcattgaacatggaggcatgtggtatcatgatattcttcactaaatttagctgtccctaatcacagatcctaaggtaatataatataattttagtgcatttctcctcatcaggaatgctggaggtgcattttaagttttaataataagtgctagaatgaccaaattgcagactaattgtttccatattgtacttaaaatgagtttttaaaagtgaaaaagaaatgactatatacaatcaatgctatttattgtacctctgggcctactcttctaaaaattgtagcttatcgatttttctctgtcaagcttgaactaatgtaaataattgaaataatgtaaagttatattttcatgtttttatagatacaacatgacaagaatacataatgtaagagtatttcaactatggataatgttgattggataatgcacatctcagttacaagcagtactcatagtttaatatccatgtaacggtgcatcaatatattgctatataaatatgtctgtgtgcatataagtgaaaagtggtcaaacaagagtgatgacagctgtctaaaggtttttttattcattttatataaaaactgttatggaaagaccaaaatgtttatgaactattcttatgtaaatttacaattgtcctttactgtacttttttgtttacagtatagtaccttattttctgctgtgttaagtgggtgtcaaactccaagaagacatacactttctataacttctattgaagatattggaatttccaatttttcatgtgtactatgtcagaaaatgctttcgattttatttttaaatctaacatcggatggcttttccggagtgttgtaaaaacttcaatcatacataaaacatgttcttacaaaaggcaaa

SEQ ID NO: 10642 - protein, 54 aa, Homo sapiens [sequence omitted]

SEQ ID NO: 10643 - DNA, 1384 bp, Homo sapiens
tcttagcctaagctgtacttcactgtaatgaaacctgagaataacatgtgcctcatggagctgtcgtaaggaatcagttgattaattgagaattctacgctccagcaatagcagagatagatgacacaaatgacattcgcccgcccatggctgcccatggaccaattggcatgtgcttccttccctctgaggcccatagaagccctggactcaatctgactcaaggagatgatgggactacaagctgcggaaaggagctacccactccaaggtctctgctgagagctgaacactcatcaagacaccctgcctgcagggaggagttacccaatgcaggtctcctctgagctgttccattgctcaataaaactcctctttgccttgctcaccctccacttgtccgtctacctcattcttcctggacacaggacaagaactcgggacctgcaaaagggctgtaacacaaacagggctgaaacacatcccttgctcgccatattgtaggtgacaagaaggagagacaagagaaggagagaagagctgcagcccttctgggagcccaggcctaggagatccctgagccagggctatgacaccctctttggggctctatggttcctggtgtctccaagcttccggatgccactgcattcctcagtgccagccgtggaagctgctgtggtacatttggtccagccacagccttgcagggagctggctcccatgctggtgcctatagctccccgccccaccacagccagcttgcctggccatgcacagtggccagacctcatgctcactcatgcacccttcgccactccgcacctggcccgcccttggcaggtatgggattcagggatccagccccagccgattgcagcctgccaggccgagtgggtggaatgagacctgtgggcccaagcaaaactcaggcaaaggcaccactggccacataggtttccagctggtgaagtgacaccctgagaatcccatgacattatcatacactcttcttaaaaactgaacccgagggaaaaaatgatacccttgaacggtgaggcataatgaaagtttatttaatgattcttgtatttattactactgctttactgcctgtagcaggtatcacaatgtaccgatttattaggctgtagttagaaaacaattgcttctttacacattataaatgtaacctggcattatatttaagctaagaacatgcatgtttttaatactcgaatttcaactcaagagaaaaaaaagttctatgttacactagtgtgatggattttttaattactaaatgctaatattaagggtaatttgaggtaaaacaaaaaataaaaagttcatgtagtaatcaaagcatctactctaggttgtt

SEQ ID NO: 10644 - protein, 32 aa, Homo sapiens
MTQMTFARPWLPMDQLACASFPLRPIEALDSI

SEQ ID NO: 10645 - DNA, 4931 bp, Homo sapiens
cctccctgcaagctgagggagccggctccggctctggccttggccagcccataaaggggctcccacagtgcagcggtgggctgaagggctcctcaagtgccgccaaagtgggagcccaggcagaggaggcgccaagagcaagtgagggctgtgaggactgccagcacgctgtcactatgatgtgtcatggctaggacttcccaaagctgccatggaagaataatggcttctgtcttttccatcatcctggtctacatttggccattcattggtggaatctgatgaaaattctcctggtaggtgagttgggaaaattgagttttcaggctctgtacctccatggggaaaagggaggagctttaaaaagcaggaatggcattgttttcaatgaaataactaaaaaacactggacctctctttttaccatgatttcacatctgcttgtttaaaggaaactttatgattttttatgttgattaatgttcttataaatcaagtaattacatcttggtgtggttctttatgtaattttacatattcatggagtatatacatctttgacaaatgtagcttaggcttaatgttttgacatttcactcattctaacaatttgatgcaaatactctattgaaattcttcctgctaaggtcaacaaggactagttgtcaatgcccatggctcatttaaaattcttgttacattttctttttctgtgttattattagtagtaacagttcacattcttgaaatcattgttcacttgacctttgttcagtagggttgaactttattatgagccctgtccttactcagcctccatttctattactattcctttttttgcctccattttactcctttttctttaccaacatcatgttttttcctaagtcttgttttcttctcccttacagctctataaattatctctgtctagcattactctgaatagctctatttaaatagctcacaaaaatgataattcataatctttatatatataagaataactttaatattcaatgacttctctttctgtattctctcttttggttacttcattatttattcagtgaactaaaagatcaaattcaataccacagttaaaggcacacatggaaactatgctttctttgactttttaccctggtctagaacacagcacaatgtcaaaaatgatggttaaacaaataagatatttatctaaagaaaacaaaaaacatatatcatgtaaataaatttgagaaaatgaagtggcagcaaaattgttcaaaacctcatctgttagaaactcatttcccataccagaccaactcattccaacagaagcatgtggtgtacatgataaggaatctctaagtgatcaagacagaaataaaaagcgatgcaagttagtgaatataagttttcatatgtcgatgagtgacaagtatttatttaagaagatgtactagtctcggaagtgtttacattaatgaaataaactggaaggttatcaaaagctaactgcaaaatcacaaagaagaccaatcaccttgttcgctaaggcggctgtctgagaacgtctccagattaggaagcacacaggcaccttgcttttcgaatttgcaggagccacatataagtatatttaacataggcattaggattatagacaatagcaaatctattctagtgatgtaaagtatatgttccttaatatatcattcagaactcaccctttctaccacatctaatgtggattgcgtgccttatcccacctttttattttttacattcctggagcacctggtcacaacttgaacatcagtggtatcactgactgcatggaaattacctggctacttgtatgccttcaaacagaagactgaaccatttggagggatgtgtgactatacttttttttaaatctttatatcacttcacatggctcttattagttgttcaatagttgctgaatattgacactcgtatgagtgagaagtcctgacaatgactgcaataaactcaagtcacccttgaaatagacagaaatgcttgagagatgccactcagtgaatcaatttgataagcaagatgtaggatttgtagaacagtaaaggaaatggaatccagatttggggtgttgatggggagattctgaacaattggtaagtatgtatattaaatgaaagattttcaaatttctaaatgagctttttaaaagtacaatttacatacaaagaaaattcacttttaatgtagttctgtgagtacagatatatgtatatagtagtgtaaccatcaccataatgaaaatttaaagtggttctaacccccaaattcctgcatgtctgttgtagacaactcctccctcacactctcaatctttgttagccactgctatgttttctatctctatactcttaccttttccatgatgtcatagaaatataatcttactagactctcagattgtctactttcacttaacataataaatttgagattcttgcacgtatgagtttttttttttcctttttgagtattattgcctcatttaaagacattgtagtttgtttattagctcaccatttaaacatttcggttgattctagtttggagtaattattttaaaaatcaactggaaccattcaaatacaggtaggttttgtgagaatgtaagtttttatttcacttgtgtaaatactagactaaaattgtgatgccacttagtgtttaactttctataaaattgccaaactgttttctaaagtggggtgccgttttttttctttgtaggatctatgagaattccagttgctccacttgtagacactaagtattgtcaatttttaaagctattctaccaagtgcataattatatcttattgtggttttatttgcacttatctgataactaataatattacatattaccatgtacacattttccattcacatatatatctatgaatggaaaatatatttatatttcataatatatatttcattatatatatattccataaattgtcttcaaaagttttgcctattattacacttggttattttatggaggtaaagtgggattttcttgaggtaaagttaatataacataaaattgataattttaatgtgcacaaaagcatttagaacatatacaatgttatgtaactgtcacctctatatagtaccaaaacattttcatcaccccaaagaaaattctgcattgattaagcagttaccctgaattccaatctctgccccagctgctggcaaacatcaatctgtctgtctctaaagatgtacctattctggatatttcaaataagtcatatctcagatcacatacaatatgtgatcttactggctggcttccttcactaagcaagatgtttttgaggttcacccatattgcattatctattaatacttcatttattttttatggctgaataaaattccattaagattatatattgcaatttgtttttccattcatctgctgatggacagctgtgtcatttctatcttttggctattgtgaatatcgcactgtaaactgtgaacatacgtatacaagtatttgagtacctgtttttaatttttgggtatgtatctagaagtggaattactgggttaattgttaattctaattaattttttatgtagccaccaaattgttttctatactggctaaacaattttatgtatttctatatattttcaccattgccgatttcattttaaaaagaattatatccatcttagtagatgtgaagtagtacctcattgtggattaaatttatgttttcccagtgagaccaatgggattgagaattatctcctatgttttttgtctatttctctattttctttgaagagatgtctattcaagttctttgcccatttttcagttgggctatttgtatttttgttgttcagttgcaagagttatttatatattctggataacacatattcagataggtgatttgcaaatgttttttctcattgtgtttgtgatttactttttttttacaatgtattttgatgcacacattttttattttgaagtcaaatttatctgtttttaaaaatttcattgccaatgcttttgatattacatttatgttattgacccattttgaaatcagaaaatataagtcttccaaatttattatttttttaaagattgtttttgctactcaggaccacttgcaattcattatgaatttaagaataggcttttccattttttcaaaataaaaggctattgatattttgatagagattgctttcagtctgcagattccttaggaagtattgatatgtaaatagtaatgtcttcctatccggaacactggatttatttccatttattaaggtcttccttaagcaatgctttcttgtatttattgcacagattttacctttttggaccaacttatttctaagtataagattctattggaacctactgtaaataaaattgtttctttttttttttttttttcttttgatggagtcttgccccgtcgcccaggctggagtgcagtagtgtgatcttagctcactgcaacctcccgatcccaggttcaagtgattctcctgcctcagactcccaggtagctaggattacaggtgtgtgccaccatgccaggctaatttttgtatttctagtagagacagagtttcaccatgttaggcaggctggtcttgaactcctgaccttaggtgatccatccacctgggccccccaaagtgctgggattacaggcgtgagccaccgcacccggcctgcttattcattttcttttgggggtatttgctggtaatttaaaggaaaacaactcattttttgtgcattgatcttgtatcctggactgttaattcgtttactattattaaataacaaattattaataataaattaattatcaattgtg

SEQ ID NO: 10646 - protein, 31 aa, Homo sapiens
MARTSQSCHGRIMASVFSIILVYIWPFIGGI

SEQ ID NO: 10647 - DNA, 876 bp, Homo sapiens
cgcataagacatggccagctattccttgccttctgccataattgtgaggcctctccagccatatggaactattcctcttaggactctagatgcacggagagtggccagattaatacagactggcaaaagaagaacttggcaaagtgatttgatcacacacttctcaccctcacatctcctgacagttcccctaatccctgccccacttccccgccatgggcttccatcaggaaactccttgatatcatcttcgagaagaaaactgaggcatagaacatttgggaatgaatctaagactacacatctagaatagcagagtgcatatcatcgtcattcatctcacttttccttctaacatcaaggatctatacaaggccgttgatccccactgctgcatatttcttggatctatctgaggtcccagatcccattgcctcttcatcctcacagccactgctgggtctgggtcctcataagttctatctggaagtttcagtacagtctttctcgatgtgctccacactgttatgggaatgaattttcaaacacccctgctttgaagatagggtgcttccagggtaaggcataaagttctccagggaggcaacagtgcagtggtatacagacagcacagcctttcattcctgcgaggccacttacacctgagtgaggatgggaagaagagaagacaaggacgaatgtaggaaactgtcagttaaatgacaatgtatggatggcaagagagaaagaatagtcagtgatggaaaaataatcaataacagctttgggcttttgagtttgaaaatggtgtgtagggtgagacaacaataggaaacttctaataaagaatgaacaagtacttctacttgttcaatg

SEQ ID NO: 10648 - protein, 100 aa, Homo sapiens
MASYSLPSAIIVRPLQPYGTIPLRTLDARRVARLIQTGKRRTWQSDLITHFSPSHLLTVPLIPAPLPRHGLPSGNSLISSSRRKLRHRTFGNESKTTHLE

SEQ ID NO: 10649 - DNA, 777 bp, Homo sapiens
ttaaagtatttcatcagttggacctaccaaatatcaagtcaggatttggccatctctgctcttgccattccacctctcacgactctatcctcaaaacctgggcttggctgggaacaagagatttaaatcagactcttttaggttttcctaataagactgctgcaaataaggattgagccctagctgaaggcctcatccttccatgccctttgcttgtccacccatcaacaagccaggatgaggagaagcaaagacagcagcatttacccacagaaccctttgttggcagaagcaaaaattgatagtggaacacatgagggcagttccacaagatccgtccatgaagagtcggatttatcaagaaaaatattattctttcgtgaacaagaaagaaaacaagacaatttaaaaacatctagattaaagatgagcatgtcaatttcaggtgtaagtggcctcgcaggaatgaaaggctgtgctgtctgtataccactgcactgttgcctccctggagaactttatgccttaccctggaagcaccctatcttcaaagcaggggtgtttgaaaattcattcccataacagtgtggagcacatcgagaaagactgtactgaaacttccagatagaacttatgaggacccagacccagcagtggctgtgaggatgaagaggcaatgggatctgggacctcagatagatccaagaaatatgcagcagtggggatcaacggccttgtatagatccttgatgttagaaggaaaagtgagatgaatga

SEQ ID NO: 10650 - protein, 114 aa, Homo sapiens
MRRSKDSSIYPQNPLLAEAKIDSGTHEGSSTRSVHEESDLSRKILFFREQERKQDNLKTSRLKMSMSISGVSGLAGMKGCAVCIPLHCCLPGELYALPWKHPIFKAGVFENSFP

SEQ ID NO: 10651 - DNA, 603 bp, Homo sapiens
attaatcacacttcttaaacacatctcttgaccggggtgttctcaccatgccctttctacaaacaaaaagaaggcaatgtatcgcatcctgtattaccttcccctgacctcatagcttcccaaaacaggaacaatcatgggctttgaagtaaagaatgaagatgtggagacctggagacaggtggcacctcgtgcttcctccgaagggagagcccatttcctaacagctggatcaaaggcatgaaatgaacatggagtccctgaagatgaagagaaggcatggcttccagggagaaattgtacattacaggaatgcagatgtgattcctatggatgagggtaacctagaggctagaagaacaataggacagaagaagcctgggtccctgaacaaccttgtggagcatagacacctacgtggcctggactgccagctcacaatgggcctctctgtgagagaaggaaacttccctcttgtttaagcaactgtgcttttgagaatctcttggtctataccctaatgaataaggccatcataaatggatatcaaagtaaggaaatttgtgtaaatgatttaataaaacattacctcaggtatgaaat

SEQ ID NO: 10652 - protein, 78 aa, Homo sapiens
MNMESLKMKRRHGFQGEIVHYRNADVIPMDEGNLEARRTIGQKKPGSLNNLVEHRHLRGLDCQLTMGLSVREGNFPLV

SEQ ID NO: 10653 - DNA, 499 bp, Homo sapiens
catctcttgaccggggtgttctcaccatgccctttctacaaacaaaaaaatgaagatgtggagacctggagacaggtggcacctcgtgcttcctccgaagggagagcccatttcctaacagctggatcaaaggcatgaaatgaacatggagtccctgaagatgaagagaaggcatggcttccagggagaaattgtacattacaggaatgcagatgtgattcctatggatgagggtaacctagaggctagaagaacaataggacagaagaagcctgggtccctgaacaaccttgtggagcatagacacctacgtggcctggactgccagctcacaatgggcctctctgtgagagaaggaaacttccctcttgtttaagcaactgtgcttttgagaatctcttggtctataccctaatgaataaggccatcataaatggatatcaaagtaaggaaatttgtgtaaatgatttaataaaacattacctcaggtatgaaataa

SEQ ID NO: 10654 - protein, 78 aa, Homo sapiens; identical to SEQ ID NO: 10652

SEQ ID NO: 10655 - DNA, 1733 bp, Homo sapiens
aggaaggaaccacatgtgaaaccacttacctgtttaaccctatgaacttgaagagaacatgtaatgccacttaaaatacctaagctcgggttctgccttcagcgactcctggtagtagtgcccttatgagccatttatcaagaagtgataggatcgcattctgtcacccagtctggagtgcaatggcatgaccttggctcactgcagcctcgatctcccagcctcaatcaatcctttcacctcagcctcctgagtagcttgaactacagctgaggatgctatgaaaaccccttgaggaaacaaaggcaccttgggggccattgagaactcctgacgaagagggctcagctgccagacctgctcaagaaagacctcagaaatctctatggggctgtcagaagaaaaggtttgaaaagggtctggagagactgaaatttgtctgccttggacttttcttttgacaattcacatccaacttaagcagaatcattgtttattcttattatgccaggtttccttttctggtctgcaggttctctagggtttcataggctagtagttggaattttcatatttccaaagcattggggattttgcaaaaacaaaatctaaaggatattcagcagcacagtttacttaggaggttttaatcataataatctgcataatgtatgagaatttctacctcagctgcctcctttctttctctttcgtgtctgggaaaaagccagggatttttcccttcctctgatttaaataccttataaaattttggtggaagcattttgtcctattctgtcttcctgattcattttctgctgtaatgagcaaaattaatttgcaagagctgctactgacatagtgtaataaactgggtcataggtagaatcagtgccgccttatgacccttagctgtcattgctttaaggaatttggcatggtcctcgaaggccagaaggcaatgtgggttgcatcctacagcttttgagatctcagagacttactgcacccatggctgggaatgaactgtaaatgctgacactggtaactaggtgccaaactgaagtgatcacaacctaatctgagccaaaaggcatttctttgcatcaggcataaagcaacatcaaactcccataacccacacacaacacagaaatcattactgaagagattcaacatcatcatgccagacactaagtgagttatttctctccttccctgtctcaccacagtttcctcccacttggtcacacatggtaagcattcatgtgtgcgaaggcattttatgccttcgacctaaccccgaccacagtcccctagtcttatcagagatctgcactccccaccatttgagcacgatggagtgcatatttccagtgcaaaaagactgatatcattatgattttcattaactagttgccagcttgcattcttttttctccctttttttctctctcaacagcacttctgtcctcagcccaaccccagccagaaaaggtgttgctacattcagtgaaaaattattattagtatagacatgaaatttgatgataatgtagattgttttgtgtcatctgcaggctgtcacaatacactctgcatcactgaaatgtgttgaccagaaggatgatggtgttgtcatgatactgaggtcttttaattaattactttgtgactttcatagcatttagaaaacggagaacagggtattttcttgaacagcctagccaaat

SEQ ID NO: 10656 - protein, 45 aa, Homo sapiens
MVSIHVCEGILCLRPNPDHSPLVLSEICTPHHLSTMECIFPVQKD

SEQ ID NO: 10657 - DNA, 842 bp, Homo sapiens
ggaaccacatgtgaaaccacttacctgtttaaccctatgaacttgaagagaacatgtaatgccacttaaaatacctaagctcgggttctgccttcagcgactcctggtagtagtgcccttatgagccatttatcaagaaggctttaagatacaagatacttcaatgaataaaacaaagacctttgctttcctgaaacttgagatcaaatggaggacacacaaaaacaacgcacctacaaatcaccatattgtgtgtcaggagcctctaggttaccctcatccataggaatcacatctgcattcctgtaactgcataaggagaaagaaggtggaagctgaggatgctatgaaaaccccttgaggaaacaaaggcaccttgggggccattgagaactcctgacgaagagggctcagctgccagacctgctcaagaaagacctcagaaatctctatggggctgtcagaagaaaaggtttgaaaagggtctggagagactgaaatttgtctgccttggacttttcttttgacaattcacatccaacttaagcagaatcattgtttattcttattatgccaggtttccttttctggtctgcaggttctctagggtttcataggctagtagttggaattttcatatttccaaagcattggggattttgcaaaaacaaaatctaaaggatattcagcagcacagtttacttaggaggttttaatcataataatctgcataatgtatgagaatttctacctcagctgcctcctttctttctctttcgtgtctgggaaaaagccagggatttttcccttcctctgatttaaataccttataaaattttggt

SEQ ID NO: 10658 - protein, 40 aa, Homo sapiens
MNKTKTFAFLKLEIKWRTHKNNAPTNHHIVCQEPLGYPHP

SEQ ID NO: 10659 - DNA, 314 bp, Homo sapiens
ctcattttttaggaaggaaccacatgtgaaaccacttacctgtttaaccctatgaacttgaagagaacatgtaatgccacttaaaatacctaagctcgggttctgccttcagcgactcctggtagtagtgcccttatgagccatttatcaagaagaaaccagggcacttggaatgttttgagggaggcagatctgtccccgtcatggagcactgactaccatcttccctgaactcttacgtgaggaagaacaaacctctaaggttgtacaagaagcatggtaccagcacctgcttctggtgaggcctcaggctg

SEQ ID NO: 10660 - protein, 31 aa, Homo sapiens
MSHLSRRNQGTWNVLREADLSPSWSTDYHLP

SEQ ID NO: 10661 - DNA, 3021 bp, Homo sapiens
aagagggaggggtctgtgcgcccgcagagtcgccaggcgccctgcgagttgtctccgctgggaggggcgaggctgtcacttgccagggcgcgaggagcctcagcgcggcttggagaacttggccccgcgcagcgtctggtcactcgctctcctctggggactgcagagaagcaggacctcgggccatggattctactgaagaaaggtagccatggaagagaatatggaagagggacagacacaaaaagggtgttttgaatgctgtatcaaatgcctggggggcattccctatgcctctctgattgccaccatcctgctctatgcgggtgttgccctgttctgtggctgcggtcatgaagcgctttctggaactgtcaacattctgcaaacctactttgagatggcaagaactgctggagacacactggatgtttttaccatgattgacatctttaagtatgtgatctacggcatcgcagctgcgttctttgtgtatggcattttgctgatggtggaaggtttcttcacaactggggccatcaaagatctctatggggatttcaaaatcaccacttgtggcagatgtgtgagcgcttggttcattatgctgacatatcttttcatgttggcctggctgggagtcacggctttcacctcactgccagtttacatgtacttcaatctgtggaccatctgccggaacaccacattagtggagggagcaaatctctgcttggaccttcgtcagtttggaattgtgacaattggagaggaaaagaaaatttgtactgtctctgagaatttcttgaggatgtgcgaatctactgagctgaacatgaccttccacttgtttattgtggcacttgctggagctggggcagcagtcattgctatggttcactaccttatggttctgtctgccaactgggcctatgtgaaagacgcctgccggatgcagaagtatgaagacatcaagtcgaaggaagagcaagagcttcatgacatccactctactcgctccaaagagcggctcaatgcatacacataaatgcatcttcctgttctttctaccatttgaatgcattggtgtttaactaagggccatccaaccatccaacctttaaaaaacaaaacgaaagtgcttctcatcaatgatatgtaaggtgacttatgaatcacctgagtacaattctttgttgtttagcacttaaatttcccaatttattaaattgatgtaaatcagatcttttctacaagctcctatccagccttttttttgaaatttctcaaactcatttactagttctgtaaaatcaaagatactaacattgtcaaatgcaaagatttgtttgatttttaaccacttcccatgtgttatacataacaccttttgcattatttcttatgttttgaaaagaaaatagctttttatactttttagttttgatttcggtaactagtttaactacaggtaaccttcaaagggaccattgtacattatgaacaatagatagagattacatcttgatgactcttgaaatatggaaattttgtctgaagatcagtggccatattactgtaggccctggttcatgttttcatcaatctaaggtgcaatttctaaatttgtaagagtaggtttaaaaaaaaaagtgcttcttatctttgttaacattgtacttttccttgatgttcttaaaaggtatttccctcagattactcatgtttatgttgtgagcatgtagaaacagtaatgctaatgcatggctagttgcctttttaagattgtgacaccaggcttaccttttaaagtttagtatatagagacaattttaatggaaataactactgtagactattgaagaatgatctctttgtgatttaagaagtggctggattggaacttttaatatgctaatgtggaaaattaattacctttatgaaggtggtttattacaaataagcacactaacccctcggaagttgttttacctactttaaaagttttaatggattgcacctctgtaaactattcctaaaatgtgtatgatatatttgaaaaggcttccattaatataatagctttgcttgcagccttccaatctatgttggtttacctgtagtgttttataaagtgtggtcagaggcccctatagaatgtattgtttgaaagtgtagtgatatatttgtgtttttatttcaagtaagtcattttaaccgaatgttcattcatattcatttataaaaagtacctgtatcaaaggaattttaacaaagagcaatcagtattattggaccaaatttggtgtttgttttcaccttgacgctcttcttttcattatttctaatgctacaagaatgctgtaaagtgtcttctaaaatgatgtagcctgacaagacatttttttcagtgtataaaactaggtagtattgtgcactgatttgaccattgtgaaatcctttctcagtgtaactgcatttctaataaaaatttattgagtgaaacaatctttgtacaatgactagtcatgcatcatcagtaattttacaagttcttgtagtaggtagggggtactactagggatatctgtggcatgattatgcattccgtagtattatttaattaatttggggttcattttgcttccttttctttatgcttagattatcttactggttcaacatttttctgatatatgcagtattacagatattcagcaaaagtattaatgggcttctttaaattctatattatagtatttcagttccgtgtcttaacagtttgtgataatttctaaaactgtcttttcaacttatgtaatgatgttgacacttttggcttttatttctggtattagagtttgtattttcacagagtgctttgtagcaggcattacaattaatctgttttgtacataaatgtgccaacagcttgatggtggcgtttttgaaatgtagaacagagtgcttgcaaaatgtaataaatacacttgtgtactttgtgtacttattattagcttc

SEQ ID NO: 10662 - protein, 278 aa, Homo sapiens; identical to SEQ ID NO: 952

SEQ ID NO: 10663 - DNA, 2957 bp, Homo sapiens
aagagggaggggtctgtgcgcccgcagagtcgccaggcgccctgcgagttgtctccgctgggaggggcgaggctgtcacttgccagggcgcgaggagcctcagcgcggcttggagaacttggccccgcgcagcgtctggtcactcgctctcctctggggactgcagagaagcaggacctcgggccatggggtgttttgaatgctgtatcaaatgcctggggggcattccctatgcctctctgattgccaccatcctgctctatgcgggtgttgccctgttctgtggctgcggtcatgaagcgctttctggaactgtcaacattctgcaaacctactttgagatggcaagaactgctggagacacactggatgtttttaccatgattgacatctttaagtatgtgatctacggcatcgcagctgcgttctttgtgtatggcattttgctgatggtggaaggtttcttcacaactggggccatcaaagatctctatggggatttcaaaatcaccacttgtggcagatgtgtgagcgcttggttcattatgctgacatatcttttcatgttggcctggctgggagtcacggctttcacctcactgccagtttacatgtacttcaatctgtggaccatctgccggaacaccacattagtggagggagcaaatctctgcttggaccttcgtcagtttggaattgtgacaattggagaggaaaagaaaatttgtactgtctctgagaatttcttgaggatgtgcgaatctactgagctgaacatgaccttccacttgtttattgtggcacttgctggagctggggcagcagtcattgctatggttcactaccttatggttctgtctgccaactgggcctatgtgaaagacgcctgccggatgcagaagtatgaagacatcaagtcgaaggaagagcaagagcttcatgacatccactctactcgctccaaagagcggctcaatgcatacacataaatgcatcttcctgttctttctaccatttgaatgcattggtgtttaactaagggccatccaaccatccaacctttaaaaaacaaaacgaaagtgcttctcatcaatgatatgtaaggtgacttatgaatcacctgagtacaattctttgttgtttagcacttaaatttcccaatttattaaattgatgtaaatcagatcttttctacaagctcctatccagccttttttttgaaatttctcaaactcatttactagttctgtaaaatcaaagatactaacattgtcaaatgcaaagatttgtttgatttttaaccacttcccatgtgttatacataacaccttttgcattatttcttatgttttgaaaagaaaatagctttttatactttttagttttgatttcggtaactagtttaactacaggtaaccttcaaagggaccattgtacattatgaacaatagatagagattacatcttgatgactcttgaaatatggaaattttgtctgaagatcagtggccatattactgtaggccctggttcatgttttcatcaatctaaggtgcaatttctaaatttgtaagagtaggtttaaaaaaaaaagtgcttcttatctttgttaacattgtacttttccttgatgttcttaaaaggtatttccctcagattactcatgtttatgttgtgagcatgtagaaacagtaatgctaatgcatggctagttgcctttttaagattgtgacaccaggcttaccttttaaagtttagtatatagagacaattttaatggaaataactactgtagactattgaagaatgatctctttgtgatttaagaagtggctggattggaacttttaatatgctaatgtggaaaattaattacctttatgaaggtggtttattacaaataagcacactaacccctcggaagttgttttacctactttaaaagttttaatggattgcacctctgtaaactattcctaaaatgtgtatgatatatttgaaaaggcttccattaatataatagctttgcttgcagccttccaatctatgttggtttacctgtagtgttttataaagtgtggtcagaggcccctatagaatgtattgtttgaaagtgtagtgatatatttgtgtttttatttcaagtaagtcattttaaccgaatgttcattcatattcatttataaaaagtacctgtatcaaaggaattttaacaaagagcaatcagtattattggaccaaatttggtgtttgttttcaccttgacgctcttcttttcattatttctaatgctacaagaatgctgtaaagtgtcttctaaaatgatgtagcctgacaagacatttttttcagtgtataaaactaggtagtattgtgcactgatttgaccattgtgaaatcctttctcagtgtaactgcatttctaataaaaatttattgagtgaaacaatctttgtacaatgactagtcatgcatcatcagtaattttacaagttcttgtagtaggtagggggtactactagggatatctgtggcatgattatgcattccgtagtattatttaattaatttggggttcattttgcttccttttctttatgcttagattatcttactggttcaacatttttctgatatatgcagtattacagatattcagcaaaagtattaatgggcttctttaaattctatattatagtatttcagttccgtgtcttaacagtttgtgataatttctaaaactgtcttttcaacttatgtaatgatgttgacacttttggcttttatttctggtattagagtttgtattttcacagagtgctttgtagcaggcattacaattaatctgttttgtacataaatgtgccaacagcttgatggtggcgtttttgaaatgtagaacagagtgcttgcaaaatgtaataaatacacttgtgtactttgtgtacttattatta

SEQ ID NO: 10664 - protein, 267 aa, Homo sapiens; identical to SEQ ID NO: 956

SEQ ID NO: 10665 - DNA, 2447 bp, Homo sapiens
aagagggaggggtctgtgcgcccgcagagtcgccaggcgccctgcgagttgtctccgctgggaggggcgaggctgtcacttgccagggcgcgaggagcctcagcgcggcttggagaacttggccccgcgcagcgtctggtcactcgctctcctctggggactgcagagaagcaggacctcgggccatggggtgttttgaatgctgtatcaaatgcctggggggcattccctatgcctctctgattgccaccatcctgctctatgcgggtgttgccctgttctgtggctgcggtcatgaagcgctttctggaactgtcaacattctgcaaacctactttgagatggcaagaactgctggagacacactggatgtttttaccatgattgacatctttaagtatgtgatctacggcatcgcagctgcgttctttgtgtatggcattttgctgatggtggaaggtttcttcacaactggggccatcaaagatctctatggggatttcaaaatcaccacttgtggcagatgtgtgagcgcttggttcattatgctgacatatcttttcatgttggcctggctgggagtcacggctttcacctcactgccagtttacatgtacttcaatctgtggaccatctgccggaacaccacattagtggagggagcaaatctctgcttggaccttcgtcagtttggaattgtgacaattggagaggaaaagaaaatttgtactgtctctgagaatttcttgaggatgtgcgaatctactgagctgaacatgaccttccacttgtttattgtggcacttgctggagctggggcagcagtcattgctatggttcactaccttatggttctgtctgccaactgggcctatgtgaaagacgcctgccggatgcagaagtatgaagacatcaagtcgaaggaagagcaagagcttcatgacatccactctactcgctccaaagagcggctcaatgcatacacataaatgcatcttcctgttctttctaccatttgaatgcattggtgtttaactaagggccatccaaccatccaacctttaaaaaacaaaacgaaagtgcttctcatcaatgatatgtaaggtgacttatgaatcacctgagtacaattctttgttgtttagcacttaaatttcccaatttattaaattgatgtaaatcagatcttttctacaagctcctatccagccttttttttgaaatttctcaaactcatttactagttctgtaaaatcaaagatactaacattgtcaaatgcaaagatttgtttgatttttaaccacttcccatgtgttatacataacaccttttgcattatttcttatgttttgaaaagaaaatagctttttatactttttagttttgatttcggtaactagtttaactacaggtaaccttcaaagggaccattgtacattatgaacaatagatagagattacatcttgatgactcttgaaatatggaaattttgtctgaagatcagtggccatattactgtaggccctggttcatgttttcatcaatctaaggtgcaatttctaaatttgtaagagtaggtttaaaaaaaaaagtgcttcttatctttgttaacattgtacttttccttgatgttcttaaaaggtatttccctcagattactcatgtttatgttgtgagcatgtagaaacagtaatgctaatgcatggctagttgcctttttaagattgtgacaccaggcttaccttttaaagtttagtatatagagacaattttaatggaaataactactgtagactattgaagaatgatctctttgtgatttaagaagtggctggattggaacttttaatatgctaatgtggaaaattaattacctttatgaaggtggtttattacaaataagcacactaacccctcggaagttgttttacctactttaaaagttttaatggattgcacctctgtaaactattcctaaaatgtgtatgatatatttgaaaaggcttccattaatataatagctttgcttgcagccttccaatctatgttggtttacctgtagtgttttataaagtgtggtcagaggcccctatagaatgtattgtttgaaagtgtagtgatatatttgtgtttttatttcaagtaagtcattttaaccgaatgttcattcatattcatttataaaaagtacctgtatcaaaggaattttaacaaagagcaatcagtattattggaccaaatttggtgtttgttttcaccttgacgctcttcttttcattatttctaatgctacaagaatgctgtaaagtgtcttctaaaatgatgtagcctgacaagacatttttttcagtgtataaaactaggtagtattgtgcactgatttgaccattgtgaaatcctttctcagtgtaactgcatttctaataaaaatttattgagtgaaac

SEQ ID NO: 10666 - protein, 267 aa, Homo sapiens; identical to SEQ ID NO: 956

SEQ ID NO: 10667 - DNA, 709 bp, Homo sapiens
gggaggagacccacagtgaaggggaggaaaacgggcttctcgcagaggaggcaggtggaaagagggaggggtctgtgcgcccgcagagtcgccaggcgccctgcgagttgtctccgctgggaggggcgaggctgtcacttgccagggcgcgaggagcctcagcgcggcttggagaacttggccccgcgcagcgtctggtcactcgctctcctctggggactgcagagaagcaggacctcgggccatggggtgttttgaatgctgtatcaaatgcctggggggcattccctatgcctctctgattgccaccatcctgctctatgcgggtgttgccctgttctgtggctgcggtcatgaagcgctttctggaactgtcaacattctgcaaacctactttgagatggcaagaactgctggagacacactggatgtttttaccatgattgacatctttaagtatgtgatctacggcatcgcagctgcgttctttgtgtatggcattttgctgatggtggaaggtttcttcacaactggggccatcaaagatctctatggggatttcaaaatcaccacttgtggcagatgtgtgagcgcttggttcattatgctgacatatcttttcatgttggcctggctgggagtcacggctttcacctcactgccagtttacatgtacttcaatctgtggaccatctgccggaacaccaca

SEQ ID NO: 10668 - protein, 154 aa, Homo sapiens
MGCFECCIKCLGGIPYASLIATILLYAGVALFCGCGHEALSGTVNILQTYFEMARTAGDTLDVFTMIDIFKYVIYGIAAAFFVYGILLMVEGFFTTGAIKDLYGDFKITTCGRCVSAWFIMLTYLFMLAWLGVTAFTSLPVYMYFNLWTICRNT

SEQ ID NO: 10669 - DNA, 7373 bp, Homo sapiens
gcggggagggtccgcgcgttggtggtgctcgcctcgcagctgcgcccgccggcttcagcaccttccgctgtccgccgctgcagccgcctcctcctccaggtgctgactattctgatgccgagtttccaattgccttgattaaagtagaaacattctatggcttggatgacttacatttcaaattggtttgagcaagatgattggtatgaaggactacaaagagcaaacatgtcccaggtaaggcaagtgggattgctggctgctggatgtcagccatggaacaaggatgtatgtgctgccagtggagacaggtttgcatattgtgcgaccctggctatctatatttatcagttggatcaccgttataatgaattcaaacttcacgcaattatgtctgaacataaaaaaacaatcacagcaatttcttggtgtccacataatcctgatctgtttgcaagtggcagtactgataatttagtgatcatttggaatgttgcagaacaaaaagtcattgctaaactcgacagtacaaaagggatccctgcttctcttagttggtgctggaatgcagaggatgtggtggcatttgtttcccacagaggcccactgttcatttggaccatctcaggaccagatagtggagtgattgtacacaaagatgctcatagcttcttgtctgatatctgtatgttcagatggcatacacaccaaaaggggaaagttgtgtttggtcatattgatggaagtctatcaatttttcatccaggtaataaaaatcagaaacatgttttgagaccagaatctcttgaagggacagatgaagaggatccagttacggccttggaatgggacccactatctactgattatcttctagtggttaatttgcattatggaattcgcctggtagattctgaatcactttcttgcataacaacatttaatcttcccagtgcagcagcttctgtacagtgcttagcctgggttcccagtgctcctgggatgtttataactggagattctcaagtgggtgttttacgcatttggaatgtttcaagaacaacacctattgataatcttaaattaaagaaaacaggatttcactgcttacatgtacttaattctcctccaagaaaaaagttttcagtccaatctccaaccaaaaatcattatacatcctcaacaagcgaagcagttccacccccaactttaacacagaatcaagcattttctcttcctcctggtcatgcagtgtgttgtttcttggatggtggagttggactttatgatatgggagctaagaagtgggattttcttagagacttgggacatgtggaaactatctttgactgcaaattcaaacctgacgatcctaatcttttagcaacagcttcatttgatggcactataaaagtctgggatataaacacattaacagcagtgtacacatccccgggtaatgaaggtgttatttattccctttcttgggctccaggtggtttaaattgtattgctgggggaacttcccgaaatggtgcttttatttggaatgttcaaaagggcaaaattatacaacgatttaatgagcatggaacaaatggaatattctgcattgcctggagtcataaagattctaaaagaatagcaacctgcagcagtgatggtttctgtattattcgaacaattgatggtaaagtgctacacaaatataaacatccagctgcagtgtttggttgtgattggagccaaaacaataaagacatgatagccactggctgtgaagacacaaatgttcgtgtttattatgtagccaccagctcagatcaaccattgaaagtatttagtgggcatacagcaaaagtgtttcatgttaaatggtctcctctgagagagggaattctttgcagtggttctgatgatggtaccgttcgaatctgggattatactcaggatgcttgcatcaatattcttaatggacacactgcacctgtgagaggattaatgtggaatactgagattccatatctgctcatatctggcagctgggactatactataaaagtatgggacactcgagaaggaacttgtgtggatactgtgtatgatcacggtgcagatgtatatggtttaacctgccatcccagtcgccccttcactatggcctcttgctcccgtgactctacagtgagactctggtcattaacagccttagtcactcctgtacaaataaatattctggcagacagatcttgggaagaaattattgggaacactgattatgctatagaaccaggcactcctcctctactgtgtggtaaagtgtcaagagatattagacaggaaatagaaaaactaactgctaattctcaagtgaaaaaactaagatggttctcagaatgtttatctcctccaggtggcagtgacaatttatggaacttggttgctgtgataaaaggacaggatgatagcttacttcctcagaactactgcaaaggaataatgcacttgaaacatctgattaaatttagaacatctgaagctcaagaactaacaacagtcaagatgtctaaatttggtggtggtattggtgtacctgctaaagaggaaagactgaaggaagctgctgaaatccacttgagattaggacaaattcagagatactgtgaacttatggttgaacttggagagtgggacaaagccctgtcaattgcaccaggagtctctgtgaaatactggaagaagttaatgcagaggagagctgaccaattaatccaggaagataaggatgatgtcattccatactgcatagccattggtgatgtgaaaaagctagtccattttttcatgtcaagaggtcagcttaaagaagctctgcttgttgcacaggctgcttgtgaaggaaatatgcagcccttacatgtttccgtgcctaaaggagcttcatattctgatgatatctacaaggaagactttaatgaactcctgcacaaagtcagtaaagaactggcagaatggtattttcaagatggtcgagcagtactagccgcatgttgccatcttgccatagataatattgagcttgctatggcatacctgattcgcggaaatgaactggagttggcagtctgtgtgggcacagtactaggagagtctgcagcaccagcaacccactatgccttagaattactggcgagaaagtgcatgatgatttcagtatgctttccatgtgttggatacagtgtccccttttgttacgttaacaggaatttggcagctgatcttcttctgatgattcctgataatgaactacatttaataaaactctgtgctttctacccaggatgtactgaagagataaatgaccttcatgataagtgtaagctacccacagtggaagaatgtatgcagttagctgagacagcccgtgcagatgacaatatatttgaaactgtaaaatattacttgttaagtcaagaacctgaaaaagcccttcctattggtattagctttgttaaagaatacatcagtagctcagactggactttggataccatataccctgttcttgacctactgagctatattcgtactgaaaaattactcttgcatacgtgtactgaagctcgaaatgagttgctgatattatgtggttacattggtgcattactggctatcagaagacagtaccaaagcattgttccagcactttatgagtacacaagtcagctattaaaacgtcgggaggtgtcagtacctttaaaaattgaatatctttctgaggaattggatgcatggagagcttgcacacagtccaccaacagatcattagaagactctccgtatacacccccttctgattcacaaagaatgatttatgcaactttattaaagagactaaaagaagagtcactgaaaggaattattggaccagattatgtgactggatcaaatcttccaagtcattctgatattcacatttcttgtcttacgggattaaaaatccagggccctgtgtttttccttgaagacgggaaatctgctatctccttgaatgatgctttgatgtgggcaaaggtgaatccattctcacctttagggactggaatacgactcaatccattctgatagaagatttttgtccatgcttgatttttttttttaaagaaaaactttcatgggttagcattaccttaatctttgttgctcaagtgccagaggttgggagaaggattgcaggttgggagaggtgggaaatagcagtgaattttagtcattaacttcaaaatatatatatatatataatttaaaggaaaaataggtgcctcctttataaacagtaatagctacgtttgggaaggaggaaacatttaaattataaaggactgaataatctaaaaagcatataaaagtttcacacagcataaaagataccaaaatatcatatggttgaaatattgaaacatattaaattgtgcaacacctagaatagtgctagacatacagtaagtacttaatggatatttgaatgattgaatatcttgaaatgttgaaatgtaaggtgtgcacagtgatcttcaacttaacaaacacttacgttctcctttataaaatgcatagtaaaccactaacgttagctgttttaataaaagttttcagttataagtttagtaaatattaataaatggatacacattcaaaatacttttaaaaaaaagaaaatgttaccagtttttttatctgaagtttaactgtcccattgtaaaggtgtaagttatataggcttgaaaaaaattggcgggtaaaaatcacaaaatgcagtcgaatatatatatgaaaacttgcattaggtgataaagtgactattttaagagattcagcatgcatggatattagttttgattaatgtgtacaataatttacacagtatactctagtcaatttatgttaactttatttaaaacacaatttatttggccgggcacggtggctcacacctgtaatctcagcactttggcaggccaaggcaggtggatcacctgaggtcaggagttcatgaccagcctggccagcatggtaaaaccctgtctccactaaaaatacaaaaattagccaggcatggtggcgggcacctgtaatcccagttacttgggaagctgaggcaggagaatcccttgaacctgggaggcagaggttccagtgagccaagatcgcaccactgcactccagcctgggcaacaaagagcgaaactctgtctcaaaaaacaaaccaacaaaaaccacaattgatttgatgaaaattagttttaagtaaatgtttgtaaatagatattggttgaatttttggatatattatgttgatttaacttttaaaatgttgtttaaaagtgtgaagctatgaaaagcctgataatgtgactacagatatttcagttggactagaattctgactttgaaacttattaaattaatgcatactggaagtactttgatactcaagttgtttcacaagatttataatatagatggttttgtttgactaaagaataatctcatataactagaatacttgtggcttttattatctttaaacttgttgcatttaaaatatttttaaaaccttcttaacaaaacttcttaaaactggaaaaaatatatattatgtatctatgtatcatatttatcacatgaccacttttgattccttaaaaagacattacaggcttaaattccattttattaaaaaaaaaaaattgcctgtaatcccagcacttcaggaggccgagatgggcagatcttgaggtcggtagatggagaccatcctggccaacatggtgaaaccctgtctctactaaaaatacaaaaattagctgggtgtggtggtgtgtacctgtagtcccagctacccaggaagctaaggcaggagaatcgcttgaatccaggaggcggaggttgcagtgagctgagatcgcactactgcactccagcctgggcgacagagcaagaccaccatctccaaaaattatatatataaaaataattaatattatagaagagaatatacacaactcagagatgcaatggataatataaaaagagtacctgagatgtatttttttaaactcttagagatatctgtaactcaaatttttcttaggtgaggaggattattaactggcacatatgtactaaaaacccctcacttaaaaatggcagtctcaatcctactgtcattctttttattttaaaataaataaataagcctatctttttgtgcttacatacttaaaaggatatcattaagtatataaacaatcattacttctgtatttttaatgaatgcaggaaaataatatttttatgtataaaagatgaagaaaaaattttgcaagtctttaagcacataaatacaacagaatagccacccaatttctgtctgaaatctaaattggatggatttgaccatcattctattatctttgatttctacaatgtctatatcttattacctataactattaatttttcatagaattataaatgtcatttgactatgtcaatctgtatatattgtaccttaatatgaaaaacaaattttttaattcataaaagtatttttattagatttcatatgcatgaaacccaagcaaattatatgaatttattttactatttgaaaatgttcatattaccaataatgtggacaaattactttgcaggtttaaatatgcctctgtaaaggaagagtctcattagacaatgatttttaaagcattggaaaaatattttgcctgtaaaagttagtaactaggtggttcacaaaattacaacatcaaaatagttacatcttgtgaaaatatatgatttttatgtcaatcaagacaaatgaaatatatatgtatgtgtatatatatacatgtatgtatgaaatatatatatgtgcgtgtgtgtgtgtatatatatatatatatatatatatttctatgaaattgtccagatgtgttcaggaacatgattgcattagagcaatgactgtattttgttgtccttataacatttatattatttcagttttaagtcaaaaggtattctgaatataataaaagcctcacaaattatttgtaaaatttagtagttcatatttagtatatcagtaatatagaagacatctttatagtcaactcttaattaatgcttattgtaccaaatctttgagatatttgtacataaatgaaatatgtactttcatgctaaaattatatatcatgactgtgctataatttggcatgtcattatctagatttatatgtatgtacgtatttcaggtccttgaaattttaataaatattacagttaaatcctgatatgacatagtt

SEQ ID NO: 10670 - protein, 1322 aa, Homo sapiens; identical to SEQ ID NO: 958

SEQ ID NO: 10671 - DNA, 1789 bp, Homo sapiens
gcggggagggtccgcgcgttggtggtgctcgcctcgcagctgcgcccgccggcttcagcaccttccgctgtccgccgctgcagccgcctcctcctccaggcaaacatgtcccaggtaaggcaagtgggattgctggctgctggatgtcagccatggaacaaggatgtatgtgctgccagtggagacaggtttgcatattgtgcgaccctggctatctatatttatcagttggatcaccgttataatgaattcaaacttcacgcaattatgtctgaacataaaaaaacaatcacagcaatttcttggtgtccacataatcctgatctgtttgcaagtggcagtactgataatttagtgatcatttggaatgttgcagaacaaaaagtcattgctaaactcgacaagcaagaccaccatctccaaaaattatatatataaaaataattaatattatagaagagaatatacacaactcagagatgcaatggataatataaaaagagtacctgagatgtatttttttaaactcttagagatatctgtaactcaaatttttcttaggtgaggaggattattaactggcacatatgtactaaaaacccctcacttaaaaatggcagtctcaatcctactgtcattctttttattttaaaataaataaataagcctatctttttgtgcttacatacttaaaaggatatcattaagtatataaacaatcattacttctgtatttttaatgaatgcaggaaaataatatttttatgtataaaagatgaagaaaaaattttgcaagtctttaagcacataaatacaacagaatagccacccaatttctgtctgaaatctaaattggatggatttgaccatcattctattatctttgatttctacaatgtctatatcttattacctataactattaatttttcatagaattataaatgtcatttgactatgtcaatctgtatatattgtaccttaatatgaaaaacaaattttttaattcataaaagtatttttattagatttcatatgcatgaaacccaagcaaattatatgaatttattttactatttgaaaatgttcatattaccaataatgtggacaaattactttgcaggtttaaatatgcctctgtaaaggaagagtctcattagacaatgatttttaaagcattggaaaaatattttgcctgtaaaagttagtaactaggtggttcacaaaattacaacatcaaaatagttacatcttgtgaaaatatatgatttttatgtcaatcaagacaaatgaaatatatatgtatgtgtatatatatacatgtatgtatgaaatatatatatgtgcgtgtgtgtgtgtatatatatatatatatatatatatttctatgaaattgtccagatgtgttcaggaacatgattgcattagagcaatgactgtattttgttgtccttataacatttatattatttcagttttaagtcaaaaggtattctgaatataataaaagcctcacaaattatttgtaaaatttagtagttcatatttagtatatcagtaatatagaagacatctttatagtcaactcttaattaatgcttattgtaccaaatctttgagatatttgtacataaatgaaatatgtactttcatgctaaaattatatatcatgactgtgctataatttggcatgtcattatctagatttatatgtatgtacgtatttcaggtccttgaaattttaataaatattacagttaaatcctgatatgacatagttaccggctaa

SEQ ID NO: 10672 - protein, 110 aa, Homo sapiens
MSQVRQVGLLAAGCQPWNKDVCAASGDRFAYCATLAIYIYQLDHRYNEFKLHAIMSEHKKTITAISWCPHNPDLFASGSTDNLVIIWNVAEQKVIAKLDKQDHHLQKLYI

SEQ ID NO: 10673 - DNA, 2364 bp, Homo sapiens
gagatattagacaggaaatagaaaaactaactgctaattctcaagtgaaaaaactaagatggttctcagaatgtttatctcctccaggtggcagtgacaatttatggaacttggttgctgtgataaaaggacaggatgatagcttacttcctcagaactactgcaaaggaataatgcacttgaaacatctgattaaatttagaacatctgaagctcaagaactaacaacagtcaagatgtctaaatttggtggtggtattggtgtacctgctaaagaggaaagactgaaggaagctgctgaaatccacttgagattaggacaaattcagagatactgtgaacttatggttgaacttggagagtgggacaaagccctgtcaattgcaccaggagtctctgtgaaatactggaagaagttaatgcagaggagagctgaccaattaatccaggaagataaggatgatgtcattccatactgcatagccattggtgatgtgaaaaagctagtccattttttcatgtcaagaggtcagcttaaagaagctctgcttgttgcacaggctgcttgtgaaggaaatatgcagcccttacatgtttccgtgcctaaaggagcttcatattctgatgatatctacaaggaagactttaatgaactcctgcacaaagtcagtaaagaactggcagaatggtattttcaagatggtcgagcagtactagccgcatgttgccatcttgccatagataatattgagcttgctatggcatacctgattcgcggaaatgaactggagttggcagtctgtgtgggcacagtactaggagagtctgcagcaccagcaacccactatgccttagaattactggcgagaaagtgcatgatgatttcagtatggaatttggcagctgatcttcttctgatgattcctgataatgaactacatttaataaaactctgtgctttctacccaggatgtactgaagagataaatgaccttcatgataagtgtaagctacccacagtggaagaatgtatgcagttagctgagacagcccgtgcagatgacaatatatttgaaactgtaaaatattacttgttaagtcaagaacctgaaaaagcccttcctattggtattagctttgttaaagaatacatcagtagctcagactggactttggataccatataccctgttcttgacctactgagctatattcgtactgaaaaattactcttgcatacgtgtactgaagctcgaaatgagttgctgatattatgtggttacattggtgcattactggctatcagaagacagtaccaaagcattgttccagcactttatgagtacacaagtcagctattaaaacgtcgggaggtgtcagtacctttaaaaattgaatatctttctgaggaattggatgcatggagagcttgcacacagtccaccaacagatcattagaagactctccgtatacacccccttctgattcacaaagaatgatttatgcaactttattaaagagactaaaagaagagtcactgaaaggaattattggaccagattatgtgactggatcaaatcttccaagtcattctgatattcacatttcttgtcttacgggattaaaaatccagggccctgtgtttttccttgaagacgggaaatctgctatctccttgaatgatgctttgatgtgggcaaaggtgaatccattctcacctttagggactggaatacgactcaatccattctgatagaagatttttgtccatgcttgatttttttttttaaagaaaaactttcatgggttagcattaccttaatctttgttgctcaagtgccagaggttgggagaaggattgcaggttgggagaggtgggaaatagcagtgaattttagtcattaacttcaaaatatatatatatatataatttaaaggaaaaataggtgcctcctttataaacagtaatagctacgtttgggaaggaggaaacatttaaattataaaggactgaataatctaaaaagcatataaaagtttcacacagcataaaagataccaaaatatcatatggttgaaatattgaaacatattaaattgtgcaacacctagaatagtgctagacatacagtaagtacttaatggatatttgaatgattgaatatcttgaaatgttgaaatgtaaggtgtgcacagtgatcttcaacttaacaaacacttacgttctcctttataaaatgcatagtaaaccactaacgttagctgttttaataaaagttttcagttataagtttagtaaatattaataaatggatacacattcaaaatacttttaaaaaaaagaaaatgttaccagttttttt

SEQ ID NO: 10674 - protein, 526 aa, Homo sapiens
MHLKHLIKFRTSEAQELTTVKMSKFGGGIGVPAKEERLKEAAEIHLRLGQIQRYCELMVELGEWDKALSIAPGVSVKYWKKLMQRRADQLIQEDKDDVIPYCIAIGDVKKLVHFFMSRGQLKEALLVAQAACEGNMQPLHVSVPKGASYSDDIYKEDFNELLHKVSKELAEWYFQDGRAVLAACCHLAIDNIELAMAYLIRGNELELAVCVGTVLGESAAPATHYALELLARKCMMISVWNLAADLLLMIPDNELHLIKLCAFYPGCTEEINDLHDKCKLPTVEECMQLAETARADDNIFETVKYYLLSQEPEKALPIGISFVKEYISSSDWTLDTIYPVLDLLSYIRTEKLLLHTCTEARNELLILCGYIGALLAIRRQYQSIVPALYEYTSQLLKRREVSVPLKIEYLSEELDAWRACTQSTNRSLEDSPYTPPSDSQRMIYATLLKRLKEESLKGIIGPDYVTGSNLPSHSDIHISCLTGLKIQGPVFFLEDGKSAISLNDALMWAKVNPFSPLGTGIRLNPF

SEQ ID NO: 10675 - DNA, 1233 bp, Homo sapiens
gcgctgaggtctcgccccataagactccgccccgccccacgagaccgcgccgccagcaataaggcccagccccgccttctgctgttgccgcagcaacccagaaagcgtcatggctgccgccggccaggaaaaagggtatttgacacagactgcggcagccctagacaagtcaccgtcactttcgccacagctagcagctcccatccgagggaggcctaagaagtgtctggtctatccgcatgcgccgaagagctcccgcttgtctcgttccgttctgcgttggcttcagggtctggatctcagcttcttccccaggaacatcaacagagatttttcaaatggcttcctaattgcagaaatattctgtatatattacccctgggaacttgaattatcatcctttgaaaacgggacctctttaaaagtcaagttggataactgggcacagttggagaagttcctggcaagaaaaaaatttaaattacctaaagaactaatccatggaacaattcattgtaaagctggagtgcctgaaatattgatagaagaggtttacactttattaacacatcgagaaattaaaagtatccaggatgactttgtgaatttcacggactatagctaccagatgcgtttacccctggtttccaggtctacagtttcgaagtctattaaagataacattaggttatcagaattactaagcaatcccaacatgctgaccaatgaacttaaagcggagttcctcatccttttacatatgttgcaaagaaaattaggcagaaaattgaatccagaatggtttgatgtgaaaccaacagtgggagaagttactctcaatcaccttcctgcccaagcctctgggcgcagatataatttaaaagttaaaagaggaagagttgtccctgttttaccaaatataggtagtggtggcagttcacatagagaaatacatgtgaagcaagctggacaacattcttattactctgctatgaaacctatcagaaacatggacaagaaaccttgaaaagcacctgtcaaatggctttgaagaagtgatgccaccatctctagccataataaagaaacagaatcacctagtattggatgtatttcaataataaatagagtggtgtcttttccataattgtgttaaagaacatttcttttccattcaatttgtttattaaactcctatgccaggcattgttgaaaatacaaaattaaataaat

SEQ ID NO: 10676 - protein, 305 aa, Homo sapiens; identical to SEQ ID NO: 962

SEQ ID NO: 10677 - DNA, 2111 bp, Homo sapiens
ctgtaatcccagctactggggaggctgcaggcaggagaatgcttgaacccgggaggcggaggttgctgtgagtcgagattatgccgctgcactccagcctaggtggcagggtaagactctgtctcaaaaaaaaaaaaaaaaaaaaaaaaaaaaaatactggtaaggatcagtttaccctttgtcggagatggcatctagtttgagagttaccaacaagtttttaaagttgctgcttaattgtaggcactttgtatgtaactggcagctaatatttgctctgggaatgcaaactaaattctataaaaaggcaatgaatcttttgcagaactctggtttaaagtagtctctccttatcagagaggcataggttccaagatccccagtggatggcaactgtggatactacagaaccctctgtcagaacacatttctgtttatgtcttccatccacaaatttaatgcctttttaaaaatcttaactaagcacttatcacacactgtggctgaaagtttttcagtttgaggtgtgatgccgaaactatcaagaatttctttttcttcatatttcaggaatatgattcattcctaccattgtaaccattcttacaactttctattaagtcaagaactttcatcttttcacctaaaggaataattttatggtttctctctggcatatctgaatcaccagcatcactgctcttgcactttgcacacaagcgcaccacactgtacagttgatctgatgactaaaaggtgactgatgtctacaacgtggagactctggacaaagggaggactcacatcctaggcaacacagagcaggcagggaggtttcatcagactgcccagaacagagtacaatttaaaagttacaaattatttcttgaattttccatttaatattttccgactgtgattgacccaaggtaactgaaactgcagaaagcaaaactgcagataagcgggggactagtttactaatttgtcttcagtattacttacaaccatgcctctgaaattttaaagtgcatatgaatcacctggggatcttcttgaaatgcggattcaatacaaattaacagtttgggttcatcaaaagaacaccaaagcctttgaaacgtagataatcttagcaaaattccacagtaggttctccttagagcaacgatccaacaacactcactttacaagatacttttagtatggaatattagactagtattaattataaaataatacaaactgcataattaactacactttatttcatttcctaattgccacggatcagagatttttcaaatggcttcctaattgcagaaatattctgtatatattacccctgggaacttgaattatcatcctttgaaaacgggacctctttaaaagtcaagttggataactgggcacagttggagaagttcctggcaagaaaaaaatttaaattacctaaagaactaatccatggaacaattcattgtaaagctggagtgcctgaaatattgatagaagaggtttacactttattaacacatcgagaaattaaaagtatccaggatgactttgtgaatttcacggactatagctaccagatgcgtttacccctggtttccaggtctacagtttcgaagtctattaaagataacattaggttatcagaattactaagcaatcccaacatgctgaccaatgaacttaaagcggagttcctcatccttttacatatgttgcaaagaaaattaggcagaaaattgaatccagaatggtttgatgtgaaaccaacagtgggagaagttactctcaatcaccttcctgcccaagcctctgggcgcagatataatttaaaagttaaaagaggaagagttgtccctgttttaccaaatataggtagtggtggcagttcacatagagaaatacatgtgaagcaagctggacaacattcttattactctgctatgaaacctatcagaaacatggacaagaaaccttgaaaagcacctgtcaaatggctttgaagaagtgatgccaccatctctagccataataaagaaacagaatcacctagtattggatgtatttcaataataaatagagtggtgtcttttcc

SEQ ID NO: 10678 - protein, 132 aa, Homo sapiens
MRLPLVSRSTVSKSIKDNIRLSELLSNPNMLTNELKAEFLILLHMLQRKLGRKLNPEWFDVKPTVGEVTLNHLPAQASGRRYNLKVKRGRVVPVLPNIGSGGSSHREIHVKQAGQHSYYSAMKPIRNMDKKP

SEQ ID NO: 10679 - DNA, 1095 bp, Homo sapiens
gccgccagcaataaggcccagccccgccttctgctgttgccgcagcaacccagaaagcgtcatggctgccgccggccaggaaaaagggtatttgacacagactgcggcagccctagacaagtcaccgtcactttcgccacagctagcagctcccatccgagggaggcctaagaagtgtctggtctatccgcatgcgccgaagagctcccgcttgtctcgttccgttctgcgttggcttcagggtctggatctcagcttcttccccaggaacatcaacagagatttttcaaatggcttcctaattgcagaaatattctgtatatattacccctgggaacttgaattatcatcctttgaaaacgggacctctttaaaagtcaagttggataactgggcacagttggagaagttcctggcaagaaaaaaatttaaattacctaaagaactaatccatggaacaattcattgtaaagctggagtgcctgaaatattgatagaagaggtttacactttattaacacatcgagaaattaaaagtatccaggatgactttgtgaatttcacggactatagctaccagatgcgtttacccctggtttccaggtctacagtttcgaagtctattaaagataacattaggttatcagaattactaagcaatcccaacatgctgaccaatgaacttaaagcggagttcctcatccttttacatatgttgcaaagaaaattaggcagaaaattgaatccagaatggtttgatgtgaaaccaacagtgggagaagttactctcaatcaccttcctgcccaagcctctgggcgcagatataatttaaaagttaaaagaggaagagttgtccctgttttaccaaatataggtagtggtggcagttcacatagagaaatacatgtgaagcaagctggacaacattcttattactctgctatgaaacctatcagaaacatggacaagaaaccttgaaaagcacctgtcaaatggctttgaagaagtgatgccaccatctctagccataataaagaaacagaatcacctagtattggatgtatttcaataataaatagagtggtgtcttttcc

SEQ ID NO: 10680 - protein, 305 aa, Homo sapiens; identical to SEQ ID NO: 962

SEQ ID NO: 10681 - DNA, 2953 bp, Homo sapiens
agacctcatctgccctcactcactatcactaggccaacagatttaggtactcatgtttaagtaaagtagaataaaaaataaaatggagcaagaactgggctcagatatgactcctaaaggttgtatgagggcacggccttgtaaagaaacccaaagcagcacagcctctgagaactgaataatggccccttccagatgcctctttgcaatggtggaaatttggcagtaacaggttcctgggcagatcgatcaccactacatgaagcagcaagtcaaggtcgccttcttgctctgagaacattattatcacagggttataatgtaaatgcagtaaccttagaccatgtcaccccattgcacgaagcctgccttggagatcacgtggcatgtgccagaactctgctggaagcaggagctaatgtaaatgcaatcacgatagatggcgtgactccgttattcaacgcatgctcccaaggcagtccaagctgtgcagagctgcttctggagtatggtgccaaagcccagctggagtcatgtcttccatccccaacgcatgaggccgccagtaaaggtcaccatgaatgtcttgacatcctgatatcctggggcatagatgttgaccaagaaattcctcatttgggaactcctctctatgtagcttgtatgtcacagcaattccattgcatctggaagcttctttatgctggtgctgacgtacagaaaggcaaatattgggatactccattacatgctgctgctcaacaatccagcacagaaattgtaaacttactgctagaatttggagcagatatcaatgccaaaaatacagagcttctgcgacctatagatgtagctacgtctagcagtatggtggaaaggatattgcttcaacatgaagctaccccaagctctctttaccaactttgccgactctgtatccgaagctacataggaaaaccaagattgcaccttatcccacaactccagctgccaacgttactgaagaatttcttacagtatcgataaaacagtaaagtaattctaaataccttgaaaatcaaaatttctatttcttttgcttaaggaatagttcatataaaaatatgctaaagataggataaaagtgagtgtgagatcacccagggaagcagtaaaatatcaattttcattttaagtgtattagtactattgttttatcatttatgctgtctttggattatagcatatttataatatctattttttgttatttcaatataccctcctgtttattcaggaaaaaataataaagtcactatcttatgttttcttttggattggaaagaaataaagctcctagtaaagttattcatattatatttaaaaaggtctatgttcttcaactaatgggttaactttttaattttggctattgtaattggctaacttgttactgatattgacataaaatatgaatatggcttagcaaagagcaactaatatgttttctgaaaccaggatgatgctcattcaggaaatccactatgttgaatgtccactggtcattagaatgaacacttcataaagataaattgcccccctctcccccacttacccctggcaaaggactcacaagtcacttctcttctccatagtacatggacttgttacagaaaagtgataggatgaaaggtcaatactgccctctcaccctgagatatttagaacattacacaccttctaaggctatgttaagactgcctccttctcaggagtagcccctgatgatctcttatcaaggcggttatatgcatattactccagccttcttccatttcagaaattgtcaatagctagtgatacttggacttaagaaaatgaactatatatctaattaacaaacaggccctggatcatattccggggatcatcacatcagtccaaggatataaaaaaatggaagattaaaaactcaaattgtggagtttttaaagagtgggtgccacttaacacattggagaccttaaaaaatgtatatagagaacttaatcgcactgtttctaattctttttacacaaaacaagggcttagagtatactgtatttgcaagtaatagcaagagagtattgtataaaagaagatattactaagctagtcctctgcaagggtaaatactacgtttattctcttcagctttaactatacttgagtgcaataaaaaacttaataaaattttatgcctgttttgtaattcagggcctattatgattttagaaataagataatcaacgtacaactctttgtaaaacaaaagcaactttgggtgagttttatagatttattaaattttgataaagtaaatattttgaccactattttcaacaacccagggcttattttcttctgacttcttggctaacttccagactatgggaaaataaattatgattgtatgtgacccccagatcactaagcttgcattttggcagaaagaaaaaaaatcagttgtgatttaaaacgtttgttgagattttcaaacatagaaataaagctgtagcatattcactaaacaatgttttatatgaggatagggacctttaaatatgtgttttatagaatatctcacacatttgtaatggataacgtgcattaaaatggagttcttattatagaataacctggttaaacagatattaaagctgcttttgggtaaaacaggtttccaccagtattttccctgagctagaggagaagtcttagattttaagagtaatacaacccatctatcttattagtcttgtgccaataagagaagtaaatatcaaacattaaaatggtcactttacaatttcagtatgtctgtaccttgtatcttagcttgagtatgattgtcttatcaaagtagtgttctaactttaatgtattgtatgtttgttattatattaaagtgtgattattattcattggaataaaa

SEQ ID NO: 10682 - protein, 276 aa, Homo sapiens
MPLCNGGNLAVTGSWADRSPLHEAASQGRLLALRTLLSQGYNVNAVTLDHVTPLHEACLGDHVACARTLLEAGANVNAITIDGVTPLFNACSQGSPSCAELLLEYGAKAQLESCLPSPTHEAASKGHHECLDILISWGIDVDQEIPHLGTPLYVACMSQQFHCIWKLLYAGADVQKGKYWDTPLHAAAQQSSTEIVNLLLEFGADINAKNTELLRPIDVATSSSMVERILLQHEATPSSLYQLCRLCIRSYIGKPRLHLIPQLQLPTLLKNFLQYR

SEQ ID NO: 10683 - DNA, 3031 bp, Homo sapiens
accagctgatattttctttcctcaggaccagctgttcaggagcatcccggacgagagccaggcacatttgagacttggatccaactaaagaccgccgcagattcttctgcagcaatgtcggtgttagaagaaaatcggccgtttgctcaacaattatccaatgtctactttacaatactttcgctgttctgttttaagctttttgtgaaaatcagccttgccatcctcagtcatttctacatagtgaaaggcaaccgcaaggaagcggcaaggatagcagctgaattttatggagtaacccaaggacaaggttcctgggcagatcgatcaccactacatgaagcagcaagtcaaggtcgccttcttgctctgagaacattattatcacagggttataatgtaaatgcagtaaccttagaccatgtcaccccattgcacgaagcctgccttggagatcacgtggcatgtgccagaactctgctggaagcaggagctaatgtaaatgcaatcacgatagatggcgtgactccgttattcaacgcatgctcccaaggcagtccaagctgtgcagagctgcttctggagtatggtgccaaagcccagctggagtcatgtcttccatccccaacgcatgaggccgccagtaaaggtcaccatgaatgtcttgacatcctgatatcctggggcatagatgttgaccaagaaattcctcatttgggaactcctctctatgtagcttgtatgtcacagcaattccattgcatctggaagcttctttatgctggtgctgacgtacagaaaggcaaatattgggatactccattacatgctgctgctcaacaatccagcacagaaattgtaaacttactgctagaatttggagcagatatcaatgccaaaaatacagagcttctgcgacctatagatgtagctacgtctagcagtatggtggaaaggatattgcttcaacatgaagctaccccaagctctctttaccaactttgccgactctgtatccgaagctacataggaaaaccaagattgcaccttatcccacaactccagctgccaacgttactgaagaatttcttacagtatcgataaaacagtaaagtaattctaaataccttgaaaatcaaaatttctatttcttttgcttaaggaatagttcatataaaaatatgctaaagataggataaaagtgagtgtgagatcacccagggaagcagtaaaatatcaattttcattttaagtgtattagtactattgttttatcatttatgctgtctttggattatagcatatttataatatctattttttgttatttcaatataccctcctgtttattcaggaaaaaataataaagtcactatcttatgttttcttttggattggaaagaaataaagctcctagtaaagttattcatattatatttaaaaaggtctatgttcttcaactaatgggttaactttttaattttggctattgtaattggctaacttgttactgatattgacataaaatatgaatatggcttagcaaagagcaactaatatgttttctgaaaccaggatgatgctcattcaggaaatccactatgttgaatgtccactggtcattagaatgaacacttcataaagataaattgcccccctctcccccacttacccctggcaaaggactcacaagtcacttctcttctccatagtacatggacttgttacagaaaagtgataggatgaaaggtcaatactgccctctcaccctgagatatttagaacattacacaccttctaaggctatgttaagactgcctccttctcaggagtagcccctgatgatctcttatcaaggcggttatatgcatattactccagccttcttccatttcagaaattgtcaatagctagtgatacttggacttaagaaaatgaactatatatctaattaacaaacaggccctggatcatattccggggatcatcacatcagtccaaggatataaaaaaatggaagattaaaaactcaaattgtggagtttttaaagagtgggtgccacttaacacattggagaccttaaaaaatgtatatagagaacttaatcgcactgtttctaattctttttacacaaaacaagggcttagagtatactgtatttgcaagtaatagcaagagagtattgtataaaagaagatattactaagctagtcctctgcaagggtaaatactacgtttattctcttcagctttaactatacttgagtgcaataaaaaacttaataaaattttatgcctgttttgtaattcagggcctattatgattttagaaataagataatcaacgtacaactctttgtaaaacaaaagcaactttgggtgagttttatagatttattaaattttgataaagtaaatattttgaccactattttcaacaacccagggcttattttcttctgacttcttggctaacttccagactatgggaaaataaattatgattgtatgtgacccccagatcactaagcttgcattttggcagaaagaaaaaaaatcagttgtgatttaaaacgtttgttgagattttcaaacatagaaataaagctgtagcatattcactaaacaatgttttatatgaggatagggacctttaaatatgtgttttatagaatatctcacacatttgtaatggataacgtgcattaaaatggagttcttattatagaataacctggttaaacagatattaaagctgcttttgggtaaaacaggtttccaccagtattttccctgagctagaggagaagtcttagattttaagagtaatacaacccatctatcttattagtcttgtgccaataagagaagtaaatatcaaacattaaaatggtcactttacaatttcagtatgtctgtaccttgtatcttagcttgagtatgattgtcttatcaaagtagtgttctaactttaatgtattgtatgtttgttattatattaaagtgtgattattattcattggaataaaa

SEQ ID NO: 10684 - protein, 329 aa, Homo sapiens; identical to SEQ ID NO: 964

SEQ ID NO: 10685 - DNA, 1256 bp, Homo sapiens
gcagattcttctgcagcaatgtcggtgttagaagaaaatcggccgtttgctcaacaattatccaatgtctactttacaatactttcgctgttctgttttaagctttttgtgaaaatcagccttgccatcctcagtcatttctacatagtgaaaggcaaccgcaaggaagcggcaaggatagcagctgaattttatggagtaacccaaggacaaggttcctgggcagatcgatcaccactacatgaagcagcaagtcaaggtcgccttcttgctctgagaacattattatcacagggttataatgtaaatgcagtaaccttagaccatgtcaccccattgcacgaagcctgccttggagatcacgtggcatgtgccagaactctgctggaagcaggagctaatgtaaatgcaatcacgatagatggcgtgactccgttattcaacgcatgctcccaaggcagtccaagctgtgcagagctgcttctggagtatggtgccaaagcccagctggagtcatgtcttccatccccaacgcatgaggccgccagtaaaggtcaccatgaatgtcttgacatcctgatatcctggggcatagatgttgaccaagaaattcctcatttgggaactcctctctatgtagcttgtatgtcacagcaattccattgcatctggaagcttctttatgctggtgctgacgtacagaaaggcaaatattgggatactccattacatgctgctgctcaacaatccagcacagaaattgtaaacttactgctagaatttggagcagatatcaatgccaaaaatacagagcttctgcgacctatagatgtagctacgtctagcagtatggtggaaaggatattgcttcaacatgaagctaccccaagctctctttaccaactttgccgactctgtatccgaagctacataggaaaaccaagattgcaccttatcccacaactccagctgccaacgttactgaagaatttcttacagtatcgataaaacagtaaagtaattctaaataccttgaaaatcaaaatttctatttcttttgcttaaggaatagttcatataaaaatatgctaaagataggataaaagtgagtgtgagatcacccagggaagcagtaaaatatcaattttcattttaagtgtattagtactattgttttatcatttatgctgtctttggattatagcatatttataatatctattttttgttatttcaatataccctcctgtttattc

SEQ ID NO: 10686 - protein, 329 aa, Homo sapiens; identical to SEQ ID NO: 964

SEQ ID NO: 10687 - DNA, 651 bp, Homo sapiens
accagctgatattttctttcctcaggaccagctgttcaggagcatcccggacgagagccaggcacatttgagacttggatccaactaaagaccgccgcagattcttctgcagcaatgtcggtgttagaagaaaatcggccgtttgctcaacaattatccaatgtctactttacaatactttcgctgttctgttttaagctttttgtgaaaatcagccttgccatcctcagtcatttctacatagtgaaaggcaaccgcaaggaagcggcaaggatagcagctgaattttatggagtaacccaaggacaaggttcctgggcagatcgatcaccactacatgaagcagcaagtcaaggtcgccttcttgctctgagaacattattatcacaggtaatatattacatatagtttaaaatataccccctttccatgtgcacagaacatggtcaaaaccaatcaatgcaaatatgataaaaccacttacattttacttctgcccttttattttaactcatgtcagagaagtcaatagtttctcacttatctttgaaacttcttttataaatattttgatataattgtatgtcttagtatttcagatttctcagacagcatatttgttcatcgatagacatttaaagaagtaatgat

SEQ ID NO: 10688 - protein, 97 aa, Homo sapiens
MSVLEENRPFAQQLSNVYFTILSLFCFKLFVKISLAILSHFYIVKGNRKEAARIAAEFYGVTQGQGSWADRSPLHEAASQGRLLALRTLLSQVIYYI

SEQ ID NO: 10689 - DNA, 620 bp, Homo sapiens
aaaatttaagagcaagcccgggaatttacggtggaggggtgcaagttccgaggggacgccggaaaagcctgcgacgtccacccctgacgaccgccctcgggggcgaactgccgctcaggagggcgatccggacgccctgcccgcggccccggcacggcagccccggcgcggcggcccggcttcggcttccgccccagcccggtcccggcgtcctgcaccgccggcccggcctcactcacagcatgatccgcgagacgtgcagccgcaccgggacgctcctgtctttgaaggcggtggtgatgaagcagccgaagggataaagaagaaataacctttagtcaacccaccaattacatttctccattttcagtgttcattgagccattggatataaatgtgaatacagagaggagagggaaagaggagtatgctaggactgagtccttcccttcgggctaattggtgcactgtggcagaaagactgctagttttgcatcaagatccatgatcctaagttttcagtggggcacagagccacctggaacaaagattacatttcccagctttcctaagaaccaggtgtgcccttttgactgttttggcaatagagtcattgccca

SEQ ID NO: 10690 - protein, 37 aa, Homo sapiens
MILSFQWGTEPPGTKITFPSFPKNQVCPFDCFGNRVI

SEQ ID NO: 10691 - DNA, 1527 bp, Homo sapiens
gcgctcccggaacgcgcgcaccgcagacggcgcggatcgcagggagccggtccgccgccggaacgggagcctgggtgtgcgtgtggagtccggactcgtgggagacgatcgcgatgaacacggtgctgtcgcgggcgaactcactgttcgccttctcgctgagcgtgatggcggcgctcaccttcggctgcttcatcaccaccgccttcaaagacaggagcgtcccggtgcggctgcacgtctcgcggatcatgctaaaaaatgtagaagatttcactggacctagagaaagaagtgatctgggatttatcacatttgatataactgctgatctagagaatatatttgattggaatgttaagcagttgtttctttatttatcagcagaatattcaacaaaaaataatgctctgaaccaagttgtcctatgggacaagattgttttgagaggtgataatccgaagctgctgctgaaagatatgaaaacaaaatattttttctttgacgatggaaatggtctcaagggaaacaggaatgtcactttgaccctgtcttggaacgtcgtaccaaatgctggaattctacctcttgtgacaggatcaggacacgtatctgtcccatttccagatacatatgaaataacgaagagttattaaattattctgaatttgaaacaacatatttttatacttaatgaattgtatctcattaatctcttcccttacatcttcatgtattgttggtttgttttttggttttgggtttttttttttttttttttggtataagaactaacatcaaaaggcctgtttaaagggaaaggttaatgggctacttaatattatgaacaaaacaaaaaaacaaggctgccacagtggaatattatcttacaagaataagaactacataaaacagatttgtaaaaaatacatatttgaagtattccctgtatttccattattctttatggaatataaagtaagcatgaaaggtagttaaaactttcaggtgcctgtagagtcataataactgtattttatgccttgcattcacgcaaattcacattggatgtgatttaaaagtagacattctctttttcctcttttaggatatgtttgattactggaaaattaatatggttatttgttagaagtctggtttataaaaaagccaaaagtgatggaatttattccatttgtcttaggaaggcccataatacttgtttttcttacatgtgactagcaactttctccacttaaagactaaatacctctttatatgatgtaaattattctaattcattttaaaatcttttaggtcagcaaaatgtgtgtcttcagtgctttctctaaaaacgttcctttatagctttgtacttttttttttagcgttgccattgaaagttaaaatgtttgcatggtttaccctctgagttatgtttcttctagtgagcatgcctgctgtcactaagtgaattatttactactttttgtaggtctatattttaataattattgggataataat

SEQ ID NO: 10692 - protein, 180 aa, Homo sapiens; identical to SEQ ID NO: 966

SEQ ID NO: 10693 - DNA, 1321 bp, Homo sapiens
gctcccggaacgcgcgcaccgcagacggcgcggatcgcagggagccggtccgccgccggaacgggagcctgggtgtgcgtgtggagtccggactcgtgggagacgatcgcgatgaacacggtgctgtcgcgggcgaactcactgttcgccttctcgctgagcgtgatggcggcgctcaccttcggctgcttcatcaccaccgccttcaaagacaggagcgtcccggtgcggctgcacgtctcgcggatcatgctaaaaaatgtagaagatttcactggacctagagaaagaagtgatctgggatttatcacatttgatataactgctgatctagagaatatatttgattggaatgttaagcagttgtttctttatttatcagcagaatattcaacaaaaaataatgctctgaaccaagttgtcctatgggacaagattgttttgagaggtgataatccgaagctgctgctgaaagatatgaaaacaaaatattttttctttgacgatggaaatggtctcaagggaaacaggaatgtcactttgaccctgtcttggaacgtcgtaccaaatgctggaattctacctcttgtgacaggatcaggacacgtatctgtcccatttccagatacatatgaaataacgaagagttattaaattattctgaatttgaaacaacatatttttatacttaatgaattgtatctcattaatctcttcccttacatcttcatgtattgttggtttgttttttggttttgggtttttttttttttttttttggtataagaactaacatcaaaaggcctgtttaaagggaaaggttaatgggctacttaatattatgaacaaaacaaaaaaacaaggctgccacagtggaatattatcttacaagaataagaactacataaaacagatttgtaaaaaatacatatttgaagtattccctgtatttccattattctttatggaatataaagtaagcatgaaaggtagttaaaactttcaggtgcctgtagagtcataataactgtattttatgccttgcattcacgcaaattcacattggatgtgatttaaaagtagacattctctttttcctcttttaggatatgtttgattactggaaaattaatatggttatttgttagaagtctggtttataaaaaagccaaaagtgatggaatttattccatttgtcttaggaaggcccataatacttgtttttcttacatgtgactagcaactttctccacttaaagactaaatacctctttatatgatgtaaattattctaattcattttaaaatcttttaggtcagc

SEQ ID NO: 10694 - protein, 180 aa, Homo sapiens; identical to SEQ ID NO: 966

SEQ ID NO: 10695 - DNA, 4567 bp, Homo sapiens
gctcccggaacgcgcgcaccgcagacggcgcggatcgcagggagccggtccgccgccggaacgggagcctgggtgtgcgtgtggagtccggactcgtgggagacgatcgcgatgaacacggtgctgtcgcgggcgaactcactgttcgccttctcgctgagcgtgatggcggcgctcaccttcggctgcttcatcaccaccgccttcaaagacaggagcgtcccggtgcggctgcacgtctcgcggatcatgctaaaaaatgtagaagatttcactggacctagagaaagaagtgatctgggatttatcacatttgatataactgctgatctagagaatatatttgattggaatgttaagcagttgtttctttatttatcagcagaatattcaacaaaaaataatgctctgaaccaagttgtcctatgggacaagattgttttgagaggtgataatccgaagctgctgctgaaagatatgaaaacaaaatattttttctttgacgatggaaatggtctcaagggaaacaggaatgtcactttgaccctgtcttggaacgtcgtaccaaatgctggaattctacctcttgtgacaggatcaggacacgtatctgtcccatttccagatacatatgaaataacgaagagttattaaattattctgaatttgaaacaacatatttttatacttaatgaattgtatctcattaatctcttcccttacatcttcatgtattgttggtttgttttttggttttgggtttttttttttttttttttggtataagaactaacatcaaaaggcctgtttaaagggaaaggttaatgggctacttaatattatgaacaaaacaaaaaaacaaggctgccacagtggaatattatcttacaagaataagaactacataaaacagatttgtaaaaaatacatatttgaagtattccctgtatttccattattctttatggaatataaagtaagcatgaaaggtagttaaaactttcaggtgcctgtagagtcataataactgtattttatgccttgcattcacgcaaattcacattggatgtgatttaaaagtagacattctctttttcctcttttaggatatgtttgattactggaaaattaatatggttatttgttagaagtctggtttataaaaaagccaaaagtgatggaatttattccatttgtcttaggaaggcccataatacttgtttttcttacatgtgactagcaactttctccacttaaagactaaatacctctttatatgatgtaaattattctaattcattttaaaatcttttaggtcagcaaaatgtgtgtcttcagtgctttctctaaaaacgttcctttatagctttgtacttttttttttagcgttgccattgaaagttaaaatgtttgcatggtttaccctctgagttatgtttcttctagtgagcatgcctgctgtcactaagtgaattatttactactttttgtaggtctatattttaataattattgggataataataattgtggtatgctttccatttacaaaccactcatatactttagtgtatgtcatcctcaataatctaatgaggtaagtagtataagtgttagctctttgcagataagaaactgaaacccagaagtttattgaattgcttcattgttacctagccagcaaggagtggaattaaaacttgaactcagatcttctaattttctgagctcatcctttctcttatacctcagattgcagactaatcaaattttacttaaaaccttcctgatatttttgttaccctggacaccctttctattctagaaaaggtttcccattttatatggaagtgactaattttcaagctgccaacaacttatatcgaggtaatattttattctctgaataaattcatttcacttatattaaaagcataaggaaatctacatgtatgtaaaaataacttagaaattcagtacataatacatgattgaatacatgatcgtatttaacatgttttttttttctgcagtggacaaataaacatcctcaaagtagcaactgcaaatcagttacccttagaaaagcaagaccaaacactgtagttacactattagcagtgaccaaaaagggctaatattttctaagaatagtttaaattacagacatttgttatatttaccttatgtgaaatacatcactatttaattacattaattttaacatctgttgtgtggagttgtatagttcatgcaaaagcctgtgggtatgggtttttcaaaccagcagaaaggtcaaaggtacctgaatgctaaactgcctggctcccagctttttcattaaacttttcagggtcttggtttctttatctgtaaaatgacagagttggaccagttaactttaatggccatccttttacaccacacaagttgataaaatttatctgttcagcaaagagattgaacaaaaaagcacgttagtaatatgaagacaggaaaacgaatgaaagtctaacacataactcatattgatttactttatttctgttagattttacactctgaaaatttcacctcatttagtttgtacaaatactagacatggaaacttaaaatgtgcaggtgtcaaagcttaaaaatcaggtgtgtcctctttaaaggcatgtgcgataagcctgcagtcttaaccagacctggtaccagtttaacagttcatgatacttctgtgatgagtggatctgttagtctggtagagattaatgttgaaatttacttgaattacagttatttgacaagcccactttttttggagtttggtgaggaagataagtaaaaatgcccaactagtacaatgtggagaaagttttctgtttgcttgactaagggaaattgctcagaaaaagaatgctccaacatgggaataaggaccttcagtctcaggaactcatttttgggtgcagtttctacatttaaaaaattgacttgtgttcagtttgataaccagttcatttgctttagtctcagtgttttaaagaagtctcataatgttctacaaagacacaaagcttcaggcttatacaaaactgagtatgattagaaatacctgagcccagaaatgattctgagaaaagagaataatttgaagacacttatttaaaagtaattatggttagaaatgaattaatttaaaaatgtgttcacatatccctttctctaacagtttaacctagacaaacatctgtatcagtatttttttattcccctgattgattacatttggtttctttattctgaaaggaaaataacaaaaacttcagaaattcctaagggtgtaataagaaagtgggttttgagtttcctttcctggaattattttacagttctttggtgggtctcgtcagccaattcatagctgggctttaagattatcatcttagagatgatagatgggctttttaaagatttcatcttagagatgaaaagctgggctttttctctaagatgataatcttaaagcccagctattaattgataatgaacatttttcactatttttttttctatctgaagcttagagatctagagctttggatctttcgggtatatgtcaatggaggtattattttataatactttgcattgacatgaagtgggttcatgggggaaaaccatgagctgtgaacattggtagcaaacaagcatatattcatttcaaaactttccttgcttttagcagagagaagcctgtatatgttacatgtgtgactttcagtagtttaaagagatgtttcaaaaaattgttgcatgtttttgatgcaatttgggaaattgtttacttcacaatgtagtcattcataaaaaaattcatgaaaatactgaacatatgtttgaggatttttcttttcctttttaaatttttttattttttctgagacggagatctgctcttacgcccaggctagagtgaagtggcgcgatcttggcttactgcaacctccaccccccaggttcaagcgattctcctgcctcagcctccggagtagctgggattacaggcgcccgccaccacgtccggctaatttttgtattttcagtagagacggggttttgctatgttggccaggctggtctcaaactcctgacctcaagtgatccacctgcctcggcctcccaaagtgttaggataacaggtgtgagccaccgtgcccggctgaagatttttcttaattgcaataaatattcagcattttttctaatgaaaatgaattttgtttaccagtaaaagtatgcattttaaaagactttcagatttatgctttttacgtgaagctgctaaactaaaagtaaatggaagaaaccaagtctagtaggttttttctttttttttgtgggggtgggatgggggaggttagttacacttaaaatatcttctccagagactgtatgctcctatactagactgtaagctctttgagggcagtctgtcagatttatctttgtatcttccccagcgcctagtgtagtgccttgcacataataggcgcccaataaatattgatgaagaatg

SEQ ID NO: 10696 - protein, 180 aa, Homo sapiens; identical to SEQ ID NO: 966

SEQ ID NO: 10697 - DNA, 4863 bp, Homo sapiens
gctcccggaacgcgcgcaccgcagacggcgcggatcgcagggagccggtccgccgccggaacgggagcctgggtgtgcgtgtggagtccggactcgtgggagacgatcgcgatgaacacggtgctgtcgcgggcgaactcactgttcgccttctcgctgagcgtgatggcggcgctcaccttcggctgcttcatcaccaccgccttcaaagacaggagcgtcccggtgcggctgcacgtctcgcggatcatgctaaaaaatgtagaagatttcactggacctagagaaagaagtgatctgggatttatcacatttgatataactgctgatctagagaatatatttgattggaatgttaagcagttgtttctttatttatcagcagaatattcaacaaaaaataatgctctgaaccaagttgtcctatgggacaagattgttttgagaggtgataatccgaagctgctgctgaaagatatgaaaacaaaatattttttctttgacgatggaaatggtctcaagggaaacaggaatgtcactttgaccctgtcttggaacgtcgtaccaaatgctggaattctacctcttgtgacaggatcaggacacgtatctgtcccatttccagatacatatgaaataacgaagagttattaaattattctgaatttgaaacaacatatttttatacttaatgaattgtatctcattaatctcttcccttacatcttcatgtattgttggtttgttttttggttttgggtttttttttttttttttttggtataagaactaacatcaaaaggcctgtttaaagggaaaggttaatgggctacttaatattatgaacaaaacaaaaaaacaaggctgccacagtggaatattatcttacaagaataagaactacataaaacagatttgtaaaaaatacatatttgaagtattccctgtatttccattattctttatggaatataaagtaagcatgaaaggtagttaaaactttcaggtgcctgtagagtcataataactgtattttatgccttgcattcacgcaaattcacattggatgtgatttaaaagtagacattctctttttcctcttttaggatatgtttgattactggaaaattaatatggttatttgttagaagtctggtttataaaaaagccaaaagtgatggaatttattccatttgtcttaggaaggcccataatacttgtttttcttacatgtgactagcaactttctccacttaaagactaaatacctctttatatgatgtaaattattctaattcattttaaaatcttttaggtcagcaaaatgtgtgtcttcagtgctttctctaaaaacgttcctttatagctttgtacttttttttttagcgttgccattgaaagttaaaatgtttgcatggtttaccctctgagttatgtttcttctagtgagcatgcctgctgtcactaagtgaattatttactactttttgtaggtctatattttaataattattgggataataataattgtggtatgctttccatttacaaaccactcatatactttagtgtatgtcatcctcaataatctaatgaggtaagtagtataagtgttagctctttgcagataagaaactgaaacccagaagtttattgaattgcttcattgttacctagccagcaaggagtggaattaaaacttgaactcagatcttctaattttctgagctcatcctttctcttatacctcagattgcagactaatcaaattttacttaaaaccttcctgatatttttgttaccctggacaccctttctattctagaaaaggtttcccattttatatggaagtgactaattttcaagctgccaacaacttatatcgaggtaatattttattctctgaataaattcatttcacttatattaaaagcataaggaaatctacatgtatgtaaaaataacttagaaattcagtacataatacatgattgaatacatgatcgtatttaacatgttttttttttctgcagtggacaaataaacatcctcaaagtagcaactgcaaatcagttacccttagaaaagcaagaccaaacactgtagttacactattagcagtgaccaaaaagggctaatattttctaagaatagtttaaattacagacatttgttatatttaccttatgtgaaatacatcactatttaattacattaattttaacatctgttgtgtggagttgtatagttcatgcaaaagcctgtgggtatgggtttttcaaaccagcagaaaggtcaaaggtacctgaatgctaaactgcctggctcccagctttttcattaaacttttcagggtcttggtttctttatctgtaaaatgacagagttggaccagttaactttaatggccatccttttacaccacacaagttgataaaatttatctgttcagcaaagagattgaacaaaaaagcacgttagtaatatgaagacaggaaaacgaatgaaagtctaacacataactcatattgatttactttatttctgttagattttacactctgaaaatttcacctcatttagtttgtacaaatactagacatggaaacttaaaatgtgcaggtgtcaaagcttaaaaatcaggtgtgtcctctttaaaggcatgtgcgataagcctgcagtcttaaccagacctggtaccagtttaacagttcatgatacttctgtgatgagtggatctgttagtctggtagagattaatgttgaaatttacttgaattacagttatttgacaagcccactttttttggagtttggtgaggaagataagtaaaaatgcccaactagtacaatgtggagaaagttttctgtttgcttgactaagggaaattgctcagaaaaagaatgctccaacatgggaataaggaccttcagtctcaggaactcatttttgggtgcagtttctacatttaaaaaattgacttgtgttcagtttgataaccagttcatttgctttagtctcagtgttttaaagaagtctcataatgttctacaaagacacaaagcttcaggcttatacaaaactgagtatgattagaaatacctgagcccagaaatgattctgagaaaagagaataatttgaagacacttatttaaaagtaattatggttagaaatgaattaatttaaaaatgtgttcacatatccctttctctaacagtttaacctagacaaacatctgtatcagtatttttttattcccctgattgattacatttggtttctttattctgaaaggaaaataacaaaaacttcagaaattcctaagggtgtaataagaaagtgggttttgagtttcctttcctggaattattttacagttctttggtgggtctcgtcagccaattcatagctgggctttaagattatcatcttagagatgatagatgggctttttaaagatttcatcttagagatgaaaagctgggctttttctctaagatgataatcttaaagcccagctattaattgataatgaacatttttcactatttttttttctatctgaagcttagagatctagagctttggatctttcgggtatatgtcaatggaggtattattttataatactttgcattgacatgaagtgggttcatgggggaaaaccatgagctgtgaacattggtagcaaacaagcatatattcatttcaaaactttccttgcttttagcagagagaagcctgtatatgttacatgtgtgactttcagtagtttaaagagatgtttcaaaaaattgttgcatgtttttgatgcaatttgggaaattgtttacttcacaatgtagtcattcataaaaaaattcatgaaaatactgaacatatgtttgaggatttttcttttcctttttaaatttttttattttttctgagacggagatctgctcttacgcccaggctagagtgaagtggcgcgatcttggcttactgcaacctccaccccccaggttcaagcgattctcctgcctcagcctccggagtagctgggattacaggcgcccgccaccacgtccggctaatttttgtattttcagtagagacggggttttgctatgttggccaggctggtctcaaactcctgacctcaagtgatccacctgcctcggcctcccaaagtgttaggataacaggtgtgagccaccgtgcccggctgaagatttttcttaattgcaataaatattcagcattttttctaatgaaaatgaattttgtttaccagtaaaagtatgcattttaaaagactttcagatttatgctttttacgtgaagctgctaaactaaaagtaaatggaagaaaccaagtctagtaggttttttctttttttttgtgggggtgggatgggggaggttagttacacttaaaatatcttctccagagactgtatgctcctatactagactgtaagctctttgagggcagtctgtcagatttatctttgtatcttccccagcgcctagtgtagtgccttgcacataataggcgcccaataaatattgatgaagaatgaaggcgttgtgtttctaatgtgaccaaaccatggggattctttgtcattaataccgtcctcctttgtaagtgctgttttttttttttcattcttgagctcctaatgacattagatcttatcaggggcagttggacagttcagtaaaggtaaatgctgctcttgctctagttgctgtgacctatgttctttctgacttgctaagagagccaagtgatagtggctagtgataagattgatacataaattgctttactttgaaataacactggaaaaccctaccgtagacctgatcaag

SEQ ID NO: 10698 - protein, 180 aa, Homo sapiens; identical to SEQ ID NO: 966

SEQ ID NO: 10699 - DNA, 672 bp, Homo sapiens
ccggaacgcgcgcaccgcagacggcgcggatcgcagggagccggtccgccgccggaacgggagcctgggtgtgcgtgtggagtccggactcgtgggagacgatcgcgatgaacacggtgctgtcgcgggcgaactcactgttcgccttctcgctgagcgtgatggcggcgctcaccttcggctgcttcatcaccaccgccttcaaagacaggagcgtcccggtgcggctgcacgtctcgcggatcatgctaaaaaatgtagaagatttcactggacctagagaaagaagtgatctgggatttatcacatttgatataactgctgatctagagaatatatttgattggaatgttaagcagttgtttctttatttatcagcagaatattcaacaaaaaataatgctctgaaccaagttgtcctatgggacaagattgttttgagaggtgataatccgaagctgctgctgaaagatatgaaaacaaaatattttttctttgacgatggaaatggtctcaagggaaacaggaatgtcactttgaccctgtcttggaacgtcgtaccaaatgctggaattctacctcttgtgacaggatcaggacacgtatctgtcccatttccagatacatatgaaataacgaagagttattaaattattctgaatttgaaacaac

SEQ ID NO: 10700 - protein, 180 aa, Homo sapiens; identical to SEQ ID NO: 966

SEQ ID NO: 10701 - DNA, 619 bp, Homo sapiens
ggaacgcgcgcaccgcagacggcgcggatcgcagggagccggtccgccgccggaacgggagcctgggtgtgcgtgtggagtccggactcgtgggagacgatcgcgatgaacacggtgctgtcgcgggcgaactcactgttcgccttctcgctgagcgtgatggcggcgctcaccttcggctgcttcatcaccaccgccttcaaagacaggagcgtcccggtgcggctgcacgtctcgcggatcatgctaaaaaatgtagaagatttcactggacctagagaaagaagtgatctgggatttatcacatttgatataactgctgatctagagaatatatttgattggaatgttaagcagttgtttctttatttatcagcagaatattcaacaaaaaataatgctctgaaccaagttgtcctatgggacaagattgttttgagaggtgataatccgaagctgctgctgaaagatatgaaaacaaaatattttttctttgacgatggaaatggtctcaagtgagcaattcttggtcatttttttacatttaataagaggtgaaaaagagagaaagatgtatttttattttaaagaaaaatacttgagagtaaaaggagaaaaa

SEQ ID NO: 10702 - protein, 137 aa, Homo sapiens
MNTVLSRANSLFAFSLSVMAALTFGCFITTAFKDRSVPVRLHVSRIMLKNVEDFTGPRERSDLGFITFDITADLENIFDWNVKQLFLYLSAEYSTKNNALNQVVLWDKIVLRGDNPKLLLKDMKTKYFFFDDGNGLK

SEQ ID NO: 10703 - DNA, 2601 bp, Homo sapiens
cggcgcggatcgcagggagccggtccgccgccggaacgggagcctgggtgtgcgtgtggagtccggactcgtgggagacgatcgcgatgaacacggtgctgtcgcgggcgaactcactgttcgccttctcgctgagcgtgatggcggcgctcaccttcggctgcttcatcaccaccgccttcaaagacaggagcgtcccggtgcggctgcacgtctcgcggatcatgctgtgagtgaggccgggccggcggtgcaggacgccgggaccgggctggggcggaagccgaagccgggccgccgcgccggggctgccgtgccggggccgcgggcagggcgtccggatcgccctcctgagcggcagttcgcccccgagggcggtcgtcaggggtggacgtcgcaggcttttccggcgtcccctcggaacttgcacccctccaccgtaaattcccgggcttgctcttaaattttaattttgagcgttcctcaggtcggtgcctccgcttgcttcctgttcctcacttccctccacccacgcctggccaatgagggagcaacacaacagcagagccggcgccgccgcccgcctgggctggcgcctcccgcgcgtccggtgccgctcgtggtccgcatgcgaggccctccaggcgctgccgccgcgctctgggtcgggcttccgtggggtttcctggcggctctggaggccacaggacggggttgtctttgtgtcattcatcacccgagtttgccctgtttgacattccctttacagttgttgcctttgcaccttcagaaggcagtaaacagttggagctgctttgaagttggccagagatgttgggcactgagagaattaagcatcttagccttctgatacagcgagatttttgttttgttgggtttctttatttctttttcttttgccaaccacttgaagaagtctgcgaaaacgccaaaaaatgcagttcgaaatgacagtgccatttcgctattgcctattttgtccttgattttattctctggcacttttgtctttaatcgtcgtatttttccatctcttgttctcatacccttctactctatttccgtcttacacaagttctttaaccttagtttatttctttgtcagaatcgccaagaagccagttatcaaatagcgagccttctccccccaccttttttttttttttttaaattactgtactgatgtttgttagatattgttcgaatagacctggggtggacatcagcactgccattgtcagccctgtgagggttagaagagcttggtgcatattaaacactgaacagatgttagctgttgttgtcttgagcaagttttcttaccattctgggccttaatttctttttgtttaagatggaagtaatacctaatttttaggttgtgagaattatttgaaatgtgaaaaatattgtcagtgggtctgagccgtagtaaacagtaaatagcagctggttacagtagtatccccttaatggggtaggtatacgttccaagacccccagtggatggctgaaaccacggatagcaccaaaccctatatatacttggttttttcctataccgtacatacatacctacctatgataaaacttacaagttaagcacaataagagattaacaataacataatagaactgtaacaatatactataataaaagttatgtgaatatgatctctttccccttctctcaaaataacttattttactggactcacctattttcacaccagattgaccgcggataattgaaaccggaaagtgaaacctcggataagggggtgattactgtatcaccctttaatatgccatctgttagtattcgtatcaccttgtagtcatgtgtagctttcttctacccattctgcaaaattgctttacatcaagtatttactattctttttagcagtttttatccccttctgagttttgttagggattctcttgaggtatatgcaattagctgaagacctactttaatattggattagaatgtttctcctgttttcacacttacaggtttctctggtgtttactcgtttctttgtggaattgcagtttcacctatgcacacacctgtattctttctctttaagaagttacgtgaattgtgtatgttctgttggaaggatggtaaaacttttatctttattcctagaaaaaatgtagaagatttcactggacctagagaaagaagtgatctgggatttatcacatttgatataactgctgatctagagaatatatttgattggaatgttaagcagttgtttctttatttatcagcagaatattcaacaaaaaataatgctctgaaccaagttgtcctatgggacaagattgttttgagaggtgataatccgaagctgctgctgaaagatatgaaaacaaaatattttttctttgacgatggaaatggtctcaagggaaacaggaatgtcactttgaccctgtcttggaacgtcgtaccaaatgctggaattctacctcttgtgacaggatcaggacacgtatctgtcccatttccagatacatatgaaataacgaagagttattaaattattctgaatttgaaacaac

SEQ ID NO: 10704 - protein, 163 aa, Homo sapiens [sequence omitted]

SEQ ID NO: 10705 - DNA, 2654 bp, Homo sapiens
cggcgcggatcgcagggagccggtccgccgccggaacgggagcctgggtgtgcgtgtggagtccggactcgtgggagacgatcgcgatgaacacggtgctgtcgcgggcgaactcactgttcgccttctcgctgagcgtgatggcggcgctcaccttcggctgcttcatcaccaccgccttcaaagacaggagcgtcccggtgcggctgcacgtctcgcggatcatgctgtgagtgaggccgggccggcggtgcaggacgccgggaccgggctggggcggaagccgaagccgggccgccgcgccggggctgccgtgccggggccgcgggcagggcgtccggatcgccctcctgagcggcagttcgcccccgagggcggtcgtcaggggtggacgtcgcaggcttttccggcgtcccctcggaacttgcacccctccaccgtaaattcccgggcttgctcttaaattttaattttgagcgttcctcaggtcggtgcctccgcttgcttcctgttcctcacttccctccacccacgcctggccaatgagggagcaacacaacagcagagccggcgccgccgcccgcctgggctggcgcctcccgcgcgtccggtgccgctcgtggtccgcatgcgaggccctccaggcgctgccgccgcgctctgggtcgggcttccgtggggtttcctggcggctctggaggccacaggacggggttgtctttgtgtcattcatcacccgagtttgccctgtttgacattccctttacagttgttgcctttgcaccttcagaaggcagtaaacagttggagctgctttgaagttggccagagatgttgggcactgagagaattaagcatcttagccttctgatacagcgagatttttgttttgttgggtttctttatttctttttcttttgccaaccacttgaagaagtctgcgaaaacgccaaaaaatgcagttcgaaatgacagtgccatttcgctattgcctattttgtccttgattttattctctggcacttttgtctttaatcgtcgtatttttccatctcttgttctcatacccttctactctatttccgtcttacacaagttctttaaccttagtttatttctttgtcagaatcgccaagaagccagttatcaaatagcgagccttctccccccaccttttttttttttttttaaattactgtactgatgtttgttagatattgttcgaatagacctggggtggacatcagcactgccattgtcagccctgtgagggttagaagagcttggtgcatattaaacactgaacagatgttagctgttgttgtcttgagcaagttttcttaccattctgggccttaatttctttttgtttaagatggaagtaatacctaatttttaggttgtgagaattatttgaaatgtgaaaaatattgtcagtgggtctgagccgtagtaaacagtaaatagcagctggttacagtagtatccccttaatggggtaggtatacgttccaagacccccagtggatggctgaaaccacggatagcaccaaaccctatatatacttggttttttcctataccgtacatacatacctacctatgataaaacttacaagttaagcacaataagagattaacaataacataatagaactgtaacaatatactataataaaagttatgtgaatatgatctctttccccttctctcaaaataacttattttactggactcacctattttcacaccagattgaccgcggataattgaaaccggaaagtgaaacctcggataagggggtgattactgtatcaccctttaatatgccatctgttagtattcgtatcaccttgtagtcatgtgtagctttcttctacccattctgcaaaattgctttacatcaagtatttactattctttttagcagtttttatccccttctgagttttgttagggattctcttgaggtatatgcaattagctgaagacctactttaatattggattagaatgtttctcctgttttcacacttacaggtttctctggtgtttactcgtttctttgtggaattgcagtttcacctatgcacacacctgtattctttctctttaagaagttacgtgaattgtgtatgttctgttggaaggatggtaaaacttttatctttattcctagaaaaaatgtagaagatttcactggacctagagaaagaagtgatctgggatttatcacatttgatataactgctgatctagagaatatatttgattggaatgttaagcagttgtttctttatttatcagcagaatattcaacaaaaaataatgctctgaaccaagttgtcctatgggacaagattgttttgagaggtgataatccgaagctgctgctgaaagatatgaaaacaaaatattttttctttgacgatggaaatggtctcaagggaaacaggaatgtcactttgaccctgtcttggaacgtcgtaccaaatgctggaattctacctcttgtgacaggatcaggacacgtatctgtcccatttccagatacatatgaaataacgaagagttattaaattattctgaatttgaaacaacatatttttatacttaatgaattgtatctcattaatctcttcccttacatcttc

SEQ ID NO: 10706 - protein, 163 aa, Homo sapiens [sequence omitted]

SEQ ID NO: 10707 - DNA, 3246 bp, Homo sapiens
cggcgcggatcgcagggagccggtccgccgccggaacgggagcctgggtgtgcgtgtggagtccggactcgtgggagacgatcgcgatgaacacggtgctgtcgcgggcgaactcactgttcgccttctcgctgagcgtgatggcggcgctcaccttcggctgcttcatcaccaccgccttcaaagacaggagcgtcccggtgcggctgcacgtctcgcggatcatgctgtgagtgaggccgggccggcggtgcaggacgccgggaccgggctggggcggaagccgaagccgggccgccgcgccggggctgccgtgccggggccgcgggcagggcgtccggatcgccctcctgagcggcagttcgcccccgagggcggtcgtcaggggtggacgtcgcaggcttttccggcgtcccctcggaacttgcacccctccaccgtaaattcccgggcttgctcttaaattttaattttgagcgttcctcaggtcggtgcctccgcttgcttcctgttcctcacttccctccacccacgcctggccaatgagggagcaacacaacagcagagccggcgccgccgcccgcctgggctggcgcctcccgcgcgtccggtgccgctcgtggtccgcatgcgaggccctccaggcgctgccgccgcgctctgggtcgggcttccgtggggtttcctggcggctctggaggccacaggacggggttgtctttgtgtcattcatcacccgagtttgccctgtttgacattccctttacagttgttgcctttgcaccttcagaaggcagtaaacagttggagctgctttgaagttggccagagatgttgggcactgagagaattaagcatcttagccttctgatacagcgagatttttgttttgttgggtttctttatttctttttcttttgccaaccacttgaagaagtctgcgaaaacgccaaaaaatgcagttcgaaatgacagtgccatttcgctattgcctattttgtccttgattttattctctggcacttttgtctttaatcgtcgtatttttccatctcttgttctcatacccttctactctatttccgtcttacacaagttctttaaccttagtttatttctttgtcagaatcgccaagaagccagttatcaaatagcgagccttctccccccaccttttttttttttttttaaattactgtactgatgtttgttagatattgttcgaatagacctggggtggacatcagcactgccattgtcagccctgtgagggttagaagagcttggtgcatattaaacactgaacagatgttagctgttgttgtcttgagcaagttttcttaccattctgggccttaatttctttttgtttaagatggaagtaatacctaatttttaggttgtgagaattatttgaaatgtgaaaaatattgtcagtgggtctgagccgtagtaaacagtaaatagcagctggttacagtagtatccccttaatggggtaggtatacgttccaagacccccagtggatggctgaaaccacggatagcaccaaaccctatatatacttggttttttcctataccgtacatacatacctacctatgataaaacttacaagttaagcacaataagagattaacaataacataatagaactgtaacaatatactataataaaagttatgtgaatatgatctctttccccttctctcaaaataacttattttactggactcacctattttcacaccagattgaccgcggataattgaaaccggaaagtgaaacctcggataagggggtgattactgtatcaccctttaatatgccatctgttagtattcgtatcaccttgtagtcatgtgtagctttcttctacccattctgcaaaattgctttacatcaagtatttactattctttttagcagtttttatccccttctgagttttgttagggattctcttgaggtatatgcaattagctgaagacctactttaatattggattagaatgtttctcctgttttcacacttacaggtttctctggtgtttactcgtttctttgtggaattgcagtttcacctatgcacacacctgtattctttctctttaagaagttacgtgaattgtgtatgttctgttggaaggatggtaaaacttttatctttattcctagaaaaaatgtagaagatttcactggacctagagaaagaagtgatctgggatttatcacatttgatataactgctgatctagagaatatatttgattggaatgttaagcagttgtttctttatttatcagcagaatattcaacaaaaaataatgctctgaaccaagttgtcctatgggacaagattgttttgagaggtgataatccgaagctgctgctgaaagatatgaaaacaaaatattttttctttgacgatggaaatggtctcaagggaaacaggaatgtcactttgaccctgtcttggaacgtcgtaccaaatgctggaattctacctcttgtgacaggatcaggacacgtatctgtcccatttccagatacatatgaaataacgaagagttattaaattattctgaatttgaaacaacatatttttatacttaatgaattgtatctcattaatctcttcccttacatcttcatgtattgttggtttgttttttggttttgggtttttttttttttttttttggtataagaactaacatcaaaaggcctgtttaaagggaaaggttaatgggctacttaatattatgaacaaaacaaaaaaacaaggctgccacagtggaatattatcttacaagaataagaactacataaaacagatttgtaaaaaatacatatttgaagtattccctgtatttccattattctttatggaatataaagtaagcatgaaaggtagttaaaactttcaggtgcctgtagagtcataataactgtattttatgccttgcattcacgcaaattcacattggatgtgatttaaaagtagacattctctttttcctcttttaggatatgtttgattactggaaaattaatatggttatttgttagaagtctggtttataaaaaagccaaaagtgatggaatttattccatttgtcttaggaaggcccataatacttgtttttcttacatgtgactagcaactttctccacttaaagactaaatacctctttatatgatgtaaattattctaattcattttaaaatcttttaggtcagc

SEQ ID NO: 10708 - protein, 163 aa, Homo sapiens [sequence omitted]

SEQ ID NO: 10709 - DNA, 6492 bp, Homo sapiens
cggcgcggatcgcagggagccggtccgccgccggaacgggagcctgggtgtgcgtgtggagtccggactcgtgggagacgatcgcgatgaacacggtgctgtcgcgggcgaactcactgttcgccttctcgctgagcgtgatggcggcgctcaccttcggctgcttcatcaccaccgccttcaaagacaggagcgtcccggtgcggctgcacgtctcgcggatcatgctgtgagtgaggccgggccggcggtgcaggacgccgggaccgggctggggcggaagccgaagccgggccgccgcgccggggctgccgtgccggggccgcgggcagggcgtccggatcgccctcctgagcggcagttcgcccccgagggcggtcgtcaggggtggacgtcgcaggcttttccggcgtcccctcggaacttgcacccctccaccgtaaattcccgggcttgctcttaaattttaattttgagcgttcctcaggtcggtgcctccgcttgcttcctgttcctcacttccctccacccacgcctggccaatgagggagcaacacaacagcagagccggcgccgccgcccgcctgggctggcgcctcccgcgcgtccggtgccgctcgtggtccgcatgcgaggccctccaggcgctgccgccgcgctctgggtcgggcttccgtggggtttcctggcggctctggaggccacaggacggggttgtctttgtgtcattcatcacccgagtttgccctgtttgacattccctttacagttgttgcctttgcaccttcagaaggcagtaaacagttggagctgctttgaagttggccagagatgttgggcactgagagaattaagcatcttagccttctgatacagcgagatttttgttttgttgggtttctttatttctttttcttttgccaaccacttgaagaagtctgcgaaaacgccaaaaaatgcagttcgaaatgacagtgccatttcgctattgcctattttgtccttgattttattctctggcacttttgtctttaatcgtcgtatttttccatctcttgttctcatacccttctactctatttccgtcttacacaagttctttaaccttagtttatttctttgtcagaatcgccaagaagccagttatcaaatagcgagccttctccccccaccttttttttttttttttaaattactgtactgatgtttgttagatattgttcgaatagacctggggtggacatcagcactgccattgtcagccctgtgagggttagaagagcttggtgcatattaaacactgaacagatgttagctgttgttgtcttgagcaagttttcttaccattctgggccttaatttctttttgtttaagatggaagtaatacctaatttttaggttgtgagaattatttgaaatgtgaaaaatattgtcagtgggtctgagccgtagtaaacagtaaatagcagctggttacagtagtatccccttaatggggtaggtatacgttccaagacccccagtggatggctgaaaccacggatagcaccaaaccctatatatacttggttttttcctataccgtacatacatacctacctatgataaaacttacaagttaagcacaataagagattaacaataacataatagaactgtaacaatatactataataaaagttatgtgaatatgatctctttccccttctctcaaaataacttattttactggactcacctattttcacaccagattgaccgcggataattgaaaccggaaagtgaaacctcggataagggggtgattactgtatcaccctttaatatgccatctgttagtattcgtatcaccttgtagtcatgtgtagctttcttctacccattctgcaaaattgctttacatcaagtatttactattctttttagcagtttttatccccttctgagttttgttagggattctcttgaggtatatgcaattagctgaagacctactttaatattggattagaatgtttctcctgttttcacacttacaggtttctctggtgtttactcgtttctttgtggaattgcagtttcacctatgcacacacctgtattctttctctttaagaagttacgtgaattgtgtatgttctgttggaaggatggtaaaacttttatctttattcctagaaaaaatgtagaagatttcactggacctagagaaagaagtgatctgggatttatcacatttgatataactgctgatctagagaatatatttgattggaatgttaagcagttgtttctttatttatcagcagaatattcaacaaaaaataatgctctgaaccaagttgtcctatgggacaagattgttttgagaggtgataatccgaagctgctgctgaaagatatgaaaacaaaatattttttctttgacgatggaaatggtctcaagggaaacaggaatgtcactttgaccctgtcttggaacgtcgtaccaaatgctggaattctacctcttgtgacaggatcaggacacgtatctgtcccatttccagatacatatgaaataacgaagagttattaaattattctgaatttgaaacaacatatttttatacttaatgaattgtatctcattaatctcttcccttacatcttcatgtattgttggtttgttttttggttttgggtttttttttttttttttttggtataagaactaacatcaaaaggcctgtttaaagggaaaggttaatgggctacttaatattatgaacaaaacaaaaaaacaaggctgccacagtggaatattatcttacaagaataagaactacataaaacagatttgtaaaaaatacatatttgaagtattccctgtatttccattattctttatggaatataaagtaagcatgaaaggtagttaaaactttcaggtgcctgtagagtcataataactgtattttatgccttgcattcacgcaaattcacattggatgtgatttaaaagtagacattctctttttcctcttttaggatatgtttgattactggaaaattaatatggttatttgttagaagtctggtttataaaaaagccaaaagtgatggaatttattccatttgtcttaggaaggcccataatacttgtttttcttacatgtgactagcaactttctccacttaaagactaaatacctctttatatgatgtaaattattctaattcattttaaaatcttttaggtcagcaaaatgtgtgtcttcagtgctttctctaaaaacgttcctttatagctttgtacttttttttttagcgttgccattgaaagttaaaatgtttgcatggtttaccctctgagttatgtttcttctagtgagcatgcctgctgtcactaagtgaattatttactactttttgtaggtctatattttaataattattgggataataataattgtggtatgctttccatttacaaaccactcatatactttagtgtatgtcatcctcaataatctaatgaggtaagtagtataagtgttagctctttgcagataagaaactgaaacccagaagtttattgaattgcttcattgttacctagccagcaaggagtggaattaaaacttgaactcagatcttctaattttctgagctcatcctttctcttatacctcagattgcagactaatcaaattttacttaaaaccttcctgatatttttgttaccctggacaccctttctattctagaaaaggtttcccattttatatggaagtgactaattttcaagctgccaacaacttatatcgaggtaatattttattctctgaataaattcatttcacttatattaaaagcataaggaaatctacatgtatgtaaaaataacttagaaattcagtacataatacatgattgaatacatgatcgtatttaacatgttttttttttctgcagtggacaaataaacatcctcaaagtagcaactgcaaatcagttacccttagaaaagcaagaccaaacactgtagttacactattagcagtgaccaaaaagggctaatattttctaagaatagtttaaattacagacatttgttatatttaccttatgtgaaatacatcactatttaattacattaattttaacatctgttgtgtggagttgtatagttcatgcaaaagcctgtgggtatgggtttttcaaaccagcagaaaggtcaaaggtacctgaatgctaaactgcctggctcccagctttttcattaaacttttcagggtcttggtttctttatctgtaaaatgacagagttggaccagttaactttaatggccatccttttacaccacacaagttgataaaatttatctgttcagcaaagagattgaacaaaaaagcacgttagtaatatgaagacaggaaaacgaatgaaagtctaacacataactcatattgatttactttatttctgttagattttacactctgaaaatttcacctcatttagtttgtacaaatactagacatggaaacttaaaatgtgcaggtgtcaaagcttaaaaatcaggtgtgtcctctttaaaggcatgtgcgataagcctgcagtcttaaccagacctggtaccagtttaacagttcatgatacttctgtgatgagtggatctgttagtctggtagagattaatgttgaaatttacttgaattacagttatttgacaagcccactttttttggagtttggtgaggaagataagtaaaaatgcccaactagtacaatgtggagaaagttttctgtttgcttgactaagggaaattgctcagaaaaagaatgctccaacatgggaataaggaccttcagtctcaggaactcatttttgggtgcagtttctacatttaaaaaattgacttgtgttcagtttgataaccagttcatttgctttagtctcagtgttttaaagaagtctcataatgttctacaaagacacaaagcttcaggcttatacaaaactgagtatgattagaaatacctgagcccagaaatgattctgagaaaagagaataatttgaagacacttatttaaaagtaattatggttagaaatgaattaatttaaaaatgtgttcacatatccctttctctaacagtttaacctagacaaacatctgtatcagtatttttttattcccctgattgattacatttggtttctttattctgaaaggaaaataacaaaaacttcagaaattcctaagggtgtaataagaaagtgggttttgagtttcctttcctggaattattttacagttctttggtgggtctcgtcagccaattcatagctgggctttaagattatcatcttagagatgatagatgggctttttaaagatttcatcttagagatgaaaagctgggctttttctctaagatgataatcttaaagcccagctattaattgataatgaacatttttcactatttttttttctatctgaagcttagagatctagagctttggatctttcgggtatatgtcaatggaggtattattttataatactttgcattgacatgaagtgggttcatgggggaaaaccatgagctgtgaacattggtagcaaacaagcatatattcatttcaaaactttccttgcttttagcagagagaagcctgtatatgttacatgtgtgactttcagtagtttaaagagatgtttcaaaaaattgttgcatgtttttgatgcaatttgggaaattgtttacttcacaatgtagtcattcataaaaaaattcatgaaaatactgaacatatgtttgaggatttttcttttcctttttaaatttttttattttttctgagacggagatctgctcttacgcccaggctagagtgaagtggcgcgatcttggcttactgcaacctccaccccccaggttcaagcgattctcctgcctcagcctccggagtagctgggattacaggcgcccgccaccacgtccggctaatttttgtattttcagtagagacggggttttgctatgttggccaggctggtctcaaactcctgacctcaagtgatccacctgcctcggcctcccaaagtgttaggataacaggtgtgagccaccgtgcccggctgaagatttttcttaattgcaataaatattcagcattttttctaatgaaaatgaattttgtttaccagtaaaagtatgcattttaaaagactttcagatttatgctttttacgtgaagctgctaaactaaaagtaaatggaagaaaccaagtctagtaggttttttctttttttttgtgggggtgggatgggggaggttagttacacttaaaatatcttctccagagactgtatgctcctatactagactgtaagctctttgagggcagtctgtcagatttatctttgtatcttccccagcgcctagtgtagtgccttgcacataataggcgcccaataaatattgatgaagaatg

SEQ ID NO: 10710 - protein, 163 aa, Homo sapiens [sequence omitted]

SEQ ID NO: 10711 - DNA, 6788 bp, Homo sapiens
cggcgcggatcgcagggagccggtccgccgccggaacgggagcctgggtgtgcgtgtggagtccggactcgtgggagacgatcgcgatgaacacggtgctgtcgcgggcgaactcactgttcgccttctcgctgagcgtgatggcggcgctcaccttcggctgcttcatcaccaccgccttcaaagacaggagcgtcccggtgcggctgcacgtctcgcggatcatgctgtgagtgaggccgggccggcggtgcaggacgccgggaccgggctggggcggaagccgaagccgggccgccgcgccggggctgccgtgccggggccgcgggcagggcgtccggatcgccctcctgagcggcagttcgcccccgagggcggtcgtcaggggtggacgtcgcaggcttttccggcgtcccctcggaacttgcacccctccaccgtaaattcccgggcttgctcttaaattttaattttgagcgttcctcaggtcggtgcctccgcttgcttcctgttcctcacttccctccacccacgcctggccaatgagggagcaacacaacagcagagccggcgccgccgcccgcctgggctggcgcctcccgcgcgtccggtgccgctcgtggtccgcatgcgaggccctccaggcgctgccgccgcgctctgggtcgggcttccgtggggtttcctggcggctctggaggccacaggacggggttgtctttgtgtcattcatcacccgagtttgccctgtttgacattccctttacagttgttgcctttgcaccttcagaaggcagtaaacagttggagctgctttgaagttggccagagatgttgggcactgagagaattaagcatcttagccttctgatacagcgagatttttgttttgttgggtttctttatttctttttcttttgccaaccacttgaagaagtctgcgaaaacgccaaaaaatgcagttcgaaatgacagtgccatttcgctattgcctattttgtccttgattttattctctggcacttttgtctttaatcgtcgtatttttccatctcttgttctcatacccttctactctatttccgtcttacacaagttctttaaccttagtttatttctttgtcagaatcgccaagaagccagttatcaaatagcgagccttctccccccaccttttttttttttttttaaattactgtactgatgtttgttagatattgttcgaatagacctggggtggacatcagcactgccattgtcagccctgtgagggttagaagagcttggtgcatattaaacactgaacagatgttagctgttgttgtcttgagcaagttttcttaccattctgggccttaatttctttttgtttaagatggaagtaatacctaatttttaggttgtgagaattatttgaaatgtgaaaaatattgtcagtgggtctgagccgtagtaaacagtaaatagcagctggttacagtagtatccccttaatggggtaggtatacgttccaagacccccagtggatggctgaaaccacggatagcaccaaaccctatatatacttggttttttcctataccgtacatacatacctacctatgataaaacttacaagttaagcacaataagagattaacaataacataatagaactgtaacaatatactataataaaagttatgtgaatatgatctctttccccttctctcaaaataacttattttactggactcacctattttcacaccagattgaccgcggataattgaaaccggaaagtgaaacctcggataagggggtgattactgtatcaccctttaatatgccatctgttagtattcgtatcaccttgtagtcatgtgtagctttcttctacccattctgcaaaattgctttacatcaagtatttactattctttttagcagtttttatccccttctgagttttgttagggattctcttgaggtatatgcaattagctgaagacctactttaatattggattagaatgtttctcctgttttcacacttacaggtttctctggtgtttactcgtttctttgtggaattgcagtttcacctatgcacacacctgtattctttctctttaagaagttacgtgaattgtgtatgttctgttggaaggatggtaaaacttttatctttattcctagaaaaaatgtagaagatttcactggacctagagaaagaagtgatctgggatttatcacatttgatataactgctgatctagagaatatatttgattggaatgttaagcagttgtttctttatttatcagcagaatattcaacaaaaaataatgctctgaaccaagttgtcctatgggacaagattgttttgagaggtgataatccgaagctgctgctgaaagatatgaaaacaaaatattttttctttgacgatggaaatggtctcaagggaaacaggaatgtcactttgaccctgtcttggaacgtcgtaccaaatgctggaattctacctcttgtgacaggatcaggacacgtatctgtcccatttccagatacatatgaaataacgaagagttattaaattattctgaatttgaaacaacatatttttatacttaatgaattgtatctcattaatctcttcccttacatcttcatgtattgttggtttgttttttggttttgggtttttttttttttttttttggtataagaactaacatcaaaaggcctgtttaaagggaaaggttaatgggctacttaatattatgaacaaaacaaaaaaacaaggctgccacagtggaatattatcttacaagaataagaactacataaaacagatttgtaaaaaatacatatttgaagtattccctgtatttccattattctttatggaatataaagtaagcatgaaaggtagttaaaactttcaggtgcctgtagagtcataataactgtattttatgccttgcattcacgcaaattcacattggatgtgatttaaaagtagacattctctttttcctcttttaggatatgtttgattactggaaaattaatatggttatttgttagaagtctggtttataaaaaagccaaaagtgatggaatttattccatttgtcttaggaaggcccataatacttgtttttcttacatgtgactagcaactttctccacttaaagactaaatacctctttatatgatgtaaattattctaattcattttaaaatcttttaggtcagcaaaatgtgtgtcttcagtgctttctctaaaaacgttcctttatagctttgtacttttttttttagcgttgccattgaaagttaaaatgtttgcatggtttaccctctgagttatgtttcttctagtgagcatgcctgctgtcactaagtgaattatttactactttttgtaggtctatattttaataattattgggataataataattgtggtatgctttccatttacaaaccactcatatactttagtgtatgtcatcctcaataatctaatgaggtaagtagtataagtgttagctctttgcagataagaaactgaaacccagaagtttattgaattgcttcattgttacctagccagcaaggagtggaattaaaacttgaactcagatcttctaattttctgagctcatcctttctcttatacctcagattgcagactaatcaaattttacttaaaaccttcctgatatttttgttaccctggacaccctttctattctagaaaaggtttcccattttatatggaagtgactaattttcaagctgccaacaacttatatcgaggtaatattttattctctgaataaattcatttcacttatattaaaagcataaggaaatctacatgtatgtaaaaataacttagaaattcagtacataatacatgattgaatacatgatcgtatttaacatgttttttttttctgcagtggacaaataaacatcctcaaagtagcaactgcaaatcagttacccttagaaaagcaagaccaaacactgtagttacactattagcagtgaccaaaaagggctaatattttctaagaatagtttaaattacagacatttgttatatttaccttatgtgaaatacatcactatttaattacattaattttaacatctgttgtgtggagttgtatagttcatgcaaaagcctgtgggtatgggtttttcaaaccagcagaaaggtcaaaggtacctgaatgctaaactgcctggctcccagctttttcattaaacttttcagggtcttggtttctttatctgtaaaatgacagagttggaccagttaactttaatggccatccttttacaccacacaagttgataaaatttatctgttcagcaaagagattgaacaaaaaagcacgttagtaatatgaagacaggaaaacgaatgaaagtctaacacataactcatattgatttactttatttctgttagattttacactctgaaaatttcacctcatttagtttgtacaaatactagacatggaaacttaaaatgtgcaggtgtcaaagcttaaaaatcaggtgtgtcctctttaaaggcatgtgcgataagcctgcagtcttaaccagacctggtaccagtttaacagttcatgatacttctgtgatgagtggatctgttagtctggtagagattaatgttgaaatttacttgaattacagttatttgacaagcccactttttttggagtttggtgaggaagataagtaaaaatgcccaactagtacaatgtggagaaagttttctgtttgcttgactaagggaaattgctcagaaaaagaatgctccaacatgggaataaggaccttcagtctcaggaactcatttttgggtgcagtttctacatttaaaaaattgacttgtgttcagtttgataaccagttcatttgctttagtctcagtgttttaaagaagtctcataatgttctacaaagacacaaagcttcaggcttatacaaaactgagtatgattagaaatacctgagcccagaaatgattctgagaaaagagaataatttgaagacacttatttaaaagtaattatggttagaaatgaattaatttaaaaatgtgttcacatatccctttctctaacagtttaacctagacaaacatctgtatcagtatttttttattcccctgattgattacatttggtttctttattctgaaaggaaaataacaaaaacttcagaaattcctaagggtgtaataagaaagtgggttttgagtttcctttcctggaattattttacagttctttggtgggtctcgtcagccaattcatagctgggctttaagattatcatcttagagatgatagatgggctttttaaagatttcatcttagagatgaaaagctgggctttttctctaagatgataatcttaaagcccagctattaattgataatgaacatttttcactatttttttttctatctgaagcttagagatctagagctttggatctttcgggtatatgtcaatggaggtattattttataatactttgcattgacatgaagtgggttcatgggggaaaaccatgagctgtgaacattggtagcaaacaagcatatattcatttcaaaactttccttgcttttagcagagagaagcctgtatatgttacatgtgtgactttcagtagtttaaagagatgtttcaaaaaattgttgcatgtttttgatgcaatttgggaaattgtttacttcacaatgtagtcattcataaaaaaattcatgaaaatactgaacatatgtttgaggatttttcttttcctttttaaatttttttattttttctgagacggagatctgctcttacgcccaggctagagtgaagtggcgcgatcttggcttactgcaacctccaccccccaggttcaagcgattctcctgcctcagcctccggagtagctgggattacaggcgcccgccaccacgtccggctaatttttgtattttcagtagagacggggttttgctatgttggccaggctggtctcaaactcctgacctcaagtgatccacctgcctcggcctcccaaagtgttaggataacaggtgtgagccaccgtgcccggctgaagatttttcttaattgcaataaatattcagcattttttctaatgaaaatgaattttgtttaccagtaaaagtatgcattttaaaagactttcagatttatgctttttacgtgaagctgctaaactaaaagtaaatggaagaaaccaagtctagtaggttttttctttttttttgtgggggtgggatgggggaggttagttacacttaaaatatcttctccagagactgtatgctcctatactagactgtaagctctttgagggcagtctgtcagatttatctttgtatcttccccagcgcctagtgtagtgccttgcacataataggcgcccaataaatattgatgaagaatgaaggcgttgtgtttctaatgtgaccaaaccatggggattctttgtcattaataccgtcctcctttgtaagtgctgttttttttttttcattcttgagctcctaatgacattagatcttatcaggggcagttggacagttcagtaaaggtaaatgctgctcttgctctagttgctgtgacctatgttctttctgacttgctaagagagccaagtgatagtggctagtgataagattgatacataaattgctttactttgaaataacactggaaaaccctaccgtagacctgatcaag

SEQ ID NO: 10712 - protein, 163 aa, Homo sapiens [sequence omitted]

SEQ ID NO: 10713 - DNA, 477 bp, Homo sapiens
gggaattgtcattcttctctctgagaaaagtttgccccttttttgtatctctctctttgctatcatttgtatgcattaagatttcagcaagctcctcaagttgaattcattaacatgtcaaactatttgcttactaatacttttaatttgaagtgataagatggtatttctgatgagttatctaattaattttcattttaatataggctctgaaccaagttgtcctatgggacaagattgttttgagaggtgataatccgaagctgctgctgaaagatatgaaaacaaaatattttttctttgacgatggaaatggtctcaagggaaacaggaatgtcactttgaccctgtcttggaacgtcgtaccaaatgctggaattctacctcttgtgacaggatcaggacacgtatctgtcccatttccagatacatatgaaataacgaagagttattaaattattctgaatttgaaacaac

SEQ ID NO: 10714 - protein, 58 aa, Homo sapiens
MKTKYFFFDDGNGLKGNRNVTLTLSWNVVPNAGILPLVTGSGHVSVPFPDTYEITKSY

SEQ ID NO: 10715 - DNA, 1941 bp, Homo sapiens
gagctcatcctttctcttatacctcagattgcagactaatcaaattttacttaaaaccttcctgatatttttgttaccctggacaccctttctattctagaaaaggtttcccattttatatggaagtgactaattttcaagctgccaacaacttatatcgaggtaatattttattctctgaataaattcatttcacttatattaaaagcataaggaaatctacatgtatgtaaaaataacttagaaattcagtacataatacatgattgaatacatgatcgtatttaacatgttttttttttctgcagtggacaaataaacatcctcaaagtagcaactgcaaatcagttacccttagaaaagcaagaccaaacactgtagttacactattagcagtgaccaaaaagggctaatattttctaagaatagtttaaattacagacatttgttatatttaccttatgtgaaatacatcactatttaattacattaattttaacatctgttgtgtggagttgtatagttcatgcaaaagcctgtgggtatgggtttttcaaaccagcagaaaggtcaaaggtacctgaatgctaaactgcctggctcccagctttttcattaaacttttcagggtcttggtttctttatctgtaaaatgacagagttggaccagttaactttaatggccatccttttacaccacacaagttgataaaatttatctgttcagcaaagagattgaacaaaaaagcacgttagtaatatgaagacaggaaaacgaatgaaagtctaacacataactcatattgatttactttatttctgttagattttacactctgaaaatttcacctcatttagtttgtacaaatactagacatggaaacttaaagcccagctattaattgataatgaacatttttcactatttttttttctatctgaagcttagagatctagagctttggatctttcgggtatatgtcaatggaggtattattttataatactttgcattgacatgaagtgggttcatgggggaaaaccatgagctgtgaacattggtagcaaacaagcatatattcatttcaaaactttccttgcttttagcagagagaagcctgtatatgttacatgtgtgactttcagtagtttaaagagatgtttcaaaaaattgttgcatgtttttgatgcaatttgggaaattgtttacttcacaatgtagtcattcataaaaaaattcatgaaaatactgaacatatgtttgaggatttttcttttcctttttaaatttttttattttttctgagacggagatctgctcttacgcccaggctagagtgaagtggcgcgatcttggcttactgcaacctccaccccccaggttcaagcgattctcctgcctcagcctccggagtagctgggattacaggcgcccgccaccacgtccggctaatttttgtattttcagtagagacggggttttgctatgttggccaggctggtctcaaactcctgacctcaagtgatccacctgcctcggcctcccaaagtgttaggataacaggtgtgagccaccgtgcccggctgaagatttttcttaattgcaataaatattcagcattttttctaatgaaaatgaattttgtttaccagtaaaagtatgcattttaaaagactttcagatttatgctttttacgtgaagctgctaaactaaaagtaaatggaagaaaccaagtctagtaggttttttctttttttttgtgggggtgggatgggggaggttagttacacttaaaatatcttctccagagactgtatgctcctatactagactgtaagctctttgagggcagtctgtcagatttatctttgtatcttccccagcgcctagtgtagtgccttgcacataataggcgcccaataaatattgatgaagaatg

SEQ ID NO: 10716 - protein, 31 aa, Homo sapiens
MNIFHYFFFYLKLRDLELWIFRVYVNGGIIL

SEQ ID NO: 10717 - DNA, 2237 bp, Homo sapiens
gagctcatcctttctcttatacctcagattgcagactaatcaaattttacttaaaaccttcctgatatttttgttaccctggacaccctttctattctagaaaaggtttcccattttatatggaagtgactaattttcaagctgccaacaacttatatcgaggtaatattttattctctgaataaattcatttcacttatattaaaagcataaggaaatctacatgtatgtaaaaataacttagaaattcagtacataatacatgattgaatacatgatcgtatttaacatgttttttttttctgcagtggacaaataaacatcctcaaagtagcaactgcaaatcagttacccttagaaaagcaagaccaaacactgtagttacactattagcagtgaccaaaaagggctaatattttctaagaatagtttaaattacagacatttgttatatttaccttatgtgaaatacatcactatttaattacattaattttaacatctgttgtgtggagttgtatagttcatgcaaaagcctgtgggtatgggtttttcaaaccagcagaaaggtcaaaggtacctgaatgctaaactgcctggctcccagctttttcattaaacttttcagggtcttggtttctttatctgtaaaatgacagagttggaccagttaactttaatggccatccttttacaccacacaagttgataaaatttatctgttcagcaaagagattgaacaaaaaagcacgttagtaatatgaagacaggaaaacgaatgaaagtctaacacataactcatattgatttactttatttctgttagattttacactctgaaaatttcacctcatttagtttgtacaaatactagacatggaaacttaaagcccagctattaattgataatgaacatttttcactatttttttttctatctgaagcttagagatctagagctttggatctttcgggtatatgtcaatggaggtattattttataatactttgcattgacatgaagtgggttcatgggggaaaaccatgagctgtgaacattggtagcaaacaagcatatattcatttcaaaactttccttgcttttagcagagagaagcctgtatatgttacatgtgtgactttcagtagtttaaagagatgtttcaaaaaattgttgcatgtttttgatgcaatttgggaaattgtttacttcacaatgtagtcattcataaaaaaattcatgaaaatactgaacatatgtttgaggatttttcttttcctttttaaatttttttattttttctgagacggagatctgctcttacgcccaggctagagtgaagtggcgcgatcttggcttactgcaacctccaccccccaggttcaagcgattctcctgcctcagcctccggagtagctgggattacaggcgcccgccaccacgtccggctaatttttgtattttcagtagagacggggttttgctatgttggccaggctggtctcaaactcctgacctcaagtgatccacctgcctcggcctcccaaagtgttaggataacaggtgtgagccaccgtgcccggctgaagatttttcttaattgcaataaatattcagcattttttctaatgaaaatgaattttgtttaccagtaaaagtatgcattttaaaagactttcagatttatgctttttacgtgaagctgctaaactaaaagtaaatggaagaaaccaagtctagtaggttttttctttttttttgtgggggtgggatgggggaggttagttacacttaaaatatcttctccagagactgtatgctcctatactagactgtaagctctttgagggcagtctgtcagatttatctttgtatcttccccagcgcctagtgtagtgccttgcacataataggcgcccaataaatattgatgaagaatgaaggcgttgtgtttctaatgtgaccaaaccatggggattctttgtcattaataccgtcctcctttgtaagtgctgttttttttttttcattcttgagctcctaatgacattagatcttatcaggggcagttggacagttcagtaaaggtaaatgctgctcttgctctagttgctgtgacctatgttctttctgacttgctaagagagccaagtgatagtggctagtgataagattgatacataaattgctttactttgaaataacactggaaaaccctaccgtagacctgatcaag

SEQ ID NO: 10718 - protein, 31 aa, Homo sapiens; identical to SEQ ID NO: 10716

SEQ ID NO: 10719 - DNA, 1994 bp, Homo sapiens
cattttatatggaagtgactaattttcaagctgccaacaacttatatcgaggtaatattttattctctgaataaattcatttcacttatattaaaagcataaggaaatctacatgtatgtaaaaataacttagaaattcagtacataatacatgattgaatacatgatcgtatttaacatgttttttttttctgcagtggacaaataaacatcctcaaagtagcaactgcaaatcagttacccttagaaaagcaagaccaaacactgtagttacactattagcagtgaccaaaaagggctaatattttctaagaatagtttaaattacagacatttgttatatttaccttatgtgaaatacatcactatttaattacattaattttaacatctgttgtgtggagttgtatagttcatgcaaaagcctgtgggtatgggtttttcaaaccagcagaaaggtcaaaggtacctgaatgctaaactgcctggctcccagctttttcattaaacttttcagggtcttggtttctttatctgtaaaatgacagagttggaccagttaactttaatggccatccttttacaccacacaagttgataaaatttatctgttcagcaaagagattgaacaaaaaagcacgttagtaatatgaagacaggaaaacgaatgaaagtctaacacataactcatattgatttactttatttctgttagattttacactctgaaaatttcacctcatttagtttgtacaaatactagacatggaaacttaaaatgtgcaggtgtcaaagcttaaaaatcaggtgtgtcctctttaaaggcatgtgcgataagcctgcagtcttaaccagacctggtaccagtttaacagttcatgatacttctgtgatgagtggatctgttagtctggtagagattaatgttgaaatttacttaaagcccagctattaattgataatgaacatttttcactatttttttttctatctgaagcttagagatctagagctttggatctttcgggtatatgtcaatggaggtattattttataatactttgcattgacatgaagtgggttcatgggggaaaaccatgagctgtgaacattggtagcaaacaagcatatattcatttcaaaactttccttgcttttagcagagagaagcctgtatatgttacatgtgtgactttcagtagtttaaagagatgtttcaaaaaattgttgcatgtttttgatgcaatttgggaaattgtttacttcacaatgtagtcattcataaaaaaattcatgaaaatactgaacatatgtttgaggatttttcttttcctttttaaatttttttattttttctgagacggagatctgctcttacgcccaggctagagtgaagtggcgcgatcttggcttactgcaacctccaccccccaggttcaagcgattctcctgcctcagcctccggagtagctgggattacaggcgcccgccaccacgtccggctaatttttgtattttcagtagagacggggttttgctatgttggccaggctggtctcaaactcctgacctcaagtgatccacctgcctcggcctcccaaagtgttaggataacaggtgtgagccaccgtgcccggctgaagatttttcttaattgcaataaatattcagcattttttctaatgaaaatgaattttgtttaccagtaaaagtatgcattttaaaagactttcagatttatgctttttacgtgaagctgctaaactaaaagtaaatggaagaaaccaagtctagtaggttttttctttttttttgtgggggtgggatgggggaggttagttacacttaaaatatcttctccagagactgtatgctcctatactagactgtaagctctttgagggcagtctgtcagatttatctttgtatcttccccagcgcctagtgtagtgccttgcacataataggcgcccaataaatattgatgaagaatg

SEQ ID NO: 10720 - protein, 58 aa, Homo sapiens
MCRCQSLKIRCVLFKGMCDKPAVLTRPGTSLTVHDTSVMSGSVSLVEINVEIYLKPSY

SEQ ID NO: 10721 - DNA, 2290 bp, Homo sapiens
cattttatatggaagtgactaattttcaagctgccaacaacttatatcgaggtaatattttattctctgaataaattcatttcacttatattaaaagcataaggaaatctacatgtatgtaaaaataacttagaaattcagtacataatacatgattgaatacatgatcgtatttaacatgttttttttttctgcagtggacaaataaacatcctcaaagtagcaactgcaaatcagttacccttagaaaagcaagaccaaacactgtagttacactattagcagtgaccaaaaagggctaatattttctaagaatagtttaaattacagacatttgttatatttaccttatgtgaaatacatcactatttaattacattaattttaacatctgttgtgtggagttgtatagttcatgcaaaagcctgtgggtatgggtttttcaaaccagcagaaaggtcaaaggtacctgaatgctaaactgcctggctcccagctttttcattaaacttttcagggtcttggtttctttatctgtaaaatgacagagttggaccagttaactttaatggccatccttttacaccacacaagttgataaaatttatctgttcagcaaagagattgaacaaaaaagcacgttagtaatatgaagacaggaaaacgaatgaaagtctaacacataactcatattgatttactttatttctgttagattttacactctgaaaatttcacctcatttagtttgtacaaatactagacatggaaacttaaaatgtgcaggtgtcaaagcttaaaaatcaggtgtgtcctctttaaaggcatgtgcgataagcctgcagtcttaaccagacctggtaccagtttaacagttcatgatacttctgtgatgagtggatctgttagtctggtagagattaatgttgaaatttacttaaagcccagctattaattgataatgaacatttttcactatttttttttctatctgaagcttagagatctagagctttggatctttcgggtatatgtcaatggaggtattattttataatactttgcattgacatgaagtgggttcatgggggaaaaccatgagctgtgaacattggtagcaaacaagcatatattcatttcaaaactttccttgcttttagcagagagaagcctgtatatgttacatgtgtgactttcagtagtttaaagagatgtttcaaaaaattgttgcatgtttttgatgcaatttgggaaattgtttacttcacaatgtagtcattcataaaaaaattcatgaaaatactgaacatatgtttgaggatttttcttttcctttttaaatttttttattttttctgagacggagatctgctcttacgcccaggctagagtgaagtggcgcgatcttggcttactgcaacctccaccccccaggttcaagcgattctcctgcctcagcctccggagtagctgggattacaggcgcccgccaccacgtccggctaatttttgtattttcagtagagacggggttttgctatgttggccaggctggtctcaaactcctgacctcaagtgatccacctgcctcggcctcccaaagtgttaggataacaggtgtgagccaccgtgcccggctgaagatttttcttaattgcaataaatattcagcattttttctaatgaaaatgaattttgtttaccagtaaaagtatgcattttaaaagactttcagatttatgctttttacgtgaagctgctaaactaaaagtaaatggaagaaaccaagtctagtaggttttttctttttttttgtgggggtgggatgggggaggttagttacacttaaaatatcttctccagagactgtatgctcctatactagactgtaagctctttgagggcagtctgtcagatttatctttgtatcttccccagcgcctagtgtagtgccttgcacataataggcgcccaataaatattgatgaagaatgaaggcgttgtgtttctaatgtgaccaaaccatggggattctttgtcattaataccgtcctcctttgtaagtgctgttttttttttttcattcttgagctcctaatgacattagatcttatcaggggcagttggacagttcagtaaaggtaaatgctgctcttgctctagttgctgtgacctatgttctttctgacttgctaagagagccaagtgatagtggctagtgataagattgatacataaattgctttactttgaaataacactggaaaaccctaccgtagacctgatcaag

SEQ ID NO: 10722 - protein, 58 aa, Homo sapiens; identical to SEQ ID NO: 10720

SEQ ID NO: 10723 - DNA, 2289 bp, Homo sapiens
aattacagacatttgttatatttaccttatgtgaaatacatcactatttaattacattaattttaacatctgttgtgtggagttgtatagttcatgcaaaagcctgtgggtatgggtttttcaaaccagcagaaaggtcaaaggtacctgaatgctaaactgcctggctcccagctttttcattaaacttttcagggtcttggtttctttatctgtaaaatgacagagttggaccagttaactttaatggccatccttttacaccacacaagttgataaaatttatctgttcagcaaagagattgaacaaaaaagcacgttagtaatatgaagacaggaaaacgaatgaaagtctaacacataactcatattgatttactttatttctgttagattttacactctgaaaatttcacctcatttagtttgtacaaatactagacatggaaacttaaaatgtgcaggtgtcaaagcttaaaaatcaggtgtgtcctctttaaaggcatgtgcgataagcctgcagtcttaaccagacctggtaccagtttaacagttcatgatacttctgtgatgagtggatctgttagtctggtagagattaatgttgaaatttacttgaattacagttatttgacaagcccactttttttggagtttggtgaggaagataagtaaaaatgcccaactagtacaatgtggagaaagttttctgtttgcttgactaagggaaattgctcagaaaaagaatgctccaacatgggaataaggaccttcagtctcaggaactcatttttgggtgcagtttctacatttaaaaaattgacttgtgttcagtttgataaccagttcatttgctttagtctcagtgttttaaagaagtctcataatgttctacaaagacacaaagcttcaggcttatacaaaactgagtatgattagaaatacctgagcccagaaatgattctgagaaaagagaataatttgaagacacttatttaaaagtaattatggttagaaatgaattaatttaaaaatgtgttcacatatccctttctctaacagtttaacctagacaaacatctgtatcagtatttttttattcccctgattgattacatttggtttctttattctgaaaggaaaataacaaaaacttcagaaattcctaagggtgtaataagaaagtgggttttgagtttcctttcctggaattattttacagttctttggtgggtctccccagctattaattgataatgaacatttttcactatttttttttctatctgaagcttagagatctagagctttggatctttcgggtatatgtcaatggaggtattattttataatactttgcattgacatgaagtgggttcatgggggaaaaccatgagctgtgaacattggtagcaaacaagcatatattcatttcaaaactttccttgcttttagcagagagaagcctgtatatgttacatgtgtgactttcagtagtttaaagagatgtttcaaaaaattgttgcatgtttttgatgcaatttgggaaattgtttacttcacaatgtagtcattcataaaaaaattcatgaaaatactgaacatatgtttgaggatttttcttttcctttttaaatttttttattttttctgagacggagatctgctcttacgcccaggctagagtgaagtggcgcgatcttggcttactgcaacctccaccccccaggttcaagcgattctcctgcctcagcctccggagtagctgggattacaggcgcccgccaccacgtccggctaatttttgtattttcagtagagacggggttttgctatgttggccaggctggtctcaaactcctgacctcaagtgatccacctgcctcggcctcccaaagtgttaggataacaggtgtgagccaccgtgcccggctgaagatttttcttaattgcaataaatattcagcattttttctaatgaaaatgaattttgtttaccagtaaaagtatgcattttaaaagactttcagatttatgctttttacgtgaagctgctaaactaaaagtaaatggaagaaaccaagtctagtaggttttttctttttttttgtgggggtgggatgggggaggttagttacacttaaaatatcttctccagagactgtatgctcctatactagactgtaagctctttgagggcagtctgtcagatttatctttgtatcttccccagcgcctagtgtagtgccttgcacataataggcgcccaataaatattgatgaagaatg

SEQ ID NO: 10724 - protein, 81 aa, Homo sapiens [sequence omitted]

SEQ ID NO: 10725 - DNA, 2585 bp, Homo sapiens
aattacagacatttgttatatttaccttatgtgaaatacatcactatttaattacattaattttaacatctgttgtgtggagttgtatagttcatgcaaaagcctgtgggtatgggtttttcaaaccagcagaaaggtcaaaggtacctgaatgctaaactgcctggctcccagctttttcattaaacttttcagggtcttggtttctttatctgtaaaatgacagagttggaccagttaactttaatggccatccttttacaccacacaagttgataaaatttatctgttcagcaaagagattgaacaaaaaagcacgttagtaatatgaagacaggaaaacgaatgaaagtctaacacataactcatattgatttactttatttctgttagattttacactctgaaaatttcacctcatttagtttgtacaaatactagacatggaaacttaaaatgtgcaggtgtcaaagcttaaaaatcaggtgtgtcctctttaaaggcatgtgcgataagcctgcagtcttaaccagacctggtaccagtttaacagttcatgatacttctgtgatgagtggatctgttagtctggtagagattaatgttgaaatttacttgaattacagttatttgacaagcccactttttttggagtttggtgaggaagataagtaaaaatgcccaactagtacaatgtggagaaagttttctgtttgcttgactaagggaaattgctcagaaaaagaatgctccaacatgggaataaggaccttcagtctcaggaactcatttttgggtgcagtttctacatttaaaaaattgacttgtgttcagtttgataaccagttcatttgctttagtctcagtgttttaaagaagtctcataatgttctacaaagacacaaagcttcaggcttatacaaaactgagtatgattagaaatacctgagcccagaaatgattctgagaaaagagaataatttgaagacacttatttaaaagtaattatggttagaaatgaattaatttaaaaatgtgttcacatatccctttctctaacagtttaacctagacaaacatctgtatcagtatttttttattcccctgattgattacatttggtttctttattctgaaaggaaaataacaaaaacttcagaaattcctaagggtgtaataagaaagtgggttttgagtttcctttcctggaattattttacagttctttggtgggtctccccagctattaattgataatgaacatttttcactatttttttttctatctgaagcttagagatctagagctttggatctttcgggtatatgtcaatggaggtattattttataatactttgcattgacatgaagtgggttcatgggggaaaaccatgagctgtgaacattggtagcaaacaagcatatattcatttcaaaactttccttgcttttagcagagagaagcctgtatatgttacatgtgtgactttcagtagtttaaagagatgtttcaaaaaattgttgcatgtttttgatgcaatttgggaaattgtttacttcacaatgtagtcattcataaaaaaattcatgaaaatactgaacatatgtttgaggatttttcttttcctttttaaatttttttattttttctgagacggagatctgctcttacgcccaggctagagtgaagtggcgcgatcttggcttactgcaacctccaccccccaggttcaagcgattctcctgcctcagcctccggagtagctgggattacaggcgcccgccaccacgtccggctaatttttgtattttcagtagagacggggttttgctatgttggccaggctggtctcaaactcctgacctcaagtgatccacctgcctcggcctcccaaagtgttaggataacaggtgtgagccaccgtgcccggctgaagatttttcttaattgcaataaatattcagcattttttctaatgaaaatgaattttgtttaccagtaaaagtatgcattttaaaagactttcagatttatgctttttacgtgaagctgctaaactaaaagtaaatggaagaaaccaagtctagtaggttttttctttttttttgtgggggtgggatgggggaggttagttacacttaaaatatcttctccagagactgtatgctcctatactagactgtaagctctttgagggcagtctgtcagatttatctttgtatcttccccagcgcctagtgtagtgccttgcacataataggcgcccaataaatattgatgaagaatgaaggcgttgtgtttctaatgtgaccaaaccatggggattctttgtcattaataccgtcctcctttgtaagtgctgttttttttttttcattcttgagctcctaatgacattagatcttatcaggggcagttggacagttcagtaaaggtaaatgctgctcttgctctagttgctgtgacctatgttctttctgacttgctaagagagccaagtgatagtggctagtgataagattgatacataaattgctttactttgaaataacactggaaaaccctaccgtagacctgatcaag

SEQ ID NO: 10726 - protein, 81 aa, Homo sapiens [sequence omitted]

SEQ ID NO: 10727 - DNA, 911 bp, Homo sapiens
gtttgcctgtctggctgccttgggtctttggtttgctgagggctgcttggaggctatgccctcctctccagcccctgcgttgggaagtcacaggagaccggagctgcgcacgacatcacagcgccgaattctgacccaatctgaatcaaatgtcacccataccctgtcttcaaccaacaaaagagcaacgaagccagagacatcatcttcagctgccttggcctgtgtgccgggggtcccgtcagctgcaggacacgggagggatggagtgaagcagaaaggccccgccgtgaccacactcatcccagaagagcctctctgttggcatgaaaggaaatcacaaggaaagggacttttcaaggtcagactgcaccagtggaaagtcagcaccagcccccagggctcgaggcagcctgtgccctttccactaactgtgccaactctcaccaggggaaggctgaccaggaacaaaggcccttagaggagagcagaactcctgcagcctgcacttccgagagatcctgctccacggagcccggctctactcctgcaggcagaacctgccagcccgcagatgctgggggctgaaggatcccggcgacaccaagcgtcaggtcaggcgtcagaatccagcgcgtttgctcctcgagaacagcgcgccacctgctcccaagtgtgtgaggggctgcagtgccgagctccacttcacaagactcactcctgccccgccacctcctgagcagacgcagtcaagcccgacctacctttcaacaaacatgtattagcactccctccatgccaggcactgtgccaggtgcgagggtaccatgaccaagccaaggccccaggctcagagcactcacacgccagtggagggggcagccctgtgcgacccagcagggcacacccca

SEQ ID NO: 10728 - protein, 141 aa, Homo sapiens
MPSSPAPALGSHRRPELRTTSQRRILTQSESNVTHTLSSTNKRATKPETSSSAALACVPGVPSAAGHGRDGVKQKGPAVTTLIPEEPLCWHERKSQGKGLFKVRLHQWKVSTSPQGSRQPVPFPLTVPTLTRGRLTRNKGP

SEQ ID NO: 10729 - DNA, 990 bp, Homo sapiens
atgtcagacaagctcaaggaacgcaaagtgagtcggctgagcccaaatggcacttgcgccctggtggtggaggcatctgactcaccgacccgccacttgggtggaccgatggcagggaagtgcccgcacgggactttgagtgtggaggaatctcgagtggtttgggaagggggtgggagaacccccgtttctcataaagtgatagaaaagcggaggagggacaggatcaaccgctgcttgaacgagctgggcaagacagtgcccatggccttggcgaagcaggaggctctggcgcagatccgcagccgcgtccgctcgctggtcctctccagcgccacagtgcccgaccagcaggcgctgggccgctgcgaggggcccttcctccttttgcagagttccgggaagctggagaaggcggagatcctcgagatgaccgttcagtacctgagagcactgcactccgctgattttccccggggaagggaaaaagcagaacttctagcggagtttgccaactacttccactatggctaccacgagtgcatgaagaacctggtgcattacctcaccacggtggagcggatggagaccaaggacacgaagtacgcgcgcatcctcgccttcttgcagtccaaggcccgcctgggcgcggagcccgcctttccgccgctgggttcgctcccggagccggatttctcctatcagctgcaccctgcggggcccgaattcgctggtcacagcccgggcgaggccgctgtgttcccgcagggctctggtgccgggcctttcccctggccgcctggcgcggcccgcagccccgcgctgccctacctgcccagcgcgccagtgccgctcgctagcccagcgcagcagcacagccccttcctgacaccggtgcagggcctggaccggcattacctcaacctgatcggccacgcgcaccccaacgcccttaacctgcacacgccccagcaccccccggtgctctga

SEQ ID NO: 10730 - protein, 329 aa, Homo sapiens
MSDKLKERKVSRLSPNGTCALVVEASDSPTRHLGGPMAGKCPHGTLSVEESRVVWEGGGRTPVSHKVIEKRRRDRINRCLNELGKTVPMALAKQEALAQIRSRVRSLVLSSATVPDQQALGRCEGPFLLLQSSGKLEKAEILEMTVQYLRALHSADFPRGREKAELLAEFANYFHYGYHECMKNLVHYLTTVERMETKDTKYARILAFLQSKARLGAEPAFPPLGSLPEPDFSYQLHPAGPEFAGHSPGEAAVFPQGSGAGPFPWPPGAARSPALPYLPSAPVPLASPAQQHSPFLTPVQGLDRHYLNLIGHAHPNALNLHTPQHPPVL

SEQ ID NO: 10731 - DNA, 2205 bp, Homo sapiens
agcataactgtgggagaatagtaagcattggacacaaaatggtttaggcaaataatgatgaacaaaaatggtcagtctgtgttcctgctgacccagcacagtggggacgctgtgtaggacatgacctttgggggaaaggacacaagaactcagcgtgggggatccagaaaagaagtcgcacgtattgaagccagtaacgccaagccagtgaattctccttgacgagaaagacccacttactctgcagaagagatatatgacagctgacaatccctggaggagaatctttctactaaattggtaagggatgctaagcaaatgatgtggactcaggaaacaacgcatttcatgatatacggttgcctctcaaggtgaattcgagacccctcttgaattacaaagagttgaaaacattcaagtacggaataaactattactgcgaatacgctcatatgacacaagaacaatctctgagcttctttgaggatgtccagatgactgctgactgcactaattgcatcaatcgtgtatccatacaggttctttctataaaatagtggtcgctagttatgaggcgttaagccttcatggatataaacagactattccacctaagtgatctggcagaagcttagttttctaccacaacatccaccgtcctccctccctcccttcctagctggtcagaaaagctactcagaataaagactacatttcccagccatctttgcagctaggtttatccacctgactaaattccaccggcatctattcaacgaagacgaatcctggaatggggatggaaatgatggctcatgtcttagcaaactaccagtacgtctactagaaccggaactgatccgagaggacagggaagtcagtgtgggcggctctaaggagcctccctctctacagctgcggctcagaggattacggcgcttcatccacaaggcaacattgcacaagtagcttttgaacaaaagtcatggatactattaatgatatggtaatccttaatcgagctacctcccagtagtgattatactgacatgggaagaatatctaagtcgtggaggcagcccacaacaacactgtgtcattgttcaccccgggctcgaccaggactaacttttaccagcatctctaacgtcacctttcccctgatgcctccccacaacccctggccccagctcccattcccgccccatcatagcaaaaaagtagcaaagaaaaccctgatcctaaatctttttctggatttttttttgcaagttcccacacacatttagtgtcgtctcaaaattcacgctgtcaactgtctctaggaatcatttccatctgagaacagaccacacaaagacacagtgaaactcagtttctgcagaatttgatttcatttgagttactggggaacaaagcaattagacaatgaataatagctcaagacaggctgaagctgaagatttctgcaaaagaatgaagaggaaacgttttgatcctgagcagatgttctccctagattgcttcacctgaggttgattgacttttggaaacgagatttgttcccagtgctttgtgagtctcttgttggaaggactgtctttaaattaaagcaattagagttactttataagatttacccaaatataagagctgaagagaataattcaaattgatcagaagaaaatactcaattactgacaaatgtcaattacatcaatagcctaggctgctcttgaactcctgggctcaaacgatcctcccctgtcggcctcccaaagtgctgggattacaagcttgaaccaccatgcccagcctcagaaattttttaaatgacagctcatacagttttcttttataaaggaggagaaaatgtgtaattgtaagcagctgaactaaaatatctctgtgacattttgctggtgactccagccctgtgagatctgagtggctcaggaatcaaattctcccacaaacctgaggaagccttttattcttaatgccaacaggatgccccatgcccagaatgtcaaatctgaacaccaatggaatgcattttataaacaaattgaaaaaggacaatctttaacagaattgttgttctctaggcagattagttgtgcttcaaatacaaaatgaaatattagagaacaaaattatttttaaacagctaatactagtagaaaataaaaggctgaaaagtgc

SEQ ID NO: 10732 - protein, 79 aa, Homo sapiens
MGRISKSWRQPTTTLCHCSPRARPGLTFTSISNVTFPLMPPHNPWPQLPFPPHHSKKVAKKTLILNLFLDFFLQVPTHI

SEQ ID NO: 10733 - DNA, 8192 bp, Homo sapiens
ctgggcggccgggcgcggggagagggcgcgggagcggctcgtgcggcaggtaccatgcggacgcgcgagcccggcgagggccccggcaggcccggtccctgctcgggggcgcgctgagacggcgggtgagctccacgagagcgccgtcgccacttcgggccaactttgcgattcccgacagttaagcaatggggagacatttggctttgctcctgcttctgctccttctcttccaacattttggagacagtgatggcagccaacgacttgaacagactcctctgcagtttacacacctcgagtacaacgtcaccgtgcaggagaactctgcagctaagacttatgtggggcatcctgtcaagatgggtgtttacattacacatccagcgtgggaagtaaggtacaaaattgtttccggagacagtgaaaacctgttcaaagctgaagagtacattctcggagacttttgctttctaagaataaggaccaaaggaggaaatacagctattcttaatagagaagtgaaggatcactacacattgatagtgaaagcacttgaaaaaaatactaatgtggaggcgcgaacaaaggtcagggtgcaggtgctggatacaaatgacttgagaccgttattctcacccacctcatacagcgtttctttacctgaaaacacagctataaggaccagtatcgcaagagtcagcgccacggatgcagacataggaaccaacggggaattttactacagttttaaagatcgaacagatatgtttgctattcacccaaccagtggtgtgatagtgttaactggtagacttgattacctagagaccaagctctatgagatggaaatcctcgctgcggaccgtggcatgaagttgtatgggagcagtggcatcagcagcatggccaagctaacggtgcacatcgaacaggccaatgaatgtgctccggtgataacagcagtgacattgtcaccatcagaactggacagggacccagcatatgcaattgtgacagtggatgactgcgatcagggtgccaatggtgacatagcatctttaagcatcgtggcaggtgaccttctccagcagtttagaacagtgaggtcctttccagggagtaaggagtataaagtcaaagccatcggtggcattgattgggacagtcatcctttcggctacaatctcacactacaggctaaagataaaggaactccgccccagttctcttctgttaaagtcattcacgtgacttctccacagttcaaagccgggccagtcaagtttgaaaaggatgtttacagagcagaaataagtgaatttgctcctcccaacacacctgtggtcatggtaaaggccattcctgcttattcccatttgaggtatgtttttaaaagtacacctggaaaagctaaattcagtttaaattacaacactggtctcatttctattttagaaccagttaaaagacagcaggcagcccattttgaacttgaagtaacaacaagtgacagaaaagcgtccaccaaggtcttggtgaaagtcttaggtgcaaatagcaatccccctgaatttacccagacagcgtacaaagctgcttttgatgagaacgtgcccattggtactactgtcatgagcctgagtgccgtagaccctgatgagggtgagaacgggtacgtgacatacagtatcgcaaatttaaatcatgtgccgtttgcgattgaccatttcactggtgccgtgagtacgtcagaaaacctggactacgaactgatgcctcgggtttatactctgaggattcgtgcatcagactggggcttgccgtaccgccgggaagtcgaagtccttgctacaattactctcaataacttgaatgacaacacacctttgtttgagaaaataaattgtgaagggacaattcccagagatctaggcgtgggagagcaaataaccactgtttctgctattgatgcagatgaacttcagttggtacagtatcagattgaagctggaaatgaactggatttctttagtttaaaccccaactcgggggtattgtcattaaagcgatcgctaatggatggcttaggtgcaaaggtgtctttccacagtctgagaatcacagctacagatggagaaaattttgccacaccattatatatcaacataacagtggctgccagtcacaagctggtaaacttgcagtgtgaagagactggtgttgccaaaatgctggcagagaagctcctgcaggcaaataaattacacaaccagggagaggtggaggatattttcttcgattctcactctgtcaatgctcacataccgcagtttagaagcactcttccgactggtattcaggtaaaggaaaaccagcctgtgggttccagtgtaattttcatgaactccactgaccttgacactggcttcaatggaaaactggtctatgctgtttctggaggaaatgaggatagttgcttcatgattgatatggaaacaggaatgctgaaaattttatctcctcttgaccgtgaaacaacagacaaatacaccctgaatattaccgtctatgaccttgggataccccagaaggctgcgtggcgtcttctacatgtcgtggttgtcgatgccaatgataatccacccgagtttttacaggagagctattttgtggaagtgagtgaagacaaggaggtacatagtgaaatcatccaggttgaagccacagataaagacctggggcccaacggacacgtgacgtactcaattgttacagacacagacacattttcaattgacagcgtgacgggtgttgttaacatcgcacgccctctggatcgagagctgcagcatgagcactccttaaagattgaggccagggaccaagccagagaagagcctcagctgttctccactgtcgttgtgaaagtatcactagaagatgttaatgacaacccacctacatttattccacctaattatcgtgtgaaagtccgagaggatcttccagaaggaaccgtcatcatgtggttagaagcccacgatcctgatttaggtcagtctggtcaggtgagatacagccttctggaccacggagaaggaaacttcgatgtggataaactcagtggagcagttaggatcgtccagcagttggactttgagaagaagcaagtgtataatctcactgtgagggccaaagacaagggaaagccagtttctctgtcttctacttgctatgttgaagttgaggtggttgatgtgaatgagaacctgcacccacccgtgttttccagctttgtggaaaaggggacagtgaaagaagatgcacctgttggttcattggtaatgacggtgtcggctcatgatgaggacgccagaagagatggggagatccgatactccattagagatggctctggcgttggtgttttcaaaataggtgaagagacaggtgtcatagagacgtcagatcgactggaccgtgaatcgacctcccattattggctaacagtctttgcaaccgatcagggtgtcgtgcctctttcatcgttcatagagatctacatagaggttgaggatgtcaatgacaatgcaccacagacatcagagcctgtttattacccagaaatcatggaaaattctcctaaagatgtatctgtggtccagatcgaggcatttgatccagattcgagctctaatgacaagctcatgtacaaaattacaagtggaaatccacaaggattcttttcaatacatcctaaaacaggtctcatcacaactacgtcaaggaagctagaccgagaacagcaagatgaacacatattagaggttactgtgacagacaatggtagtccccccaaatcaaccattgcaagagtcattgtgaaaatccttgatgaaaatgacaacaaacctcagtttctgcaaaagttctacaaaatcagactccctgagcgggaaaagccagaccgagaaagaaatgccagacgggagccgctctatcacgtcatagccaccgacaaggatgagggccccaatgcagaaatctcctacagcatcgaagacgggaatgagcatggcaaatttttcatcgaaccgaaaactggagtggtttcgtccaagaggttttcagcagctggagaatatgatattctttcaattaaggcagttgacaatggtcgccctcaaaagtcatcaaccaccagactccatattgaatggatctccaagcccaaaccgtccctggagcccatttcatttgaagaatcattttttacctttactgtgatggaaagtgaccccgttgctcacatgattggagtaatatctgtggagcctcctggcatacccctttggtttgacatcactggtggcaactacgacagtcacttcgatgtggacaagggaactggaaccatcattgttgccaaacctcttgatgcagaacagaagtcaaactacaacctcacagtcgaggctacagatggaaccaccactatcctcactcaggtattcatcaaagtaatagacacaaatgaccatcgtcctcagttttctacatcaaagtatgaagttgttattcctgaagatacagcgccagaaacagaaattttgcaaatcagtgctgtggatcaggatgagaaaaacaaactaatctacactctgcagagcagtagagatccactgagtctcaagaaatttcgtcttgatcctgcaaccggctctctctatacttctgagaaactggatcatgaagctgttcaccagcacaccctcacggtcatggtacgagatcaagatgtgcctgtaaaacgcaactttgcaaggattgtggtcaatgtcagcgacacgaatgaccacgccccgtggttcaccgcttcctcctacaaagggcgggtttatgaatcggcagccgttggctcagttgtgttgcaggtgacggctctggacaaggacaaagggaaaaatgctgaagtgctgtactcgatcgagtcaggtacttttggagaaatattggaaattcttttatgattgatcctgtcttgggctctattaaaactgccaaagaattagatcgaagtaaccaagcggagtatgatttaatggtaaaagctacagataagggcagtccaccaatgagtgaaataacttctgtgcgtatctttgtcacaattgctgacaacgcctctccgaagtttacatcaaaagaatattctgttgaacttagtgaaactgtcagcattgggagtttcgttgggatggttacagcccatagtcaatcatcagtggtgtatgaaataaaagatggaaatacaggtgatgcttttgatattaatccacattctggaactatcatcactcagaaagccctggactttgaaactttgcccatttacacattgataatacaaggaactaacatggctggtttgtccactaatacaacggttctagttcacttgcaggatgagaatgacaacgcgccagtttttatgcaggcagaatatacaggactcattagtgaatcagcctcaattaacagcgtggtcctaacagacaggaatgtcccactggtgattcgagcagctgatgctgataaagactcaaatgctttgcttgtatatcacattgttgaaccatctgtacacacatattttgctattgattctagcactggtgctattcatacagtactaagtctggactatgaagaaacaagtatttttcactttaccgtccaagtgcatgacatgggaaccccacgtttatttgctgagtatgcagcgaatgtaacagtacatgtaattgacattaatgactgcccccctgtgtttgccaagccattatatgaagcatctcttttgttaccaacatacaaaggagtaaaagtcatcacagtaaatgctacagatgctgattcaagtgcattctcacagttgatttactccatcaccgaaggcaacatcggggagaagttttctatggactacaagactggtgctctcactgtccaaaacacaactcagttaagaagccgctacgagctaaccgttagagcttccgatggcagatttgccggccttacctctgtcaaaattaatgtgaaagaaagcaaagaaagtcacctaaagtttacccaggatgtctactctgcggtagtgaaagagaattccaccgaggccgaaacattagctgtcattactgctattgggaatccaatcaatgagcctttgttttatcacatcctcaacccagatcgcagatttaaaataagccgcacttcaggagttctgtcaaccactggcacgcccttcgatcgtgagcagcaggaggcgtttgatgtggttgtagaagtgacagaggaacataagccttctgcagtggcccacgttgtcgtgaaggtcattgtagaagaccaaaatgataatgcgccggtgtttgtcaaccttccctactacgccgttgttaaagtggacactgaggtgggccatgtcattcgctatgtcactgctgtagacagagacagtggcagaaacggggaagtgcattactacctcaaggaacatcatgaacactttcaaattggacccttgggtgaaatttcactgaaaaagcaatttgagcttgacaccttaaataaagaatatcttgttacagtggttgcaaaagatggagggaacccggccttttcagcggaagttatcgttccgatcactgtcatgaataaagccatgcctgtgtttgaaaaacctttctacagtgcagagattgcagagagcatccaggtgcacagccctgtggtccacgtgcaggctaacagcccggaaggcctgaaagtgttctacagcatcacagacggagaccctttcagccagttcactattaacttcaatactggagttatcaatgtcatagctcctctggactttgaggcccacccggcatataagctgagcatacgcgcaactgactccttgacgggcgctcatgctgaagtatttgtggacatcatagtagacgacatcaatgataaccctcctgtgtttgctcagcagtcttatgcggtgaccctgtctgaggcatctgtaattggaacgtctgttgttcaagttagagccaccgattctgattcagaaccaaatagaggaatctcataccagatgtttgggaatcacagcaagagtcatgatcattttcatgtagacagcagcactggcctcatctcactactcagaaccctggattacgagcagtcccggcagcacacgatttttgtgagggcagttgatggtggtatgcccacgctgagcagtgatgtgattgtcacggtggacgttaccgacctcaatgataatccaccactctttgaacaacagatttatgaagccagaattagcgagcacgcccctcatgggcatttcgtgacctgtgtaaaagcctatgatgcagacagttcagacatagacaagttgcagtattccattctgtctggcaatgatcataaacattttgtcattgacagtgcaacagggattatcaccctctcaaacctgcaccggcacgccctgaagccattttacagtcttaacctgtcagtgtctgatggagtttttagaagttccacccaggttcatgtaactgtaattggaggcaatttgcacagtcctgctttccttcagaacgaatatgaagtggaactagctgaaaacgctcccctacataccctggtgatggaggtgaaaactacggatggggattctggtatttatggtcacgttacttaccatattgtaaatgactttgccaaagacagattttacataaatgagagaggacagatatttactttggaaaaacttgatcgagaaaccccggcggagaaagtgatctcagtccgtttaatggctaaggatgctggaggaaaagttgctttctgcaccgtgaatgtcatccttacagatgacaatgacaatgcaccacaatttcgagcaaccaaatacgaagtgaatatcgggtccagtgctgctaaagggacttcagtcgttaaagttcttgcaagtgatgccgatgagggctccaatgccgacatcacctatgccattgaagcagactctgaaagtgtaaaagagaatttggaaattaacaaactgtccggcgtaatcactacaaaggagagcctcattggcttgg

SEQ ID NO: 10734 - protein, 2978 aa, Homo sapiens
MIDPVLGSIKTAKELDRSNQAEYDLMVKATDKGSPPMSEITSVRIFVTIADNASPKFTSKEYSVELSETVSIGSFVGMVTAHSQSSVVYEIKDGNTGDAFDINPHSGTIITQKALDFETLPIYTLIIQGTNMAGLSTNTTVLVHLQDENDNAPVFMQAEYTGLISESASINSVVLTDRNVPLVIRAADADKDSNALLVYHIVEPSVHTYFAIDSSTGAIHTVLSLDYEETSIFHFTVQVHDMGTPRLFAEYAANVTVHVIDINDCPPVFAKPLYEASLLLPTYKGVKVITVNATDADSSAFSQLIYSITEGNIGEKFSMDYKTGALTVQNTTQLRSRYELTVRASDGRFAGLTSVKINVKESKESHLKFTQDVYSAVVKENSTEAETLAVITAIGNPINEPLFYHILNPDRRFKISRTSGVLSTTGTPFDREQQEAFDVVVEVTEEHKPSAVAHVVVKVIVEDQNDNAPVFVNLPYYAVVKVDTEVGHVIRYVTAVDRDSGRNGEVHYYLKEHHEHFQIGPLGEISLKKQFELDTLNKEYLVTVVAKDGGNPAFSAEVIVPITVMNKAMPVFEKPFYSAEIAESIQVHSPVVHVQANSPEGLKVFYSITDGDPFSQFTINFNTGVINVIAPLDFEAHPAYKLSIRATDSLTGAHAEVFVDIIVDDINDNPPVFAQQSYAVTLSEASVIGTSVVQVRATDSDSEPNRGISYQMFGNHSKSHDHFHVDSSTGLISLLRTLDYEQSRQHTIFVRAVDGGMPTLSSDVIVTVDVTDLNDNPPLFEQQIYEARISEHAPHGHFVTCVKAYDADSSDIDKLQYSILSGNDHKHFVIDSATGIITLSNLHRHALKPFYSLNLSVSDGVFRSSTQVHVTVIGGNLHSPAFLQNEYEVELAENAPLHTLVMEVKTTDGDSGIYGHVTYHIVNDFAKDRFYINERGQIFTLEKLDRETPAEKVISVRLMAKDAGGKVAFCTVNVILTDDNDNAPQFRATKYEVNIGSSAAKGTSVVKVLASDADEGSNADITYAIEADSESVKENLEINKLSGVITTKESLIGLENEFFTFFVRAVDNGSPSKESVVLVYVKILPPEMQLPKFSEPFYTFTVSEDVPIGTEIDLIRAEHSGTVLYSLVKGNTPESNRDESFVIDRQSGRLKLEKSLDHETTKWYQFSILARCTQDDHEMVASVDVSIQVKDANDNSPVFESSPYEAFIVENLPGGSRVIQIRASDADSGTNGQVMYSLDQSQSVEVIESFAINMETGWITTLKELDHEKRDNYQIKVVASDHGEKIQLSSTAIVDVTVTDVNDSPPRFTAEIYKGTVSEDDPQGGVIAILSTTDADSEEINRQVTYFITGGDPLGQFAVETIQNEWKVYVKKPLDREKRDNYLLTITATDGTFSSKAIVEVKVLDANDNSPVCEKTLYSDTIPEDVLPGKLIMQISATDADIRSNAEITYTLLGSGAEKFKLNPDTGELKTSTPLDREEQAVYHLLVRATDGGGRFCQASIVLTLEDVNDNAPEFSADPYAITVFENTEPGTLLTRVQATDADAGLNRKILYSLIDSADGQFSINELSGIIQLEKPLDRELQAVYTLSLKAVDQGLPRRLTATGTVIVSVLDINDNPPVFEYREYGATVSEDILVGTEVLQVYAASRDIEANAEITYSIISGNEHGKFSIDSKTGAVFIIENLDYESSHEYYLTVEATDGGTPSLSDVATVNVNVTDINDNTPVFSQDTYTTVISEDAVLEQSVITVMADDADGPSNSHIHYSIIDGNQGSSFTIDPVRGEVKVTKLLDRETISGYTLTVQASDNGSPPRVNTTTVNIDVSDVNDNAPVFSRGNYSVIIQENKPVGFSVLQLVVTDEDSSHNGPPFFFTIVTGNDEKAFEVNPQGVLLTSSAIKRKEKDHYLLQVKVADNGKPQLSSLTYIDIRVIEESIYPPAILPLEIFITSSGEEYSGGVIGKIHATDQDVYDTLTYSLDPQMDNLFSVSSTGGKLIAHKKLDIGQYLLNVSVTDGKFTTVADITVHIRQVTQEMLNHTIAIRFANLTPEEFVGDYWRNFQRALRNILGVRRNDIQIVSLQSSEPHPHLDVLLFVEKPGSAQISTKQLLHKINSSVTDIEEIIGVRILNVFQKLCAGLDCPWKFCDEKVSVDESVMSTHSTARLSFVTPRHHRAAVCLCKEGRCPPVHHGCEDDPCPEGSECVSDPWEEKHTCVCPSGRFGQCPGSSSMTLTGNSYVKYRLTENENKLEMKLTMRLRTYSTHAVVMYARGTDYSILEIHHGRLQYKFDCGSGPGIVSVQSIQVNDGQWHAVALEVNGNYARLVLDQVHTASGTAPGTLKTLNLDNYVFFGGHIRQQGTRHGRSPQVGNGFRGCMDSIYLNGQELPLNSKPRSYAHIEESVDVSPGCFLTATEDCASNPCQNGGVCNPSPAGGYYCKCSALYIGTHCEISVNPCSSKPCLYGGTCVVDNGGFVCQCRGLYTGQRCQLSPYCKDEPCKNGGTCFDSLDGAVCQCDSGFRGERCQSDIDECSGNPCLHGALCENTHGSYHCNCSHEYRGRHCEDAAPNQYVSTPWNIGLAEGIGIVVFVAGIFLLVVVFVLCRKMISRKKKHQAEPKDKHLGPATAFLQRPYFDSKLNKNIYSDIPPQVPVRPISYTPSIPSDSRNNLDRNSFEGSAIPEHPEFSTFNPESVHGHRKAVAVCSVAPNLPPPPPSNSPSDSDSIQKPSWDFDYDTKVVDLDPCLSKKPLEEKPSQPYSARESLSEVQSLSSFQSESCDDNGYHWDTSDWMPSVPLPDIQEFPNYEVIDEQTPLYSADPNAIDTDYYPGGYDIESDFPPPPEDFPAADELPPLPPEFSNQFESIHPPRDMPAAGSLGSSSRNRQRFNLNQYLPNFYPLDMSEPQTKGTGENSTCREPHAPYPPGYQRHFEAPAVESMPMSVYASTASCSDVSACCEVESEVMMSDYESGDDGHFEEVTIPPLDSQQHTEV

SEQ ID NO: 10735 - DNA, 1235 bp, Homo sapiens
ccgaaggaggagggcgggcgtttcacccgcgccacagctgcggccggccagagagaccgcagaggccgggacccccgcagcctccacggccgctgctgccactgtcggggtggcgcgcccagccggagaatcccgtccgcgcccggggcggggggcgaggcggggcgctgacgtcacctcccctcccccaccgcctccaagggggagggagtggggaaagaggcagcgagtcgccgcagccggcggccgcaactcctcaactcggcggctggctgcctgggcacgtcctgacaaacttggctgctcccgggccctcgttccggccccgcgcactctcttttcgcctgcgtttggtgcttaagtttgccctggtcggaagcctccggagatgcggccgcctgggtcccggcggcacggacgttggcactctggttagggacatgctgaagatcccggggaggcaaagttggtacttcaaacccggctcttaacacatatctacaccgcgaggggatcacggagctgccgaggactttagagcccagggccgaggactcggctagactgattcccgacagttaagcaatggggagacatttggctttgctcctgcttctgctccttctcttccaacattttggagacagtgatggcagccaacgacttgaacagactcctctgcagtttacacacctcgagtacaacgtcaccgtgcaggagaactctgcagctaagacttatgtggggcatcctgtcaagatgggtgtttacattacacatccagcgtgggaagtaaggtacaaaattgtttccggagacagtgaaaacctgttcaaagctgaagagtacattctcggagacttttgctttctaagaataaggaccaaaggaggaaatacagctattcttaatagagaagtgaaggatcactacacattgatagtgaaagcacttgaaaaaaatactaatgtggaggcgcgaacaaaggtcagggtgcaggtgctggatacaaatgacttgagaccgttattctcacccacctcatacagcgtttctttacctgaaaacacagctataaggaccagtatcgcaagagtcagcgccacggatgcagacataggaaccaacggggaattttactacagttttaaagatcgaacagatatgtttgctattcacccaaccagtggtgtgatagtgttaactggtagacttgattacctagagaccaagct

SEQ ID NO: 10736 - protein, 215 aa, Homo sapiens
MGRHLALLLLLLLLFQHFGDSDGSQRLEQTPLQFTHLEYNVTVQENSAAKTYVGHPVKMGVYITHPAWEVRYKIVSGDSENLFKAEEYILGDFCFLRIRTKGGNTAILNREVKDHYTLIVKALEKNTNVEARTKVRVQVLDTNDLRPLFSPTSYSVSLPENTAIRTSIARVSATDADIGTNGEFYYSFKDRTDMFAIHPTSGVIVLTGRLDYLET

SEQ ID NO: 10737 - DNA, 327 bp, Homo sapiens
agcgtcaggaggcgccagttaaactcaaatgtttcagctcaacaaggcctgtgaggtggttcctatttctccagttttacgttctccggtatgtctttatcagcagcatgaaaacaagactaatacacccccacaccatggtaccgaagacgggacacagctgctctactgattaaattcaactgacgtgaggttgcagctattctattcatatattcaccatcccattcttgatgatgttcctcaagcttacttaacttgcacgtggatgcagaagaaaggtttcttttgaaagactgttgtaaataaaagagtctgtagtgctta

SEQ ID NO: 10738 - protein, 47 aa, Homo sapiens
MFQLNKACEVVPISPVLRSPVCLYQQHENKTNTPPHHGTEDGTQLLY

SEQ ID NO: 10739 - DNA, 3072 bp, Homo sapiens
agcaataatccaagtgctcagcgggggcgctgcccggtggctctggccccgccgggccgttggcccagcccgccggcccctgagctccggtagcccgccgctggagaagctgttcgcccggggcgggcccttgcggaccttcctcgagcgccaggcggggtctgaagcccatttgaaggtcaggaggcccgagttgctggcggtgatcaaactgctgaacgagaaggagcaggagctgcgggagactgagcacttgctgcacgatgagaatgaaggtttaaggaaacttgcagagaatgaaatcactttgtgtcaaaaagaaataactcagctgaagcatcagattatcttacttttggttccctcagaagaaacagatgaaaatgatttgatcctggaagtaactgcaggagttggaggtcaggaggcaatgttgtttacatcagagatatttgatatgtatcagcaatatgctgcatttaaaagatggcattttgaaaccctggaatattttccaagtgaagtaggtggccttagacatgcatctgccagcattgggggttcagaagcctataggcacatgaaatttgaaggaggtgttcacagagtacaaagagtgccaaagacagaaaagcaaggctgcgtccatactagcaccatgactgtagcaatattaccccagcctactgagattaatctggtgattaatccgaaagatttgagaattgacactaagcgagccagtggagctggggagcagcatgtaaataccacggacagtgctgtccggatagttcatcttccaacaggtgttgtttctgaatgtcaacaagagagatctcagctgaaaaataaagagctggctatgacaaagttacgtgcaaaactgtacagcatgcatgtagaagaagaaataaataaaagacagaatgctagaaaaattcagattggaagtaaaggaagatcagagaaaataagaacatataattttccacagaaccgggtcacagatcacagaataaacaagacgctgcatgatcttgaaacttttatgcaaggagattatctactggatgaacttgtacagtcattgaaggaatacgccaattatgaatctttagtagaaattatttcccaaaaagtttaagttgatttgttatttatagactttcgtagcttagaaaaattctacagtacatccacatagggtgaaagtacccttactctcttgaaaaacgtgagttaacacagttggaggtaatatgcatattctgaagtcatagataatttacacagatctctctcaatgcattagcaaaaatcatacaatatacagatggtcctcgatttacattgtggttaattcccaataaacccgtcataagttaaaaatgcatataacgttagcaacacagcagtctcctaattaatgacagcttgacttaacaattttccaactttaccatggtgtgaaagaggtatgattcctaagccctaaggagctcctcagcttgaaatggggctgcatccctataaacccatcataaagtcaaaaaatcctaaaacataagttggtgaccatctgtaatcatgatgtggtggtaaatcttggacgctaccttacaataactagacaaaggaaaatcatcctttgtcctgttctgtgtaaatatttaatgaatgatcaaaacttcagtttaaatattatgaaaaactttaaacataaagtagtagaaataagacagtaaatactgtatcctaatatccagtcaggatacagaaaccataccattaacttgaacagggataattttaatataaaaaactgttaactgataatggtattaacttttaagagggatgaaagagagctatgatgtcctaggactgagagtaccccaggaaagaatacccttgaaagggtctccccttccccatggtgaagtcaggcctaatggagagagtggctacagcctactcagtgattgggaaattccctgtcttgccctgggccagagctggtgtaccgctggtggatcaggtcttacaagcaaagaacctcacactctcaactggtaagccagaagcctcttgctagggtgtgagcaaaacttggacaggaactctcagtagatgtttgtgtttgtcaagattctccagacaaacttccttaaaaggattggcttgtgttgttattattaagtctaacaagtccaaaagctggagtgtgaggcaggaggctggaaacccaggaaagctgatggtgcaaggtccagtccaaaggtatctgttggaggattctcttgttctgggaagaggacggtctttttttctcttcagaccttcacctgactggatcaagcccactaacatcgaggaggacagtctgcattactcagagttcactgattgatttaaatgtcaatctcatataaaacaccctcacagaaacacctagaataatgtttgaccttataattggaaaatcagagcaaaagttaaatctctaaaaaaaaaaaaaaaaaaagtatgacccagtagctaggcacctgtggccccgccaagttgacacataaaattaactgtcacagtatcatcttagaagtgaaagaagcccctttatcctgcagtgcccctctaccaccacctactgacaaagaacatggtgctatctggcatgggagaaatgttcagtttgctatggcttgtatgtgtcccctcaaattcaagtgttgccaatgtgacagcatcaagaggtggggtctttaagagatcactaggccatgaaggattctcttaggactgggatgaaggcccataataaaagaggtttcagggagcatcctgctagcttgccttctgtatgtgagaacacagcaagaaagccctagtcaacaagtgccagctccttgatcttagacttcccatcctccagaactgtgagaaatacatttctgttccttacaaattacccagtctcctgtattctgttatagcagcacaaaatgaagataccatacctgaacacctgaacattcttcacaaggtagtaaatgcactgctttattctgg

SEQ ID NO: 10740 - protein, 238 aa, Homo sapiens
MLFTSEIFDMYQQYAAFKRWHFETLEYFPSEVGGLRHASASIGGSEAYRHMKFEGGVHRVQRVPKTEKQGCVHTSTMTVAILPQPTEINLVINPKDLRIDTKRASGAGEQHVNTTDSAVRIVHLPTGVVSECQQERSQLKNKELAMTKLRAKLYSMHVEEEINKRQNARKIQIGSKGRSEKIRTYNFPQNRVTDHRINKTLHDLETFMQGDYLLDELVQSLKEYANYESLVEIISQKV

SEQ ID NO: 10741 - DNA, 3374 bp, Homo sapiens
ggggcgctgcccggtggctctggccccgccgggccgttggcccagcccgccggcccctgagctccggtagcccgccgctggagaagctgttcgcccggggcgggcccttgcggaccttcctcgagcgccaggcggggtctgaagcccatttgaaggtcaggaggcccgagttgctggcggtgatcaaactgctgaacgagaaggagcaggagctgcgggagactgagcacttgctgcacgatgagaatgaaggtttaaggaaacttgcagagaatgaaatcactttgtgtcaaaaagaaataactcagctgaagcatcagattatcttacttttggttccctcagaagaaacagatgaaaatgatttgatcctggaagtaactgcaggagttggaggtggccttagacatgcatctgccagcattgggggttcagaagcctataggcacatgaaatttgaaggaggtgttcacagagtacaaagagtgccaaagacagaaaagcaaggctgcgtccatactagcaccatgactgtagcaatattaccccagcctactgagattaatctggtgattaatccgaaagatttgagaattgacactaagcgagccagtggagctggggagcagcatgtaaataccacggacagtgctgtccggatagttcatcttccaacagattggaagtaaaggaagatcagagaaaataagaacatataattttccacagaaccgggtcacagatcacagaataaacaagacgctgcatgatcttgaaacttttatgcaaggagattatctactggatgaacttgtacagtcattgaaggaatacgccaattatgaatctttagtagaaattatttcccaaaaagtttaagttgatttgttatttatagactttcgtagcttagaaaaattctacagtacatccacatagggtgaaagtacccttactctcttgaaaaacgtgagttaacacagttggaggtaatatgcatattctgaagtcatagataatttacacagatctctctcaatgcattagcaaaaatcatacaatatacagatggtcctcgatttacattgtggttaattcccaataaacccgtcataagttaaaaatgcatataacgttagcaacacagcagtctcctaattaatgacagcttgacttaacaattttccaactttaccatggtgtgaaagaggtatgattcctaagccctaaggagctcctcagcttgaaatggggctgcatccctataaacccatcataaagtcaaaaaatcctaaaacataagttggtgaccatctgtaatcatgatgtggtggtaaatcttggacgctaccttacaataactagacaaaggaaaatcatcctttgtcctgttctgtgtaaatatttaatgaatgatcaaaacttcagtttaaatattatgaaaaactttaaacataaagtagtagaaataagacagtaaatactgtatcctaatatccagtcaggatacagaaaccataccattaacttgaacagggataattttaatataaaaaactgttaactgataatggtattaacttttaagagggatgaaagagagctatgatgtcctaggactgagagtaccccaggaaagaatacccttgaaagggtctccccttccccatggtgaagtcaggcctaatggagagagtggctacagcctactcagtgattgggaaattccctgtcttgccctgggccagagctggtgtaccgctggtggatcaggtcttacaagcaaagaacctcacactctcaactggtaagccagaagcctcttgctagggtgtgagcaaaacttggacaggaactctcagtagatgtttgtgtttgtcaagattctccagacaaacttccttaaaaggattggcttgtgttgttattattaagtctaacaagtccaaaagctggagtgtgaggcaggaggctggaaacccaggaaagctgatggtgcaaggtccagtccaaaggtatctgttggaggattctcttgttctgggaagaggacggtctttttttctcttcagaccttcacctgactggatcaagcccactaacatcgaggaggacagtctgcattactcagagttcactgattgatttaaatgtcaatctcatataaaacaccctcacagaaacacctagaataatgtttgaccttataattggaaaatcagagcaaaagttaaatctctaaaaaaaaaaaaaaaaaaagtatgacccagtagctaggcacctgtggccccgccaagttgacacataaaattaactgtcacagtatcatcttagaagtgaaagaagcccctttatcctgcagtgcccctctaccaccacctactgacaaagaacatggtgctatctggcatgggagaaatgttcagtttgctatggcttgtatgtgtcccctcaaattcaagtgttgccaatgtgacagcatcaagaggtggggtctttaagagatcactaggccatgaaggattctcttaggactgggatgaaggcccataataaaagaggtttcagggagcatcctgctagcttgccttctgtatgtgagaacacagcaagaaagccctagtcaacaagtgccagctccttgatcttagacttcccatcctccagaactgtgagaaatacatttctgttccttacaaattacccagtctcctgtattctgttatagcagcacaaaatgaagataccatacctgaacacctgaacattcttcacaaggtagtaaatgcactgctttattctggtctcagtattgtgtgcttaataaggaaatgagaaagggtggatcagggcataggatgaacaagttactgctagacctctcacaatgccactaatggataagattgtattttcatcattcttgtctcttcggaagctaacaccatgctataataggcactaaatagatgtctaaaaacaccttaagtatttgtctagaaatctggtgcattgttcagaaagaaccaaaattcaaaataatttcaaagggcctaaagcactagttaatcaaaattcattagtttttaatggtactaccactctcaaatttaaaatgtcatcttacgttcctcttcctcgcattggatttattgctaaaacctggtaaacacttttaatccttttcaattccattaccactgctcttgtccagaattacttcgcagactaatagtcacctgacttctcccctgcatcagatttgctgtctaattctggttacaaataagtaactgccaaactaatctttctaaaaagcaagactgatctcgtcactcctttgctcaacaatgtaaaagctcccattgtctccc

SEQ ID NO: 10742 - protein, 79 aa, Homo sapiens
MKFEGGVHRVQRVPKTEKQGCVHTSTMTVAILPQPTEINLVINPKDLRIDTKRASGAGEQHVNTTDSAVRIVHLPTDWK

SEQ ID NO: 10743 - DNA, 3511 bp, Homo sapiens
ggggcgctgcccggtggctctggccccgccgggccgttggcccagcccgccggcccctgagctccggtagcccgccgctggagaagctgttcgcccggggcgggcccttgcggaccttcctcgagcgccaggcggggtctgaagcccatttgaaggtcaggaggcccgagttgctggcggtgatcaaactgctgaacgagaaggagcaggagctgcgggagactgagcacttgctgcacgatgagaatgaaggtttaaggaaacttgcagagaatgaaatcactttgtgtcaaaaagaaataactcagctgaagcatcagattatcttacttttggttccctcagaagaaacagatgaaaatgatttgatcctggaagtaactgcaggagttggaggtggccttagacatgcatctgccagcattgggggttcagaagcctataggcacatgaaatttgaaggaggtgttcacagagtacaaagagtgccaaagacagaaaagcaaggctgcgtccatactagcaccatgactgtagcaatattaccccagcctactgagattaatctggtgattaatccgaaagatttgagaattgacactaagcgagccagtggagctggggagcagcatgtaaataccacggacagtgctgtccggatagttcatcttccaacaggtgttgtttctgaatgtcaacaagagagatctcagctgaaaaataaagagctggctatgacaaagttacgtgcaaaactgtacagcatgcatgtagaagaagaaataaataaaagacagaatgctagaaaaattcagattggaagtaaaggaagatcagagaaaataagaacatataattttccacagaaccgggtcacagatcacagaataaacaagacgctgcatgatcttgaaacttttatgcaaggagattatctactggatgaacttgtacagtcattgaaggaatacgccaattatgaatctttagtagaaattatttcccaaaaagtttaagttgatttgttatttatagactttcgtagcttagaaaaattctacagtacatccacatagggtgaaagtacccttactctcttgaaaaacgtgagttaacacagttggaggtaatatgcatattctgaagtcatagataatttacacagatctctctcaatgcattagcaaaaatcatacaatatacagatggtcctcgatttacattgtggttaattcccaataaacccgtcataagttaaaaatgcatataacgttagcaacacagcagtctcctaattaatgacagcttgacttaacaattttccaactttaccatggtgtgaaagaggtatgattcctaagccctaaggagctcctcagcttgaaatggggctgcatccctataaacccatcataaagtcaaaaaatcctaaaacataagttggtgaccatctgtaatcatgatgtggtggtaaatcttggacgctaccttacaataactagacaaaggaaaatcatcctttgtcctgttctgtgtaaatatttaatgaatgatcaaaacttcagtttaaatattatgaaaaactttaaacataaagtagtagaaataagacagtaaatactgtatcctaatatccagtcaggatacagaaaccataccattaacttgaacagggataattttaatataaaaaactgttaactgataatggtattaacttttaagagggatgaaagagagctatgatgtcctaggactgagagtaccccaggaaagaatacccttgaaagggtctccccttccccatggtgaagtcaggcctaatggagagagtggctacagcctactcagtgattgggaaattccctgtcttgccctgggccagagctggtgtaccgctggtggatcaggtcttacaagcaaagaacctcacactctcaactggtaagccagaagcctcttgctagggtgtgagcaaaacttggacaggaactctcagtagatgtttgtgtttgtcaagattctccagacaaacttccttaaaaggattggcttgtgttgttattattaagtctaacaagtccaaaagctggagtgtgaggcaggaggctggaaacccaggaaagctgatggtgcaaggtccagtccaaaggtatctgttggaggattctcttgttctgggaagaggacggtctttttttctcttcagaccttcacctgactggatcaagcccactaacatcgaggaggacagtctgcattactcagagttcactgattgatttaaatgtcaatctcatataaaacaccctcacagaaacacctagaataatgtttgaccttataattggaaaatcagagcaaaagttaaatctctaaaaaaaaaaaaaaaaaaagtatgacccagtagctaggcacctgtggccccgccaagttgacacataaaattaactgtcacagtatcatcttagaagtgaaagaagcccctttatcctgcagtgcccctctaccaccacctactgacaaagaacatggtgctatctggcatgggagaaatgttcagtttgctatggcttgtatgtgtcccctcaaattcaagtgttgccaatgtgacagcatcaagaggtggggtctttaagagatcactaggccatgaaggattctcttaggactgggatgaaggcccataataaaagaggtttcagggagcatcctgctagcttgccttctgtatgtgagaacacagcaagaaagccctagtcaacaagtgccagctccttgatcttagacttcccatcctccagaactgtgagaaatacatttctgttccttacaaattacccagtctcctgtattctgttatagcagcacaaaatgaagataccatacctgaacacctgaacattcttcacaaggtagtaaatgcactgctttattctggtctcagtattgtgtgcttaataaggaaatgagaaagggtggatcagggcataggatgaacaagttactgctagacctctcacaatgccactaatggataagattgtattttcatcattcttgtctcttcggaagctaacaccatgctataataggcactaaatagatgtctaaaaacaccttaagtatttgtctagaaatctggtgcattgttcagaaagaaccaaaattcaaaataatttcaaagggcctaaagcactagttaatcaaaattcattagtttttaatggtactaccactctcaaatttaaaatgtcatcttacgttcctcttcctcgcattggatttattgctaaaacctggtaaacacttttaatccttttcaattccattaccactgctcttgtccagaattacttcgcagactaatagtcacctgacttctcccctgcatcagatttgctgtctaattctggttacaaataagtaactgccaaactaatctttctaaaaagcaagactgatctcgtcactcctttgctcaacaatgtaaaagctcccattgtctccc

SEQ ID NO: 10744 - protein, 188 aa, Homo sapiens
MKFEGGVHRVQRVPKTEKQGCVHTSTMTVAILPQPTEINLVINPKDLRIDTKRASGAGEQHVNTTDSAVRIVHLPTGVVSECQQERSQLKNKELAMTKLRAKLYSMHVEEEINKRQNARKIQIGSKGRSEKIRTYNFPQNRVTDHRINKTLHDLETFMQGDYLLDELVQSLKEYANYESLVEIISQKV

SEQ ID NO: 10745 - DNA, 3482 bp, Homo sapiens
ggggcgctgcccggtggctctggccccgccgggccgttggcccagcccgccggcccctgagctccggtagcccgccgctggagaagctgttcgcccggggcgggcccttgcggaccttcctcgagcgccaggcggggtctgaagcccatttgaaggtcaggaggcccgagttgctggcggtgatcaaactgctgaacgagaaggagcaggagctgcgggagactgagcacttgctgcacgatgagaatgaaggtttaaggaaacttgcagagaatgaaatcactttgtgtcaaaaagaaataactcagctgaagcatcagattatcttacttttggttccctcagaagaaacagatgaaaatgatttgatcctggaagtaactgcaggagttggaggtcaggaggcaatgttgtttacatcagagatatttgatatgtatcagcaatatgctgcatttaaaagatggcattttgaaaccctggaatattttccaagtgaagtaggtggccttagacatgcatctgccagcattgggggttcagaagcctataggcacatgaaatttgaaggaggtgttcacagagtacaaagagtgccaaagacagaaaagcaaggctgcgtccatactagcaccatgactgtagcaatattaccccagcctactgagattaatctggtgattaatccgaaagatttgagaattgacactaagcgagccagtggagctggggagcagcatgtaaataccacggacagtgctgtccggatagttcatcttccaacagattggaagtaaaggaagatcagagaaaataagaacatataattttccacagaaccgggtcacagatcacagaataaacaagacgctgcatgatcttgaaacttttatgcaaggagattatctactggatgaacttgtacagtcattgaaggaatacgccaattatgaatctttagtagaaattatttcccaaaaagtttaagttgatttgttatttatagactttcgtagcttagaaaaattctacagtacatccacatagggtgaaagtacccttactctcttgaaaaacgtgagttaacacagttggaggtaatatgcatattctgaagtcatagataatttacacagatctctctcaatgcattagcaaaaatcatacaatatacagatggtcctcgatttacattgtggttaattcccaataaacccgtcataagttaaaaatgcatataacgttagcaacacagcagtctcctaattaatgacagcttgacttaacaattttccaactttaccatggtgtgaaagaggtatgattcctaagccctaaggagctcctcagcttgaaatggggctgcatccctataaacccatcataaagtcaaaaaatcctaaaacataagttggtgaccatctgtaatcatgatgtggtggtaaatcttggacgctaccttacaataactagacaaaggaaaatcatcctttgtcctgttctgtgtaaatatttaatgaatgatcaaaacttcagtttaaatattatgaaaaactttaaacataaagtagtagaaataagacagtaaatactgtatcctaatatccagtcaggatacagaaaccataccattaacttgaacagggataattttaatataaaaaactgttaactgataatggtattaacttttaagagggatgaaagagagctatgatgtcctaggactgagagtaccccaggaaagaatacccttgaaagggtctccccttccccatggtgaagtcaggcctaatggagagagtggctacagcctactcagtgattgggaaattccctgtcttgccctgggccagagctggtgtaccgctggtggatcaggtcttacaagcaaagaacctcacactctcaactggtaagccagaagcctcttgctagggtgtgagcaaaacttggacaggaactctcagtagatgtttgtgtttgtcaagattctccagacaaacttccttaaaaggattggcttgtgttgttattattaagtctaacaagtccaaaagctggagtgtgaggcaggaggctggaaacccaggaaagctgatggtgcaaggtccagtccaaaggtatctgttggaggattctcttgttctgggaagaggacggtctttttttctcttcagaccttcacctgactggatcaagcccactaacatcgaggaggacagtctgcattactcagagttcactgattgatttaaatgtcaatctcatataaaacaccctcacagaaacacctagaataatgtttgaccttataattggaaaatcagagcaaaagttaaatctctaaaaaaaaaaaaaaaaaaagtatgacccagtagctaggcacctgtggccccgccaagttgacacataaaattaactgtcacagtatcatcttagaagtgaaagaagcccctttatcctgcagtgcccctctaccaccacctactgacaaagaacatggtgctatctggcatgggagaaatgttcagtttgctatggcttgtatgtgtcccctcaaattcaagtgttgccaatgtgacagcatcaagaggtggggtctttaagagatcactaggccatgaaggattctcttaggactgggatgaaggcccataataaaagaggtttcagggagcatcctgctagcttgccttctgtatgtgagaacacagcaagaaagccctagtcaacaagtgccagctccttgatcttagacttcccatcctccagaactgtgagaaatacatttctgttccttacaaattacccagtctcctgtattctgttatagcagcacaaaatgaagataccatacctgaacacctgaacattcttcacaaggtagtaaatgcactgctttattctggtctcagtattgtgtgcttaataaggaaatgagaaagggtggatcagggcataggatgaacaagttactgctagacctctcacaatgccactaatggataagattgtattttcatcattcttgtctcttcggaagctaacaccatgctataataggcactaaatagatgtctaaaaacaccttaagtatttgtctagaaatctggtgcattgttcagaaagaaccaaaattcaaaataatttcaaagggcctaaagcactagttaatcaaaattcattagtttttaatggtactaccactctcaaatttaaaatgtcatcttacgttcctcttcctcgcattggatttattgctaaaacctggtaaacacttttaatccttttcaattccattaccactgctcttgtccagaattacttcgcagactaatagtcacctgacttctcccctgcatcagatttgctgtctaattctggttacaaataagtaactgccaaactaatctttctaaaaagcaagactgatctcgtcactcctttgctcaacaatgtaaaagctcccattgtctccc

SEQ ID NO: 10746 - protein, 129 aa, Homo sapiens
MLFTSEIFDMYQQYAAFKRWHFETLEYFPSEVGGLRHASASIGGSEAYRHMKFEGGVHRVQRVPKTEKQGCVHTSTMTVAILPQPTEINLVINPKDLRIDTKRASGAGEQHVNTTDSAVRIVHLPTDWK

SEQ ID NO: 10747 - DNA, 2855 bp, Homo sapiens
ggggcgctgcccggtggctctggccccgccgggccgttggcccagcccgccggcccctgagctccggtagcccgccgctggagaagctgttcgcccggggcgggcccttgcggaccttcctcgagcgccaggcggggtctgaagcccatttgaaggtcaggaggcccgagttgctggcggtgatcaaactgctgaacgagaaggagcaggagctgcgggagactgagcacttgctgcacgatgagaatgaaggtttaaggaaacttgcagagaatgaaatcactttgtgtcaaaaagaaataactcagctgaagcatcagattatcttacttttggttccctcagaagaaacagatgaaaatgatttgatcctggaagtaactgcaggagttggaggtcaggaggcaatgttgtttacatcagagatatttgatatgtatcagcaatatgctgcatttaaaagatggcattttgaaaccctggaatattttccaagtgaagtaggtggccttagacatgcatctgccagcattgggggttcagaagcctataggcacatgaaatttgaaggaggtgttcacagagtacaaagagtgccaaagacagaaaagcaaggctgcgtccatactagcaccatgactgtagcaatattaccccagcctactgagattaatctggtgattaatccgaaagatttgagaattgacactaagagctcctcagcttgaaatggggctgcatccctataaacccatcataaagtcaaaaaatcctaaaacataagttggtgaccatctgtaatcatgatgtggtggtaaatcttggacgctaccttacaataactagacaaaggaaaatcatcctttgtcctgttctgtgtaaatatttaatgaatgatcaaaacttcagtttaaatattatgaaaaactttaaacataaagtagtagaaataagacagtaaatactgtatcctaatatccagtcaggatacagaaaccataccattaacttgaacagggataattttaatataaaaaactgttaactgataatggtattaacttttaagagggatgaaagagagctatgatgtcctaggactgagagtaccccaggaaagaatacccttgaaagggtctccccttccccatggtgaagtcaggcctaatggagagagtggctacagcctactcagtgattgggaaattccctgtcttgccctgggccagagctggtgtaccgctggtggatcaggtcttacaagcaaagaacctcacactctcaactggtaagccagaagcctcttgctagggtgtgagcaaaacttggacaggaactctcagtagatgtttgtgtttgtcaagattctccagacaaacttccttaaaaggattggcttgtgttgttattattaagtctaacaagtccaaaagctggagtgtgaggcaggaggctggaaacccaggaaagctgatggtgcaaggtccagtccaaaggtatctgttggaggattctcttgttctgggaagaggacggtctttttttctcttcagaccttcacctgactggatcaagcccactaacatcgaggaggacagtctgcattactcagagttcactgattgatttaaatgtcaatctcatataaaacaccctcacagaaacacctagaataatgtttgaccttataattggaaaatcagagcaaaagttaaatctctaaaaaaaaaaaaaaaaaaagtatgacccagtagctaggcacctgtggccccgccaagttgacacataaaattaactgtcacagtatcatcttagaagtgaaagaagcccctttatcctgcagtgcccctctaccaccacctactgacaaagaacatggtgctatctggcatgggagaaatgttcagtttgctatggcttgtatgtgtcccctcaaattcaagtgttgccaatgtgacagcatcaagaggtggggtctttaagagatcactaggccatgaaggattctcttaggactgggatgaaggcccataataaaagaggtttcagggagcatcctgctagcttgccttctgtatgtgagaacacagcaagaaagccctagtcaacaagtgccagctccttgatcttagacttcccatcctccagaactgtgagaaatacatttctgttccttacaaattacccagtctcctgtattctgttatagcagcacaaaatgaagataccatacctgaacacctgaacattcttcacaaggtagtaaatgcactgctttattctggtctcagtattgtgtgcttaataaggaaatgagaaagggtggatcagggcataggatgaacaagttactgctagacctctcacaatgccactaatggataagattgtattttcatcattcttgtctcttcggaagctaacaccatgctataataggcactaaatagatgtctaaaaacaccttaagtatttgtctagaaatctggtgcattgttcagaaagaaccaaaattcaaaataatttcaaagggcctaaagcactagttaatcaaaattcattagtttttaatggtactaccactctcaaatttaaaatgtcatcttacgttcctcttcctcgcattggatttattgctaaaacctggtaaacacttttaatccttttcaattccattaccactgctcttgtccagaattacttcgcagactaatagtcacctgacttctcccctgcatcagatttgctgtctaattctggttacaaataagtaactgccaaactaatctttctaaaaagcaagactgatctcgtcactcctttgctcaacaatgtaaaagctcccattgtctccc

SEQ ID NO: 10748 - protein, 106 aa, Homo sapiens
MLFTSEIFDMYQQYAAFKRWHFETLEYFPSEVGGLRHASASIGGSEAYRHMKFEGGVHRVQRVPKTEKQGCVHTSTMTVAILPQPTEINLVINPKDLRIDTKSSSA

SEQ ID NO: 10749 - DNA, 1468 bp, Homo sapiens
gtggtaatggaattgaaaaggattaaaagtgtttaccaggttttagcaataaatccaatgcgaggaagaggaacgtaagatgacattttaaatttgagagtggtagtaccattaaaaactaatgaattttgattaactagtgctttaggccctttgaaattattttgaattttggttctttctgaacaatgcaccagatttctagacaaatacttaaggtgtttttagacatctatttagtgcctattatagcatggtgttagcttccgaagagacaagaatgatgaaaatacaatcttatccattagtggcattgtgagaggtctagcagtaacttgttcatcctatgccctgatccaccctttctcatttccttattaagcacacaatactgagaccagaataaagcagtgcatttactaccttgtgaagaatgttcaggtgttcagtgggcttgatccagtcaggtgaaggtctgaagagaaaaaaagaccgtcctcttcccagaacaagagaatcctccaacagatacctttggactggaccttgcaccatcagctttcctgggtttccagcctcctgcctcacactccagcttttggacttgttagacttaataataacaacacaagccaatccttttaaggaagtttgtctggagaatcttgacaaacacaaacatctactgagagttcctgtccaagttttgctcacaccctagcaagaggcttctggcttaccagttgagagtgtgaggttctttgcttgtaagacctgatccaccagcggtacaccagctctggcccagggcaagacagggaatttcccaatcactgagtaggctgtagccactctctccattaggcctgacttcaccatggggaaggggagaccctttcaagggtattctttcctggggtactctcagtcctaggacatcatagctctctttcatccctcttaaaagttaataccattatcagttaacagttttttatattaaaattatccctgttcaagttaatggtatggtttctgtatcctgactggatattaggatacagtatttactgtcttatttctactactttatgtttaaagtttttcataatatttaaactgaagttttgatcattcattaaatatttacacagaacaggacaaaggatgattttcctttgtctagttattgtaaggtagcgtccaagatttaccaccacatcatgattacagatggtcaccaacttatgttttaggattttttgactttatgatgggtttatagggatgcagccccatttcaagctgaggagctccttagggcttaggaatcatacctctttcacaccatggtaaagttggaaaattgttaagtcaagctgtcattaattaggagactgctgtgttgctaacgttatatgcatttttaacttatgacgggtttattgggaattaaccacaatgtaaa

SEQ ID NO: 10750 - protein, 95 aa, Homo sapiens
MFRCSVGLIQSGEGLKRKKDRPLPRTRESSNRYLWTGPCTISFPGFPASCLTLQLLDLLDLIITTQANPFKEVCLENLDKHKHLLRVPVQVLLTP

SEQ ID NO: 10751 - DNA, 800 bp, Homo sapiens
cctttactgctaacactttacagacgaggaaaccgaggcttataatgggaagtagcttgatgagagattttggggccctcatgcagaattctttgtgccttattctccagcaatggaacttcggcatctagagatttcaagattacatttgggaggcaagtccctaggacttgagacaagctgcagcattcacctgcaagtgtggcttgcaaatcagcagactttggagccattggaaaaggctacttccagctacaaagtgaaaagatataagcagcgtgtgctgtagactgaggtagtatcttcgagttctgtcattggcacctatcagtggctgagatatcctgggttgaagtctgcaaggtccagcataatgtattatgcatgaaaagacatctcctgttacttcatttttgtaaaagattacctcaatactccttaagggctggatgacagtgtgtgaagtggctgaaacttacatcaaatgctttaataacaggtcagcaaaaaggccaatgggcttaacttttacattccaactggcacagctacaggagtgggctatttgccaaagacatcgaaccaagcctcggagaagtagaaacagctcaaccaggttcattcagcagagaatcgtggttaaaatatattaagcctggattcctcaaattctgttggtaaagttaatcgggatagggtaacacttggcatccttatgctatgactggatctctcatgggaatgagatcttagctttaatttttagaatttaattaaagcttcacaagtataaatataaa

SEQ ID NO: 10752 - protein, 58 aa, Homo sapiens
MELRHLEISRLHLGGKSLGLETSCSIHLQVWLANQQTLEPLEKATSSYKVKRYKQRVL

SEQ ID NO: 10753 - DNA, 426 bp, Homo sapiens
gcctccagctgagaaagcaaagccaactcacagttccttggctgtcccgcggagcctgcggtggcaaaccacctccttcagaagggtctgtggattctcctggcttttctgtccttgccggagtcccactgctcccgaacacatgccctgaggcagcgtgcctgcacaaccagcttccatctgaacgcttcagacatgcgctgcattcagggcagggacttttcttggacagagaagctgagaagtatcagataaagatgacctgcatgtactggaaaataatctgtggtttatatgtaggcggatggaagcaaaccagggtaatatacatttagaggcagagggctctcacaatatcctcttcaaaaaacattaggatgaaaacagttgcagaacatttctagtaaaatatatcattaaaactta

SEQ ID NO: 10754 - DNA, 2100 bp, Homo sapiens
gtgaggtgtggcgcggcgtctgtgatgtagggcgcagggtctgtgaggtgcggcgcagggtctgaggtgtggcgcggcgtctgtgaggtgcggcgcggcgtctgtgaggggcgcggcgtctgtgatgggcgcagggtctgtgaggtgcaaaggccatttagtgtgtggccttagttaattttttgttttcaattttctgtctctcatgttattgatctgtaaaaggagcataatcgtaagtgtctcttcttattaggttacttgtgaggcgtaagtgaagtactatgtgttaactagtatcatgaaactacagcctcactctccggaggaaatagtgtaatgatagcgccgtttacagggtgcaccgtaacaggaggcaaaaacagaggtggatacgtgcagagaagtctttaggtggtcttgacactagagctgaatttgaaggaagttgagaacttgttagatgaagggacctgagaacaggaacaagtgttcaccaagaccggtctgtgtgaacacacagaggcggaaatcatgccaaaacttgcagagtggcaggaaactccattcagctggagaaagcatacatatggagggagtgaaaggagataacagtggagaggtctgggcaaatttaggctgacttcaagaaggcaggagtttcctgtgaagaaaattgactgatacagatttgtgttttagaaaagtcagtctgtcagcagctgggaaggtgaaggggaggtgtcacaccagatgtaataaaattggttagtgggatttagccattgttttaaagagtggtgaaggtaaggggagtgtggagagagagaactttttggaagttggttatattgatgggacatgtggatgtgactatgaagagacggaatcaaaaatgggccagaagtcctaaatctgagcaacctgtggcatgtgcacataaatatgacccggggacatgtgggtgtgagagtctttatttcagcaaaatatactaagctagaggtatagattttggaatcttcaacaattaattggccattgtggccaagtgaaaacattaggagtctaaagatagagctgtggccaacactcatatttaaagaaaggcttgagaagcccagtgatgcaagaagtgtcaagaaaatatcactataaaaatgtttgagaagcatggtactagtcatcagtgttaaatgtgcttctggtgaggggttcaggaagtttccaatcatgacggaaggtgaagaagagtaggcatcacatagcaagaggggatgcaagacacagggagagagagaagagggaggcaccaggatgctttcagcaatcaatgtcaggaaaactgatagagcaagaagtcactcattgtcacaaggacggcaccaagccctttctgaggaatctgccccatgacccaaacacctcccaccaggccctaccaccaacacaggggatcacagttcaatgtgcgatttggaggcaaaacatatacaaactatactaggaagacaaactgatgtgaggatgaggaggagtcagaaataaactcattcaactaatacttgagtagctactgttgcctacagtatgttcaaggttttgctagtcatccatatgatcactattgacagcttgggagactcacacaggctagtgaatttcaggaattaacagaaactgaacagcttctataatcctgcaggaagtaacctctggatggcacaatggagtctcactctgttgcccaggctggagtgcaatggcacaatctcagctcaccacaagctccgcctcctgcgttcaagtgattctcctgccttagccttctgagtagctggtattacaggtgcctgctaccatggccagctaagttttgtatttttagtagagacagggtttcaccatgttggccaggctgttctcaaactcctgacctcaagtgatctgcccgcctaagcctcccaaagtgctgggattacaagcatgagccgccgcacccggcctctgctaagtttacaacctgcaaattctatccaaaatatatacatattttcttgtatttttcatttaatgcaccaaaataaaaaaaaaattgtt

SEQ ID NO: 10755 - protein, 37 aa, Homo sapiens
MAQWSLTLLPRLECNGTISAHHKLRLLRSSDSPALAF

SEQ ID NO: 10756 - DNA, 426 bp, Homo sapiens
gacttccataccacctgctcccattgtttaattcacatgaagcgatggatcaaaatgaagtgaaaactaaagagagaaaacatacagtgtcattgagacatgtttccagtgtcaaggactatgtaaaccatccgcctcctcttaaggcgttagacttaatccatactttcaagttatctttccgcaatggttttggatacactgatgtcattcggtgattctttatccatatgacatatgccatttttcactcatgaaaagcgttgtttaagaagtaaatttaaatgataattcatgtttagggaagaaatgatactggtgctacagtgagtcctgcatcctaacagccttatataatttctgaaggaagtttcactggataaatccacgtagttcataagaaatagagactattccagtcataac

SEQ ID NO: 10757 - protein, 57 aa, Homo sapiens [sequence omitted]

SEQ ID NO: 10758 - DNA, 717 bp, Homo sapiens
atggaacacagaggctggggagatagcgacattaattacatagttgtacaaaaaactgcctatgtggacagtgctatagagaactgcccccgttatcccgaggggaccctctgggctgcgggaccctctggtctgcgggacactctggactgggggacactctggactgggggacactctggactgggggaccctcagggctgcgggacactctggtctgcgggacactctggactgggggacactctgggctgggggaccctcagggctgcgggacgctctggtctgcgggacactctgggctgggggacactctggactgggggaccctcagggttgcgggacgctctggtctgcgggaccctcgggactgggggacactctggactgggggaccctcagggctgcgggacgctctggtctgcgggacactctggactgggggacactctggactgggggaccctcagggttgcgggacgctctggactgggggaccctcagggttgcgggacactctggactgggggacactctgggctgggggaccctcagggttgcgggacgctctggtctgcgggaccctcgggactgggggacactctggactgggggaccctcagggctgcgggacgctctggactgggggacgctctgggctgtgggaccttcagggctgggggaccctcagggctgcgggacgctctggactgctga

SEQ ID NO: 10759 - protein, 238 aa, Homo sapiens
MEHRGWGDSDINYIVVQKTAYVDSAIENCPRYPEGTLWAAGPSGLRDTLDWGTLWTGGHSGLGDPQGCGTLWSAGHSGLGDTLGWGTLRAAGRSGLRDTLGWGTLWTGGPSGLRDALVCGTLGTGGHSGLGDPQGCGTLWSAGHSGLGDTLDWGTLRVAGRSGLGDPQGCGTLWTGGHSGLGDPQGCGTLWSAGPSGLGDTLDWGTLRAAGRSGLGDALGCGTFRAGGPSGLRDALDC

SEQ ID NO: 10760 - DNA, 648 bp, Homo sapiens
cgccatctttgctgtttggaaaacggccattccagcctgcgagctttggagagaccaagccccctgaggcagaggccgcgcctcagcatgttacagctgttttgttgaggtgtggtgaggttgcttctttaaatgcgaccctgatacattcctcctccctgggcaggtccttccctctggagcctccagccacccctgcctgtgttctgttgcggaaagacttctaatttctccttggggcagagtgcctgcggagtggggcgggccgccgccttggctgtttgtgaagcggcatcgttgtctggggtatgatttaatacactttaccgacctgaattcattggatatatgtaaaaatgaaggaatgcacgttattctgcttgatgctctgcagagaggagctgcctgagaggttgcacctgcagtcctggatgcactggccccaggggtggttggtgctgactccacatttgtctaataagatgtccagatacaaaaatgtctgtgatgtgggaaccgttacagatctaggagagttttttcaacagcaaaaaaagcaaagcctgtttctgtcaaagtcttttattttatttttgaatttgaccttttaaaataagattaaaacattccatcaagactccctttaga

SEQ ID NO: 10761 - protein, 84 aa, Homo sapiens
MKECTLFCLMLCREELPERLHLQSWMHWPQGWLVLTPHLSNKMSRYKNVCDVGTVTDLGEFFQQQKKQSLFLSKSFILFLNLTF

SEQ ID NO: 10762 - DNA, 1340 bp, Homo sapiens
gagttattggcaagttcccctgcagtttgggctgtctctgtggctggttctgcggcgtgcggccagccatggagcgctctgggcccagcgaagtgacaggctcagacgcatcgggaccggacccgcagcttgcggtcaccatgggcttcacggggttcggtaaaaaagctcgcacatttgacttggaagcaatgtttgaacaaactcgaagaacagctgtggaaagaagttgcaaaacactggggctggtgaattaccagatctccgtcaagtgcagtaaccagttcaagttggaagtgtgtcttttgaaatcagaaaacaaagtcgtggacaaccaggctgggacccagggccagctgaaggtgctgggtgccaacctctggtggccgtacctgatgcacgaacaccccgcctacctgtactcgtgggaggatggtgattgctcacaccaaagccttggacccctcccagcctgtgacctttgtgaccaactccacctacgcagcagacaagggggctctgtatgtggatgtgatccgtgtgaacagctactactcttggtatcgcaactacgggcacctggagttgattcagctgcagctggccgcccagtttgagaactggtgtaagacatcacaatcccattattcagagcgtgtatggagtggaaacgcttgtagggtttcaccaggatccaccttgatgttcagtgaagagtaccagaaaagtctgctagagcagtaccatctgggtctcaatcaaaaacgcagaaaatacgtggttggagagctcatctggaattttgccgatttcatgactaaccagtattcagaaggaaccaagctgctgcttctacatgttgctgagaaatctgctgggttaaatgtccaatttcactgcacacaagttccaccttccgcaaaacacaagagcatgaatacaattcaaaaaagtttgtttccacttttcaacatggattgcttttgctccattttccaataacatattcatttccatttgagactccaacagaatgacctttactgtccatattttatcaatattctgttcatgattatttaattattttctgagaagacagcgttttcttctatatttctttccgagccctcacgagaattggcttttaaattttttccacagtaatctagcattttgcataaaacctcatcaatctctgccaatcactgagcccaaaaccattttcactttgttttaggtatttataataacagcactcccacttctcatgatcaatttccatcttcagcagttcaggctgctttaataaagttccataacctgagtggcttttaaat

SEQ ID NO: 10763 - protein, 189 aa, Homo sapiens
MVIAHTKALDPSQPVTFVTNSTYAADKGALYVDVIRVNSYYSWYRNYGHLELIQLQLAAQFENWCKTSQSHYSERVWSGNACRVSPGSTLMFSEEYQKSLLEQYHLGLNQKRRKYVVGELIWNFADFMTNQYSEGTKLLLLHVAEKSAGLNVQFHCTQVPPSAKHKSMNTIQKSLFPLFNMDCFCSIFQ

SEQ ID NO: 10764 - DNA, 1345 bp, Homo sapiens
gttattggcaagttcccctgcagtttgggctgtctctgtggctggttctgcggcgtgcggccagccatggagcgctctgggcccagcgaagtgacaggctcagacgcatcgggaccggacccgcagcttgcggtcaccatgggcttcacggggttcggtaaaaaagctcgcacatttgacttggaagcaatgtttgaacaaactcgaagaacagctgtggaaagaagttgcaaaacactggttcaacccaatggaaatggattgaaagagtgaaagtcactggtctcaaagaatctacggaatttagcattttgaaaatcacatagcaattttgggtaggtattcacctgcactaaaaaaccaggcaaacatccgactcccaggataaagtgactgagagcagtagaagacttgttgagccttaaggaataagaggaaaattacgttatgaagtgcaggaacagcacagacccagacgaggggacgcagcccggagccagtaacccggcgccacctcctccccagggcgcagcgctggctgatccccagataccgtgatcacacgtcccgggtcctgagagcgcctcataggtagacagttctttgggacttctgggatgcagcacttgaagagaggtttacctaaactttcctcctgggagcctgtgatcatttgaaagtaacagaagaaagttgtcaggctgaggaaagtttcaacaggcacttggtgagaatgggaagcatccattcattgtgaaatcgcggggacagaggaggaattcacgggatcagagcactgagaaactccagaggcttctggttcaccgccctgattccacagatgtgggtcagaggcagagatggaagttggaatggacaagcctgccctctccttggctctccatggctctgtcctcaggctgtttctgcaatttgacatgaggcctggccccagggaaaccagtggggcctcatctcctccctgtgctgctctgaggtggagccttctcagggtcagtccagctctggagcccctctccagctcggtcaccaaagctgtctggtcccagggcggtgctgagtgacaggcatgccagccaatccaatcggcaatttcatatccaatgcatgtgactgataaagagataacgccctgtctccaagacacaggctttacataaacagctttaatgacttcttcacttagagacaagactccttagtggtggaacctcaggcatccgtgcaggacgtaagaaagctgccgtatatacatgaactgagaagtgtgtagaagaataaatactgtaataggtaataaaatgtatgtatttttatttatgtg

SEQ ID NO: 10765 - protein, 68 aa, Homo sapiens
MERSGPSEVTGSDASGPDPQLAVTMGFTGFGKKARTFDLEAMFEQTRRTAVERSCKTLVQPNGNGLKE

SEQ ID NO: 10766 - DNA, 1590 bp, Homo sapiens
gttattggcaagttcccctgcagtttgggctgtctctgtggctggttctgcggcgtgcggccagccatggagcgctctgggcccagcgaagtgacaggctcagacgcatcgggaccggacccgcagcttgcggtcaccatgggcttcacggggttcggtaaaaaagctcgcacatttgacttggaagcaatgtttgaacaaactcgaagaacagctgtggaaagaagttgcaaaacactggttcaacccaatggaaatggattgaaagagtgaaagtcactggtctcaaagaatctacggaatttagcattttgaaaatcacatagcaattttgggtaggtattcacctgcactaaaaaaccaggcaaacatccgactcccaggataaagtgactgagagcagtagaagacttgttgagccttaaggaataagaggaaaattacgttatgaagtgcaggaacagcacagacccagacgaggggacgcagcccggagccagtaacccggcgccacctcctccccagggcgcagcgctggctgatccccagataccgtgatcacacgtcccgggtcctgagagcgcctcataggtagacagttctttgggacttctgggatgcagcacttgaagagaggtttacctaaactttcctcctgggagcctgtgatcatttgaaagtaacagaagaaagttgtcaggctgaggaaagtttcaacaggcacttggtgagaatgggaagcatccattcattgtgaaatcgcggggacagaggaggaattcacgggatcagagcactgagaaactccagaggcttctggttcaccgccctgattccacagatgtgggtcagaggcagagatggaagttggaatggacaagcctgccctctccttggctctccatggctctgtcctcaggctgtttctgcaatttgacatgaggcctggccccagggaaaccagtggggcctcatctcctccctgtgctgctctgaggtggagccttctcagggtcagtccagctctggagcccctctccagctcggtcaccaaagctgtctggtcccagggcggtgctgagtgacaggcatgccagccaatccaatcggcaatttcatatccaatgcatgtgactgataaagagataacgccctgtctccaagacacaggctttacataaacagctttaatgacttcttcacttagagacaagactccttagtggtggaacctcaggcatccgtgcaggacgtaagaaagctgccgtatatacatgaactgagaagtgtgtagaagaataaatactgtaataggtaataaaatgtatgtatttttatttatgtgctactttgtctttctccctctctgtgtatatacacatacatacaaaaatgtattcattctatggaaaacatgaaagatgtaatattctttacatatgaaattttaattaatgtattttttctgatcatatgaacaccacaaatataattttataatttttttacctaacaataactcttaaacatgaatatacatggacaatatcatagttttttttttaatcataattaaaatggttgtgaaac

SEQ ID NO: 10767 - protein, 68 aa, Homo sapiens; identical to SEQ ID NO: 10765

SEQ ID NO: 10768 - DNA, 1591 bp, Homo sapiens
ctgcggcgtgcggccagccatggagcgctctgggcccagcgaagtgacaggctcagacgcatcgggaccggacccgcagcttgcggtcaccatgggcttcacggggttcggtaaaaaagctcgcacatttgacttggaagcaatgtttgaacaaactcgaagaacagctgtggaaagaagttgcaaaacactgggccaccaggaacacacctgtagcccagcaaagttgaggccatcaactggctcatcacaacaaggaaggctgtgcaccactgggacccagcagcagctcagcagcagcagtgaaagggccttgggaaagactcggagggtttggcttatacaaggccagattacagaggggtattgatttgccttgcccccgcccccaccatcacagtgtgtccctgtccagtgttggtgctgtgtggcattggcttgtgtccataggagtccatcaaggcagagcggcagagtgggaaggcagttcaacccaatggaaatggattgaaagagtgaaagtcactggtctcaaagaatctacggaatttagcattttgaaaatcacatagcaattttgggtaggtattcacctgcactaaaaaaccaggcaaacatccgactcccaggataaagtgactgagagcagtagaagacttgttgagccttaaggaataagaggaaaattacgttatgaagtgcaggaacagcacagacccagacgaggggacgcagcccggagccagtaacccggcgccacctcctccccagggcgcagcgctggctgatccccagataccgtgatcacacgtcccgggtcctgagagcgcctcataggtagacagttctttgggacttctgggatgcagcacttgaagagaggtttacctaaactttcctcctgggagcctgtgatcatttgaaagtaacagaagaaagttgtcaggctgaggaaagtttcaacaggcacttggtgagaatgggaagcatccattcattgtgaaatcgcggggacagaggaggaattcacgggatcagagcactgagaaactccagaggcttctggttcaccgccctgattccacagatgtgggtcagaggcagagatggaagttggaatggacaagcctgccctctccttggctctccatggctctgtcctcaggctgtttctgcaatttgacatgaggcctggccccagggaaaccagtggggcctcatctcctccctgtgctgctctgaggtggagccttctcagggtcagtccagctctggagcccctctccagctcggtcaccaaagctgtctggtcccagggcggtgctgagtgacaggcatgccagccaatccaatcggcaatttcatatccaatgcatgtgactgataaagagataacgccctgtctccaagacacaggctttacataaacagctttaatgacttcttcacttagagacaagactccttagtggtggaacctcaggcatccgtgcaggacgtaagaaagctgccgtatatacatgaactgagaagtgtgtagaagaataaatactgtaataggtaataaaatgtatgtatttttatttatgtg

SEQ ID NO: 10769 - protein, 116 aa, Homo sapiens
MERSGPSEVTGSDASGPDPQLAVTMGFTGFGKKARTFDLEAMFEQTRRTAVERSCKTLGHQEHTCSPAKLRPSTGSSQQGRLCTTGTQQQLSSSSERALGKTRRVWLIQGQITEGY

SEQ ID NO: 10770 - DNA, 1836 bp, Homo sapiens
ctgcggcgtgcggccagccatggagcgctctgggcccagcgaagtgacaggctcagacgcatcgggaccggacccgcagcttgcggtcaccatgggcttcacggggttcggtaaaaaagctcgcacatttgacttggaagcaatgtttgaacaaactcgaagaacagctgtggaaagaagttgcaaaacactgggccaccaggaacacacctgtagcccagcaaagttgaggccatcaactggctcatcacaacaaggaaggctgtgcaccactgggacccagcagcagctcagcagcagcagtgaaagggccttgggaaagactcggagggtttggcttatacaaggccagattacagaggggtattgatttgccttgcccccgcccccaccatcacagtgtgtccctgtccagtgttggtgctgtgtggcattggcttgtgtccataggagtccatcaaggcagagcggcagagtgggaaggcagttcaacccaatggaaatggattgaaagagtgaaagtcactggtctcaaagaatctacggaatttagcattttgaaaatcacatagcaattttgggtaggtattcacctgcactaaaaaaccaggcaaacatccgactcccaggataaagtgactgagagcagtagaagacttgttgagccttaaggaataagaggaaaattacgttatgaagtgcaggaacagcacagacccagacgaggggacgcagcccggagccagtaacccggcgccacctcctccccagggcgcagcgctggctgatccccagataccgtgatcacacgtcccgggtcctgagagcgcctcataggtagacagttctttgggacttctgggatgcagcacttgaagagaggtttacctaaactttcctcctgggagcctgtgatcatttgaaagtaacagaagaaagttgtcaggctgaggaaagtttcaacaggcacttggtgagaatgggaagcatccattcattgtgaaatcgcggggacagaggaggaattcacgggatcagagcactgagaaactccagaggcttctggttcaccgccctgattccacagatgtgggtcagaggcagagatggaagttggaatggacaagcctgccctctccttggctctccatggctctgtcctcaggctgtttctgcaatttgacatgaggcctggccccagggaaaccagtggggcctcatctcctccctgtgctgctctgaggtggagccttctcagggtcagtccagctctggagcccctctccagctcggtcaccaaagctgtctggtcccagggcggtgctgagtgacaggcatgccagccaatccaatcggcaatttcatatccaatgcatgtgactgataaagagataacgccctgtctccaagacacaggctttacataaacagctttaatgacttcttcacttagagacaagactccttagtggtggaacctcaggcatccgtgcaggacgtaagaaagctgccgtatatacatgaactgagaagtgtgtagaagaataaatactgtaataggtaataaaatgtatgtatttttatttatgtgctactttgtctttctccctctctgtgtatatacacatacatacaaaaatgtattcattctatggaaaacatgaaagatgtaatattctttacatatgaaattttaattaatgtattttttctgatcatatgaacaccacaaatataattttataatttttttacctaacaataactcttaaacatgaatatacatggacaatatcatagttttttttttaatcataattaaaatggttgtgaaac

SEQ ID NO: 10771 - protein, 116 aa, Homo sapiens; identical to SEQ ID NO: 10769

SEQ ID NO: 10772 - DNA, 1481 bp, Homo sapiens
gcggcgtgcggccagccatggagcgctctgggcccagcgaagtgacaggctcagacgcatcgggaccggacccgcagcttgcggtcaccatgggcttcacggggttcggtaaaaaagctcgcacatttgacttggaagcaatgtttgaacaaactcgaagaacagctgtggaaagaagttgcaaaacactgggccagattacagaggggtattgatttgccttgcccccgcccccaccatcacagtgtgtccctgtccagtgttggtgctgtgtggcattggcttgtgtccataggagtccatcaaggcagagcggcagagtgggaaggcaggtcagcttccagctcttccaggctgcatgtcccactcaatatcctttcaacccaatggaaatggattgaaagagtgaaagtcactggtctcaaagaatctacggaatttagcattttgaaaatcacatagcaattttgggtaggtattcacctgcactaaaaaaccaggcaaacatccgactcccaggataaagtgactgagagcagtagaagacttgttgagccttaaggaataagaggaaaattacgttatgaagtgcaggaacagcacagacccagacgaggggacgcagcccggagccagtaacccggcgccacctcctccccagggcgcagcgctggctgatccccagataccgtgatcacacgtcccgggtcctgagagcgcctcataggtagacagttctttgggacttctgggatgcagcacttgaagagaggtttacctaaactttcctcctgggagcctgtgatcatttgaaagtaacagaagaaagttgtcaggctgaggaaagtttcaacaggcacttggtgagaatgggaagcatccattcattgtgaaatcgcggggacagaggaggaattcacgggatcagagcactgagaaactccagaggcttctggttcaccgccctgattccacagatgtgggtcagaggcagagatggaagttggaatggacaagcctgccctctccttggctctccatggctctgtcctcaggctgtttctgcaatttgacatgaggcctggccccagggaaaccagtggggcctcatctcctccctgtgctgctctgaggtggagccttctcagggtcagtccagctctggagcccctctccagctcggtcaccaaagctgtctggtcccagggcggtgctgagtgacaggcatgccagccaatccaatcggcaatttcatatccaatgcatgtgactgataaagagataacgccctgtctccaagacacaggctttacataaacagctttaatgacttcttcacttagagacaagactccttagtggtggaacctcaggcatccgtgcaggacgtaagaaagctgccgtatatacatgaactgagaagtgtgtagaagaataaatactgtaataggtaataaaatgtatgtatttttatttatgtg

SEQ ID NO: 10773 - protein, 65 aa, Homo sapiens
MERSGPSEVTGSDASGPDPQLAVTMGFTGFGKKARTFDLEAMFEQTRRTAVERSCKTLGQITEGY

SEQ ID NO: 10774 - DNA, 1726 bp, Homo sapiens
gcggcgtgcggccagccatggagcgctctgggcccagcgaagtgacaggctcagacgcatcgggaccggacccgcagcttgcggtcaccatgggcttcacggggttcggtaaaaaagctcgcacatttgacttggaagcaatgtttgaacaaactcgaagaacagctgtggaaagaagttgcaaaacactgggccagattacagaggggtattgatttgccttgcccccgcccccaccatcacagtgtgtccctgtccagtgttggtgctgtgtggcattggcttgtgtccataggagtccatcaaggcagagcggcagagtgggaaggcaggtcagcttccagctcttccaggctgcatgtcccactcaatatcctttcaacccaatggaaatggattgaaagagtgaaagtcactggtctcaaagaatctacggaatttagcattttgaaaatcacatagcaattttgggtaggtattcacctgcactaaaaaaccaggcaaacatccgactcccaggataaagtgactgagagcagtagaagacttgttgagccttaaggaataagaggaaaattacgttatgaagtgcaggaacagcacagacccagacgaggggacgcagcccggagccagtaacccggcgccacctcctccccagggcgcagcgctggctgatccccagataccgtgatcacacgtcccgggtcctgagagcgcctcataggtagacagttctttgggacttctgggatgcagcacttgaagagaggtttacctaaactttcctcctgggagcctgtgatcatttgaaagtaacagaagaaagttgtcaggctgaggaaagtttcaacaggcacttggtgagaatgggaagcatccattcattgtgaaatcgcggggacagaggaggaattcacgggatcagagcactgagaaactccagaggcttctggttcaccgccctgattccacagatgtgggtcagaggcagagatggaagttggaatggacaagcctgccctctccttggctctccatggctctgtcctcaggctgtttctgcaatttgacatgaggcctggccccagggaaaccagtggggcctcatctcctccctgtgctgctctgaggtggagccttctcagggtcagtccagctctggagcccctctccagctcggtcaccaaagctgtctggtcccagggcggtgctgagtgacaggcatgccagccaatccaatcggcaatttcatatccaatgcatgtgactgataaagagataacgccctgtctccaagacacaggctttacataaacagctttaatgacttcttcacttagagacaagactccttagtggtggaacctcaggcatccgtgcaggacgtaagaaagctgccgtatatacatgaactgagaagtgtgtagaagaataaatactgtaataggtaataaaatgtatgtatttttatttatgtgctactttgtctttctccctctctgtgtatatacacatacatacaaaaatgtattcattctatggaaaacatgaaagatgtaatattctttacatatgaaattttaattaatgtattttttctgatcatatgaacaccacaaatataattttataatttttttacctaacaataactcttaaacatgaatatacatggacaatatcatagttttttttttaatcataattaaaatggttgtgaaac

SEQ ID NO: 10775 - protein, 65 aa, Homo sapiens; identical to SEQ ID NO: 10773

SEQ ID NO: 10776 - DNA, 1600 bp, Homo sapiens
agccatggagcgctctgggcccagcgaagtgacaggctcagacgcatcgggaccggacccgcagcttgcggtcaccatgggcttcacggggttcggtaaaaaagctcgcacatttgacttggaagcaatgtttgaacaaactcgaagaacagctgtggaaagaagttgcaaaacactgggatccaccttgatgttcagtgaagagtaccagaaaagtctgctagagcagtaccatctgggtctcaatcaaaaacgcagaaaatacgtggttggagagctcatctggaattttgccgatttcatgactaaccagtaaagaagatggaagaagaaggaaagaaaaggcataatgtaaatataaacgctgtctttatttctggatctagcaaagagttagtttgaaagagcaattgcttataagactacaaggctgatttctcccatccctgcaatgctgaaagtctgtgcccttctaagcaaattctagtttccctgacaattagtctaatggaatgcctggatgtaggaatattgattccgatgacagtacttttacagatggacctgagatatttctgctggttcttcactgacaacacacaacatatggatgatcataactttcccatataccccactagggcaaaaccagaaactgagaaagctagatggaagaataatgatgtggaaggggagttctccactaggaaggatccgatgagtagatagacacaaggacaaagagggcctaactttgggctgtggaagcggagttgcactcataggagccatagtgagtcattgcatcagaaccactaagcatcagtcatgaagagcaaacgggcttgctgttacaggagctaaaccctgaacccttccatcgtggttacagagagcttctgggggacagcatgagacagcttagcacttccccaatattatgaggaaacccaaaggcccagatgccacttgggaaaggagaaccaagaaggaaggacttcagaaaaggaagaaaccatgaaacattaagtaatttacaaactagactcttctttattctcttattttatttatttctttatttttgagacagagtctcactttttgcccttgatgaaatggactggcccaatcatggctcactgcagcctcaaaatcctggcctcaagaaatcctccagactcagcctcctaaagtgctgggattacaggcatgagccacagcacctgacctagactgttttaaactagatttccctgagaaaactttcactggaaaaatcaaaattatcctgctgtcattaagagaaaactatctgttgtagaaaattacattcttttttttttcagacatgtcatataaatatttggacccctctctgagaacaaactacttaaaagtcatttcaatcattaacgaatatcataattgagggcctgtgctgggtgccagaaatctaccagtgagcaaaacagcacggatctttgtccacagtaaatttacagatcagaggaaacagaaaaacaatcagttaaataaaacaggtctgaaaattgcgtatgagaacccaaagcagaggtacctaatcaggtcaaaaaaa

SEQ ID NO: 10777 - protein, 103 aa, Homo sapiens
MERSGPSEVTGSDASGPDPQLAVTMGFTGFGKKARTFDLEAMFEQTRRTAVERSCKTLGSTLMFSEEYQKSLLEQYHLGLNQKRRKYVVGELIWNFADFMTNQ

SEQ ID NO: 10778 - DNA, 577 bp, Homo sapiens
agtgacaggctcagacgcatcgggaccggacccgcagcttgcggtcaccatgggcttcacggggttcggtaaaaaagctcgcacatttgacttggaagcaatgtttgaacaaactcgaagaacagctgtggaaagaagttgcaaaacactggtgttcttccagacttggcaattagattacatttagactgtggaattaaaagtgattccctgtgagctctcctagcaaattatgaaattgaagagagagagaacgggttgcgggaaccctagtttcctaccgtgagacagtttgacttacttttctttaaaagttgaaaattctcatatgggcattatttatctcatgcttggtattggagtctttccctgggtattcatagtacacttgaggaaactaagactttgacccttttaatagcaagtttgtctgtatgtgggggtatgagctgtcttggttgctaagtgcactagtggaaaggatgaattactataaaaccccgataaaatatgtgctgtgaagggtctggaaatgataatggtacaaattttttttaatgttttttatgttcttgaa

SEQ ID NO: 10779 - protein, 45 aa, Homo sapiens
MGFTGFGKKARTFDLEAMFEQTRRTAVERSCKTLVFFQTWQLDYI

SEQ ID NO: 10780 - DNA, 1124 bp, Homo sapiens
caggaaattccaagtatttcagaagctctgtggcaggaacctgaaacaaagaccaaatatatatatatttttttgagacggagtcttgctctgttgcccaggctggagtgcagtggcgccatctccactcactgcaggttctgcctcccgggttcatgccattctcctgcctcagcctccagagtaagctgggactacaggcacctgccaccacgcccggctaatttgtgcatttttagtagagatggggtttcaccatgttgcccaggctggcctcgaactcctgacctcgtgatccacctgcctcggcctcccaaagtgctggaattacaggcataagccaccatgcctggccttgaaaccatctttcaaaatgtggtctttttgcagtacagctggaatgtctctgcctttcccaccatgcacctttgtaaaggggcggcttctgtctcgctggtgtaacagatttcttccctgtgtcccctttctcttctgtcaatgaatcatgggtggctgtcagctggggaccactctcagtgtctcatgcactgaatgcaacatggacacaaacttacgatagggccaggtgggggacagcaagaggtgagcaccggaaattgcatgaggtaggagtcactggctggtagtgggtgagggacacgtggtagggacagttcagcagctggatcagggtggaaatccaaatcctgacagctgagaagtggcacagacctgcttctgtggggacaagtgtccactggccctggccaactggcctccagggggcattgttggaacatgcgatcatcccaaagcatttcagcttgaagaagatctaggacacagtttgttgttaccacctcagagcatttagatgggatgtgatggatggaattgaagttaaaaacccattcaccatttctaggtagtacagtaggctcctaatttacagaaatgcttgtgaaattgggaatcatgataaaatcctcatacctcctcctcttttaaccaaatctttctaaaatgcacaattataatttcttacctttaggaaaaagtaattatgttatatgtgttatatacactatgtaaatatagttcattaaatcattctttggcgtttg

SEQ ID NO: 10781 - protein, 42 aa, Homo sapiens
MWSFCSTAGMSLPFPPCTFVKGRLLSRWCNRFLPCVPFLFCQ

SEQ ID NO: 10782 - DNA, 617 bp, Homo sapiens
aaaaaaaaaaaaaaaagcaacagaagcaaatgagagtgcctgggagtggtcattgtggggcattcctgtttgtgtgacccaggtcatgtccctccctaagccctggtctctcttgcctcctgcagggctggtgaattaccagatctccgtcaagtgcagtaaccagttcaagttggaagtgtgtcttttgaaatcagaaaacaaagtcgtggacaaccaggctgggacccagggccagctgaaggtgctgggtgccaacctctggtggccgtacctgatgcacgaacaccccgcctacctgtactcgtgggaggatggtgattgctcacaccaaagccttggacccctcccagcctgtgacctttgtgaccaactccacctacgcagcagacaagggggctctgtatgtggatgtgatccgtgtgaacagctactactcttggtatcgcaactacgggcacctggagttgattcagctgcagctggccgcccagtttgagaactggtgtaagacatcacaatcccattattcagagcgtgtatggagtggaaacgcttgtagggtttcaccaggtaagcggtgttgaactttctgcttgtgtattctctcttggcag

SEQ ID NO: 10783 - protein, 137 aa, Homo sapiens
MSLPKPWSLLPPAGLVNYQISVKCSNQFKLEVCLLKSENKVVDNQAGTQGQLKVLGANLWWPYLMHEHPAYLYSWEDGDCSHQSLGPLPACDLCDQLHLRSRQGGSVCGCDPCEQLLLLVSQLRAPGVDSAAAGRPV

SEQ ID NO: 10784 - DNA, 620 bp, Homo sapiens
gcctgctcctgctttgccttctgtcatgagtaaaagctccctgaggcctctccagaagaagatgccgctgtgcttcctgtacagcctgcagaactaaaaactcaagctggagacggaaatgaacagatgcatatggctggaaagactcagtgctaatctctacaatgttgttttaatagaatggagacaagaccacatactttcttacaataatgaggatcaataaagacaaaactgacactttgtaatgaataatgatctgaacaatcacctgagaaagtatctctttgttgcaggtttttggaaatgggctatattttttgaatcataaccgatatgtactgccataaacaagaggatttcaagccagctccatctggtcgaaaattattttatttattactaagagaaaagtgtaagacaagtcctgtggtaaaaacagatttattgcctctgctattcacctgtgttatttcttcatatattaccattgacatatattatccattcttcacagcaatggctttgccgtggcaaattaaatatctcattgtccttctctggccattttacattataatgtttctgagtagacttttatagctctctcacagaattat

SEQ ID NO: 10785 - protein, 88 aa, Homo sapiens
MYCHKQEDFKPAPSGRKLFYLLLREKCKTSPVVKTDLLPLLFTCVISSYITIDIYYPFFTAMALPWQIKYLIVLLWPFYIIMFLSRLL

SEQ ID NO: 10786 - DNA, 850 bp, Homo sapiens
caatgattgagtcagtcatgtgtatgtaataaggcctccataaaaaccgaagaggatggggtttgcagagcttctaggctggtgagcacttggatgtgctggaggcatccagagggtggagcacgtggagagggcatgaatgctcagtgcaccttccctcataccttgccttatacagcgtttccatctggctgctgttgagttttattctttataacaatatgctaaccctaagcaaagttttcctgagttctgtgagccattctagcaaatggtggaacctgagaaaggggacatgggaatctctgacttacagccagtcagcccgaagcacaggataccaaaatcatcataccagagacatgaatctccctcatttggcatcccaggaggcctggatcagtttcactgtgaatgctccgccgctcaaccacacaagcacccttcctccaggcccaggggatactgcagaagaggctgaaggttgcactattggcttccctacttttgaggttttgggactccgactggcttcctggctcctcaccttgcagatggtctattgtgggacctcatcttgtgatcatgtctcagtatgttgctcagactggtcttgaactcctggcctcaagtgatcctcccacctcagcctcttgagtagctgggactacagttgcaagccatcctgtctggctagttatctttaattaatgacatttgttaaagtaacacaaaaatcctagaaacatttgcctgttgaaactttctgataatttgaatgaagtaaagtttggagtctctgtctcattgaaaatactcaaggttaatataataaaaacagcaaagcagt

SEQ ID NO: 10787 - protein, 131 aa, Homo sapiens
MLTLSKVFLSSVSHSSKWWNLRKGTWESLTYSQSARSTGYQNHHTRDMNLPHLASQEAWISFTVNAPPLNHTSTLPPGPGDTAEEAEGCTIGFPTFEVLGLRLASWLLTLQMVYCGTSSCDHVSVCCSDWS

SEQ ID NO: 10788 - DNA, 898 bp, Homo sapiens
caatgattgagtcagtcatgtgtatgtaataaggcctccataaaaaccgaagaggatggggtttgcagagcttctaggctggtgagcacttggatgtgctggaggcatccagagggtggagcacgtggagagggcatgaatgctcagtgcaccttccctcataccttgccttatacagcgtttccatctggctgctgttgagttttattctttataacaatatgctaaccctaagcaaagttttcctgagttctgtgagccattctagcaaatggtggaacctgagaaaggggacatgggaatctctgacttacagccagtcagcccgaagcacaggataccaaaatcatcataccagagacatgaatctccctcatttggcatcccaggaggcctggatcagtttcactgtgaatgctccgccgctcaaccacacaagcacccttcctccaggcccaggggatactgcagaagaggctgaaggttgcactattggcttccctacttttgaggttttgggactccgactggcttcctggctcctcaccttgcagatggtctattgtgggacctcatcttgtgatcatgtctcagtatgttgctcagactggtcttgaactcctggcctcaagtgatcctcccacctcagcctcttgagtagctgggactacagttgcaagccatcctgtctggctagttatctttaattaatgacatttgttaaagtaacacaaaaatcctagaaacatttgcctgttgaaactttctgataatttgaatgaagtaaagtttggagtctctgtctcattgaaaatactcaaggttaatataataaaaacagcaaagcagtaatgcataaaagaattattagaagtctaataaaattatttggacctcc

SEQ ID NO: 10789 - protein, 131 aa, Homo sapiens; identical to SEQ ID NO: 10787

SEQ ID NO: 10790 - DNA, 1216 bp, Homo sapiens
caatgattgagtcagtcatgtgtatgtaataaggcctccataaaaaccgaagaggatggggtttgcagagcttctaggctggtgagcacttggatgtgctggaggcatccagagggtggagcacgtggagagggcatgaatgctcagtgcaccttccctcataccttgccttatacagcgtttccatctggctgctgttgagttttattctttataacaatatgctaaccctaagcaaagttttcctgagttctgtgagccattctagcaaatggtggaacctgagaaaggggacatgggaatctctgacttacagccagtcagcccgaagcacaggataccaaaatcatcataccagagacatgaatctccctcatttggcatcccaggaggcctggatcagtttcactgtgaatgctccgccgctcaaccacacaagcacccttcctccaggcccaggggatactgcagaagaggctgaaggttgcactattggcttccctacttttgaggttttgggactccgactggcttcctggctcctcaccttgcagatggtctattgtgggacctcatcttgtgatcatgtctcagtatgttgctcagactggtcttgaactcctggcctcaagtgatcctcccacctcagcctcttgagtagctgggactacagttgcaagccatcctgtctggctagttatctttaattaatgacatttgttaaagtaacacaaaaatcctagaaacatttgcctgttgaaactttctgataatttgaatgaagtaaagtttggagtctctgtctcattgaaaatactcaaggttaatataataaaaacagcaaagcagtaatgcataaaagaattattagaagtctaataaaattatttggacctccaactatagcaacactgattaatgactgctttttaattaattgaaagttgttcaatcatcgtgccatttcatttcacctgagagtttttataaaagggtcagagccaaaacatatgctagttcaatttgcaataaggtatacttaagcaatttcattcttcttggcagggcaagtgtgggctattcatttctcatttattcacggtgatgatattccctgttcagctggctagtgtgatcaaggaagacagtcttaggcattagaatatgaataaagtttacttttaagctgtgcattcaaacaaaataaaaacctatg

SEQ ID NO: 10791 - protein, 131 aa, Homo sapiens; identical to SEQ ID NO: 10787

SEQ ID NO: 10792 - DNA, 407 bp, Homo sapiens
tgaagggtgaatttgagaccacttacaactccatcatcaattttaaagaacagtgactcttcattggccagtggaagaaattaacccacaatgatgttgatgctatttctaagaggcctgtggagaagagaggaagcctgccattgtagccttgtggtatagaatcccaattgttaaagagctttggtgatgccagacctaagagatgcaaatgaaacagaactttagaagaaacacaggcccagactgaatacgaaatcacggaagctattgacagaaactgtcttggtgaaggttgtttctttctctatacagagctcaccagagtaccacctgtcattttcaaaagcaaagtcagttttgccaaccagccgtgaatgacaaataaagctttatatgaaacacaa

SEQ ID NO: 10793 - protein, 30 aa, Homo sapiens
LFIGQWKKLTHNDVDAISKRPVEKRGSLPL

SEQ ID NO: 10794 - DNA, 1114 bp, Homo sapiens
agcttggattccacgctttccctccagaggaaagaagccctccatctaaatcagctgtcttctccacatccctcctttttctctccgccagacgccacccctaccccttctattgtgttgtgccttttcattttagccccgcttcctacgtagagccctaacctcctttgtagcgagggcacttgagaatttctgaacctcgagttgtaatggagctgtatggaaagatggcctctgcccaagatgccaggtacggccagaaagactcctctgatcagaactttgactacatgttcaaattactcatcatcggcaatagcagtgtggggaaaacatcttttctattccgttatgcagatgactcctttacatctgcattcgtcagcacagttgggatcgatttcaaagtaaaaactgtattcaaaaatgaaaagagaatcaagcttcagatttgggacacagcaggccaggaaagatacaggactatcaccacagcctattatcgtggagccatgggctttattttaatgtatgacattacaaatgaagaatccttcaatgcagtacaagattggtcaactcaaatcaaaacatactcttgggacaatgcccaagttattctggttgggaacaagtgtgacatggaagacgagcgggtcatctcaactgagcgaggtcaacatttaggagaacagcttgggtttgagttttttgaaacaagtgccaaggacaacattaatgtcaagcagacatttgagcgccttgtggatatcatctgcgacaaaatgtcagagagtttggagactgatcctgccatcactgctgcaaagcagaacacgagactcaaggaaactcctcctccaccgcagcccaactgtgcctgctagtgtccccgtgcacacaggcagctccagggggctctggttgccaacaaacagcatttgtaaatggtctattagccttcatttatactgcctaacaattatttgaaggaataaattgatgtcaatggctcgtacgcattcaattcttgggagctttcctgtttaatatgtggcaaatatgtgatcttaaatttataaggactatccatctataaacatctggtacctgc

SEQ ID NO: 10795 - protein, 225 aa, Homo sapiens
MELYGKMASAQDARYGQKDSSDQNFDYMFKLLIIGNSSVGKTSFLFRYADDSFTSAFVSTVGIDFKVKTVFKNEKRIKLQIWDTAGQERYRTITTAYYRGAMGFILMYDITNEESFNAVQDWSTQIKTYSWDNAQVILVGNKCDMEDERVISTERGQHLGEQLGFEFFETSAKDNINVKQTFERLVDIICDKMSESLETDPAITAAKQNTRLKETPPPPQPNCAC

SEQ ID NO: 10796 - DNA, 1485 bp, Homo sapiens
agcttggattccacgctttccctccagaggaaagaagccctccatctaaatcagctgtcttctccacatccctcctttttctctccgccagacgccacccctaccccttctattgtgttgtgccttttcattttagccccgcttcctacgtagagccctaacctcctttgtagcgagggcacttgagaatttctgaacctcgagttgtaatggagctgtatggaaagatggcctctgcccaagatgccaggtacggccagaaagactcctctgatcagaactttgactacatgttcaaattactcatcatcggcaatagcagtgtggggaaaacatcttttctattccgttatgcagatgactcctttacatctgcattcgtcagcacagttgggatcgatttcaaagtaaaaactgtattcaaaaatgaaaagagaatcaagcttcagatttgggacacagcaggccaggaaagatacaggactatcaccacagcctattatcgtggagccatgggctttattttaatgtatgacattacaaatgaagaatccttcaatgcagtacaagattggtcaactcaaatcaaaacatactcttgggacaatgcccaagttattctggttgggaacaagtgtgacatggaagacgagcgggtcatctcaactgagcgaggtcaacatttaggagaacagcttgggtttgagttttttgaaacaagtgccaaggacaacattaatgtcaagcagacatttgagcgccttgtggatatcatctgcgacaaaatgtcagagagtttggagactgatcctgccatcactgctgcaaagcagaacacgagactcaaggaaactcctcctccaccgcagcccaactgtgcctgctagtgtccccgtgcacacaggcagctccagggggctctggttgccaacaaacagcatttgtaaatggtctattagccttcatttatactgcctaacaattatttgaaggaataaattgatgtcaatggctcgtacgcattcaattcttgggagctttcctgtttaatatgtggcaaatatgtgatcttaaatttataaggactatccatctataaacatctggtacctgcatgtgacttgttatttatttgtctgctaggctctttttgtttcaaatttgttctcagactacttctgggacatcagactataatctcactacaactggcttttgtcccattgattcaaattatgctattcacttgtaggaatgatgaccaaggaattgcttgtgtgtgtgtgtgtgtgtgtgtgtgtgcacgcatgcccgcatgcgtgcagaggaagaagtcacaagacttcatttgctttactcttagttgaaaatcaaatggaagtttttctcatgattagggacgctgtcacgagtctggtcagtttactgttgggaactgtgtctttatttcactgttattaataactgagatcattggcctataaa

SEQ ID NO: 10797 - protein, 225 aa, Homo sapiens; identical to SEQ ID NO: 10795

SEQ ID NO: 10798 - DNA, 1065 bp, Homo sapiens
cgccaggagaggacagctccagtgctgatgttggagccggttagcgaaccccaagagtgcagagtgtggagcgtggagcgccgggactgtgcacgcttgaccggaagcccagaccagtgcggtcctagccagagagaaaggacatttgccaacaatgagacacgaagcgcccatgcagatggcctctgcccaagatgccaggtacggccagaaagactcctctgatcagaactttgactacatgttcaaattactcatcatcggcaatagcagtgtggggaaaacatcttttctattccgttatgcagatgactcctttacatctgcattcgtcagcacagttgggatcgatttcaaagtaaaaactgtattcaaaaatgaaaagagaatcaagcttcagatttgggacacagcaggccaggaaagatacaggactatcaccacagcctattatcgtggagccatgggctttattttaatgtatgacattacaaatgaagaatccttcaatgcagtacaagattggtcaactcaaatcaaaacatactcttgggacaatgcccaagttattctggttgggaacaagtgtgacatggaagacgagcgggtcatctcaactgagcgaggtcaacatttaggagaacagcttgggtttgagttttttgaaacaagtgccaaggacaacattaatgtcaagcagacatttgagcgccttgtggatatcatctgcgacaaaatgtcagagagtttggagactgatcctgccatcactgctgcaaagcagaacacgagactcaaggaaactcctcctccaccgcagcccaactgtgcctgctagtgtccccgtgcacacaggcagctccagggggctctggttgccaacaaacagcatttgtaaatggtctattagccttcatttatactgcctaacaattatttgaaggaataaattgatgtcaatggctcgtacgcattcaattcttgggagctttcctgtttaatatgtggcaaatatgtgatcttaaatttataaggactatccatctataaacatctggtacctgc

SEQ ID NO: 10799 - protein, 227 aa, Homo sapiens; identical to SEQ ID NO: 974

SEQ ID NO: 10800 - DNA, 1436 bp, Homo sapiens
cgccaggagaggacagctccagtgctgatgttggagccggttagcgaaccccaagagtgcagagtgtggagcgtggagcgccgggactgtgcacgcttgaccggaagcccagaccagtgcggtcctagccagagagaaaggacatttgccaacaatgagacacgaagcgcccatgcagatggcctctgcccaagatgccaggtacggccagaaagactcctctgatcagaactttgactacatgttcaaattactcatcatcggcaatagcagtgtggggaaaacatcttttctattccgttatgcagatgactcctttacatctgcattcgtcagcacagttgggatcgatttcaaagtaaaaactgtattcaaaaatgaaaagagaatcaagcttcagatttgggacacagcaggccaggaaagatacaggactatcaccacagcctattatcgtggagccatgggctttattttaatgtatgacattacaaatgaagaatccttcaatgcagtacaagattggtcaactcaaatcaaaacatactcttgggacaatgcccaagttattctggttgggaacaagtgtgacatggaagacgagcgggtcatctcaactgagcgaggtcaacatttaggagaacagcttgggtttgagttttttgaaacaagtgccaaggacaacattaatgtcaagcagacatttgagcgccttgtggatatcatctgcgacaaaatgtcagagagtttggagactgatcctgccatcactgctgcaaagcagaacacgagactcaaggaaactcctcctccaccgcagcccaactgtgcctgctagtgtccccgtgcacacaggcagctccagggggctctggttgccaacaaacagcatttgtaaatggtctattagccttcatttatactgcctaacaattatttgaaggaataaattgatgtcaatggctcgtacgcattcaattcttgggagctttcctgtttaatatgtggcaaatatgtgatcttaaatttataaggactatccatctataaacatctggtacctgcatgtgacttgttatttatttgtctgctaggctctttttgtttcaaatttgttctcagactacttctgggacatcagactataatctcactacaactggcttttgtcccattgattcaaattatgctattcacttgtaggaatgatgaccaaggaattgcttgtgtgtgtgtgtgtgtgtgtgtgtgtgcacgcatgcccgcatgcgtgcagaggaagaagtcacaagacttcatttgctttactcttagttgaaaatcaaatggaagtttttctcatgattagggacgctgtcacgagtctggtcagtttactgttgggaactgtgtctttatttcactgttattaataactgagatcattggcctataaa

SEQ ID NO: 10801 - protein, 227 aa, Homo sapiens; identical to SEQ ID NO: 974

SEQ ID NO: 10802 - DNA, 590 bp, Homo sapiens
gataccaacttttcagagtgctgagaggatttgatggcataatttgtgtaagatgcctagccccgtgcctgcatgatctatactttggctgacagtccgtgccttcaggcagcctcacaagaatatctgagaacagacagtattgcgttgcatccaggatttggtatggacaacttatcctgctccctggtgccaacacaatatttcacaacagacaataaaactaaaggacacagcaggccaggaaagatacaggactatcaccacagcctattatcgtggagccatgggctttattttaatgtatgacattacaaatgaagaatccttcaatgcagtacaagattgacagaatttacaatttaaaagaaaacagaggaagaaaagtagaaaaaaagctggcatgacacaaaacaaaacacagaagcttgtgggaaccatgataacttactgatttttctggctgcaagattgtatgaaacaaaaaatagcaatatataacacttccagtttccccccgaagcaggcatgaccaagctcgttgtggtccagattgtctaaccagttatgctttaaaaaaaaaaaacatt

SEQ ID NO: 10803 - protein, 78 aa, Homo sapiens
MIYTLADSPCLQAASQEYLRTDSIALHPGFGMDNLSCSLVPTQYFTTDNKTKGHSRPGKIQDYHHSLLSWSHGLYFNV

SEQ ID NO: 10804 - DNA, 476 bp, Homo sapiens
aaagctcattgactcttttcaagcatggtgatgaggtcgtgggaagaagagcaaagacggagtctcgctgtgttgtccaggatggagtgcagtggtgctttctcagctcactgcaacctctgcctcccagttcaagcaattcttctgactcagcctcctgagtagctgggattacaggcacctgctaccacaccatgctaatttttgtatttttagtagagacggggtttctccatgttggcctggctggtctcgaactcctgacctcaggtgatccacctgcctcggcctctcaaaatgctaggattacaggtgtgagccaccacacctggccaacttatcctttttttaacatctagttttctgtgagtgttttctaatgtgcactgtagacggacatagtggtatgtgattactattcatagataaataataatttgtttattattgtgtaataaacattgtgtgataaagaa

SEQ ID NO: 10805 - protein, 46 aa, Homo sapiens
MVMRSWEEEQRRSLAVLSRMECSGAFSAHCNLCLPVQAILLTQPPE

SEQ ID NO: 10806 - DNA, 641 bp, Homo sapiens
tggaatataaggagatttgacctgtgctgctgtgattaacagacatcagaggcatggtaccatgaggacagagacctcaactgtgtgttcatcattaagtctccagaattcagcaaaatatatggcacatagaaggaagaaaaacaacagtaactagatgaagcaaggaccacccttctggacaacaaagggagaggaatgaaagtctgacctaggaaaagacggagtctcgctgtgttgtccaggatggagtgcagtggtgctttctcagctcactgcaacctctgcctcccagttcaagcaattcttctgactcagcctcctgagtagctgggattacaggcacctgctaccacaccatgctaatttttgtatttttagtagagacggggtttctccatgttggcctggctggtctcgaactcctgacctcaggtgatccacctgcctcggcctctcaaaatgctaggattacaggtgtgagccaccacacctggccaacttatcctttttttaacatctagttttctgtgagtgttttctaatgtgcactgtagacggacatagtggtatgtgattactattcatagataaataataatttgtttattattgtgtaataaacattgtgtgataaagaa

SEQ ID NO: 10807 - protein, 31 aa, Homo sapiens
MRTETSTVCSSLSLQNSAKYMAHRRKKNNSN

SEQ ID NO: 10808 - DNA, 408 bp, Homo sapiens
ttaaaggagcagctgccaacttttcagaaacacgatcaccttccctcctcctgcaaacagtaggtaccattattttctccaatttactgatgaaatagaggcagaaaatggctccgtaatttgctcaagtatttcgttgctcagctagtaaatggcaaagctggaacatgaactactaacttgtacactctcctgcttctccagatacactgaaaaaaggcaggcggcactgttcgtgagatgcatgagctttgcactgtggtccagcacatctctgttgtaggcttcctcatgcctgatcctgaaagggtcactcctaccctttccaaaaaccactacaggtacagcgggacactaatcccttcaggttcacctgatgttagggaccaaataaaagcttggaaaggt

SEQ ID NO: 10809 - protein, 43 aa, Homo sapiens
MAKLEHELLTCTLSCFSRYTEKRQAALFVRCMSFALWSSTSLL

SEQ ID NO: 10810 - DNA, 985 bp, Homo sapiens
tttgtttctgcaaaactttcattgctttagaattttaaaatttcaccttgtacaatggccagcccctaaagcaggaaacatttataatggattatatggaaacatcctcccagtacttgcccagcccttgaatcatgtggcttttcagtgaaaggaaagattctttttctaggaaaaatgagcctattttattttattttattttattttttgacacaaactgtagattttagcagccctggcccaaaggaatttgattacttttgttttaaacagtacaaaggggacactataattacaaaaacatccttaactgatttgagttgtttttatttctttggatatattttcagagtggtaaattgtgtgtgagaattacaaatgattattcttttagtggtttcttagcctctcttacagcccacggggatagtactgtacatcaataccttcatatgaaatttttatatgcaatgaaaataaaagcatgggttgattctgcctatttatgactcaatcttttacaaataaaagattattcattttaaattatagttcaatcagcatgtctcttaggatactgaacgtggttgaaatgaaaggatagtgacatcataagttacttgagacatctggagaaactgaggaaaagtgagagagtaggcagggcctggagccgcagagccattgctaaccatcctgtgtgagatatcccccattctgtagctttattctcataaccctgctcaattttctttataacacttctcacagatttatatacgtgtttgtttttgttatctgtctctcccaccagaccacagctccatgagagcaaggtctttgcttaccaatatatcactagcacttaaaactatgcctggtacacagtaggttcttaatatgtgttgaatatagccatcaaattgatattggatataattcaatctgataagatattttgagatattaaagagtttttaac

SEQ ID NO: 10811 - protein, 64 aa, Homo sapiens
MSLFYFILFYFLTQTVDFSSPGPKEFDYFCFKQYKGDTIITKTSLTDLSCFYFFGYIFRVVNCV

SEQ ID NO: 10812 - DNA, 6615 bp, Homo sapiens
agttccttatttggtagcttttgacaggactagcctttcttgcaactaagcatcttgacatacattattcattaagccctggagctcgggagagaaagatgcagacccttagatctttagatattcctttatcacgtggattttctttattcagaatagttgctgaattttgtgccattctggagtcttacaaatggcatgtattcgatgggaagacggctggatgggatttaatgcgaggctttcttatgtatacttaattaccaaaaatctttaaaaactcatactctgcgtggcttgtggaggttgttaaagtgtcgagattttgaagctaaatacattttagagcttactatatatatacatatatatatatatacatataatcaatcaaaaatgcctgaagcaaactatttactgtcagtgtcttggggctacataaagtttaaaaggatgcttaatcgggagctcacccatctctctgaaatgagtcggtctggaaatcaagtgtcagagtttatatcaaacacattcttagataagcaacatgaagtggaaattccttctccaactcagaaggaaaaggagaaaaagaaaagaccaatgtctcagatcagtggagtcaagaaattgatgcacagctctagtctgactaattcaagtatcccaaggtttggagttaaaactgaacaagaagatgtccttgccaaggaactagaagatgtgaacaaatggggtcttcatgttttcagaatagcagagttgtctggtaaccggcccttgactgttatcatgcacaccatttttcaggaacgggatttattaaaaacatttaaaattccagtagatactttaattacatatcttatgactctcgaagaccattaccatgctgatgtggcctatcacaacaatatccatgctgcagatgttgtccagtctactcatgtgctattatctacacctgctttggaggctgtgtttacagatttggagattcttgcagcaatttttgccagtgcaatacatgatgtagatcatcctggtgtgtccaatcaatttctgatcaatacaaactctgaacttgccttgatgtacaatgattcctcagtcttagagaaccatcatttggctgtgggctttaaattgcttcaggaagaaaactgtgacattttccagaatttgaccaaaaaacaaagacaatctttaaggaaaatggtcattgacatcgtacttgcaacagatatgtcaaaacacatgaatctactggctgatttgaagactatggttgaaactaagaaagtgacaagctctggagttcttcttcttgataattattccgataggattcaggttcttcagaatatggtgcactgtgcagatctgagcaacccaacaaagcctctccagctgtaccgccagtggacggaccggataatggaggagttcttccgccaaggagaccgagagagggaacgtggcatggagataagccccatgtgtgacaagcacaatgcttccgtggaaaaatcacaggtgggcttcatagactatattgttcatcccctctgggagacatgggcagacctcgtccaccctgacgcccaggatattttggacactttggaggacaatcgtgaatggtaccagagcacaatccctcagagcccctctcctgcacctgatgacccagaggagggccggcagggtcaaactgagaaattccagtttgaactaactttagaggaagatggtgagtcagacacggaaaaggacagtggcagtcaagtggaagaagacactagctgcagtgactccaagactctttgtactcaagactcagagtctactgaaattccccttgatgaacaggttgaagaggaggcagtaggggaagaagaggaaagccagcctgaagcctgtgtcatagatgatcgttctcctgacacgtaacagtgcaaaaactttcatgccttttttttttttaagtagaaaaattgtttccaaagtgcatgtcacatgccacaaccacggtcacacctcactgtcatctgccaggacgtttgttgaacaaaactgaccttgactactcagtccagcgctcaggaatatcgtaaccagttttttcacctccatgtcatccgagcaaggtggacatcttcacgaacagcgtttttaacaagatttcagcttggtagagctgacaaagcagataaaatctactccaaattattttcaagagagtgtgactcatcaggcagcccaaaagtttattggacttggggtttctattcctttttatttgtttgcaatattttcagaagaaaggcattgcacagagtgaacttaatggacgaagcaacaaatatgtcaagaacaggacatagcacgaatctgttaccagtaggaggaggatgagccacagaaattgcataattttctaatttcaagtcttcctgatacatgactgaatagtgtggttcagtgagctgcactgacctctacattttgtatgatatgtaaaacagattttttgtagagcttacttttattattaaatgtattgaggtattatatttaaaaaaaactatgttcagaacttcatctgccactggttatttttttctaaggagtaacttgcaagttttcagtacaaatctgtgctacactggataaaaatctaatttatgaattttacttgcaccttatagttcatagcaattaactgatttgtagtgattcattgtttgttttatataccaatgacttccatattttaaaagagaaaaacaactttatgttgcaggaaaccctttttgtaagtctttattatttactttgcattttgtttcactctttccagataagcagagttgctcttcaccagtgtttttcttcatgtgcaaagtgactatttgttctataatacttttatgtgtgttatatcaaatgtgtcttaagcttcatgcaaactcagtcatcagttcgtgttgtctgaagcaagtgggagatatataaatacccagtagctaaaatggtcagtcttttttagatgttttcctacttagtatctcctaataacgttttgctgtgtcactagatgttcatttcacaagtgcatgtctttctaataatccacacatttcatgctctaataatccacacatttcatgctcatttttattgtttttacagccagttatagtaagaaaaaggtttttccccttgtgctgctttataatttagcgtgtgtctgaaccttatccatgtttgctagatgaggtcttgtcaaatatatcactaccattgtcaccggtgaaaagaaacaggtagttaagttagggttaacattcatttcaaccacgaggttgtatatcatgactagcttttactcttggtttacagagaaaagttaaacagccaactaggcagtttttaagaatattaacaatatattaacaaacaccaatacaactaatcctatttggttttaatgatttcaccatgggattaagaactatatcaggaacatccctgagaaacggttttaagtgtagcaactactcttccttaatggacagccacataacgtgtaggaagtcctttatcacttatcctcgatccataagcatatcttgcagaggggaactacttctttaaacacatggagggaaagaagatgatgccactggcaccagagggttagtactgtgatgcatcctaaaatatttattatattggtaaaaattctggttaaataaaaaattagagatcactcttggctgatttcagcaccaggaactgtattacagttttagagattaattcctagtgtttacctgattatagcagttggcatcatggggcatttaattctgactttatccccacgtcagccttaataaagtcttctttaccttctctatgaagactttaaagcccaaataatcatttttcacattgatattcaagaattgagatagatagaagccaaagtgggtatctgacaagtggaaaatcaaacgtttaagaagaattacaactctgaaaagcatttatatgtggaacttctcaaggagcctcctggggactggaaagtaagtcatcagccaggcaaatgactcatgctgaagagagtccccatttcagtcccctgagatctagctgatgcttagatcctttgaaataaaaattatgtctttataactctgatcttttacataaagcagaagaggaatcaactagttaattgcaaggtttctactctgtttcctctgtaaagatcagatggtaatctttcaaataagaaaaaaataaagacgtatgtttgaccaagtagtttcacaagaatatttgggaacttgtttcttttaattttatttgtccctgagtgaagtctagaaagaaaggtaaagagtctagagtttattcctctttccaaaacattctcattcctctcctccctacacttagtatttcccccacagagtgcctagaatcttaataatgaataaaataaaaagcagcaatatgtcattaacaaatccagacctgaaagggtaaagggtttataactgcactaataaagagaggctctttttttttcttccagtttgttggtttttaatggtaccgtgttgtaaagatacccactaatggacaatcaaattgcagaaaaggctcaatatccaagagacagggactaatgcactgtacaatctgcttatccttgcccttctctcttgccaaagtgtgcttcagaaatatatactgctttaaaaaagaataaaagaatatccttttacaagtggctttacatttcctaaaatgccataagaaaatgcaatatctgggtactgtatggggaaaaaaatgtccaagtttgtgtaaaaccagtgcatttcagcttgcaagttactgaacacaataatgctgttttaattttgttttatatcagttaaaattcacaataatgtagatagaacaaattacagacaaggaaagaaaaaacttgaatgaaatggattttacagaaagctttatgataatttttgaatgcattatttattttttgtgccatgcattttttttctcaccaaatgaccttacctgtaatacagtcttgtttgtctgtttacaaccatgtatttattgcaatgtacatactgtaatgttaattgtaaattatctgttcttattaaaacatcatcccatgatgggatggtgttgatatatttggaaactcttggtgagagaatgaatggtgtgtatacatactctgtacatttttcttttctcctgtaatatagtcttgtcaccttagagcttgtttatggaagattcaagaaaactataaaatacttaaagatatataaatttaaaaaaacatagctgcaggtctttggtcccagggctgtgccttaactttaaccaatattttcttctgttttgctgcatttgaaaggtaacagtggagctagggctgggcattttacatccaggcttttaattgattagaattctgccaataggtggattttacaaaaccacagacaacctctgaaagattctgagacccttttgagacagaagctcttaagtacttcttgccagggagcagcactgcatgtgtgatggttgtttgccatctgttgatcaggaactacttcagctacttgcatttgattatttcctttttttttttttttaactcggaaacacaactggggaaatatattctttcccagtgattataaacaatctttttcttttttttaagtccttttggcttctagagctcataggaaaatggacttgatttgaaattggagccagagtttactcgtgttggttatctattcatcagcttcctgacatgttaagagaatacattaaagagaaaatactgttttttaatcctaaaatttttcttccactaagataaaccaaatgtccttacatatatgtaaacccatctatttaaacgcaaaggtgggttgatgtcagtttacatagcagaaagcattcactatcctctaagatttgtttctgcaaaactttcattgctttagaattttaaaatttcaccttgtacaatggccagcccctaaagcaggaaacatttataatggattatatggaaacatcctcccagtacttgcccagcccttgaatcatgtggcttttcagtgaaaggaaagattctttttctaggaaaaatgagcctattttattttattttattttattttttgacacaaactgtagattttagcagccctggcccaaaggaatttgattacttttgttttaaacagtacaaaggggacactataattacaaaaacatccttaactgatttgagttgtttttatttctttggatatattttcagagtggtaaattgtgtgtgagaattacaaatgattattcttttagtggtttcttagcctctcttacagcccacggggatagtactgtacatcaataccttcatatgaaatttttatatgcaatgaaaataaaagcatgggttgattctgcctatttatgactcaatcttttacaaataaaagattattcattttaaattatagttcaatcagcatgtctctt

SEQ ID NO: 10813 - protein, 518 aa, Homo sapiens
MPEANYLLSVSWGYIKFKRMLNRELTHLSEMSRSGNQVSEFISNTFLDKQHEVEIPSPTQKEKEKKKRPMSQISGVKKLMHSSSLTNSSIPRFGVKTEQEDVLAKELEDVNKWGLHVFRIAELSGNRPLTVIMHTIFQERDLLKTFKIPVDTLITYLMTLEDHYHADVAYHNNIHAADVVQSTHVLLSTPALEAVFTDLEILAAIFASAIHDVDHPGVSNQFLINTNSELALMYNDSSVLENHHLAVGFKLLQEENCDIFQNLTKKQRQSLRKMVIDIVLATDMSKHMNLLADLKTMVETKKVTSSGVLLLDNYSDRIQVLQNMVHCADLSNPTKPLQLYRQWTDRIMEEFFRQGDRERERGMEISPMCDKHNASVEKSQVGFIDYIVHPLWETWADLVHPDAQDILDTLEDNREWYQSTIPQSPSPAPDDPEEGRQGQTEKFQFELTLEEDGESDTEKDSGSQVEEDTSCSDSKTLCTQDSESTEIPLDEQVEEEAVGEEEESQPEACVIDDRSPDT

SEQ ID NO: 10814 - DNA, 7065 bp, Homo sapiens
ggggggatggcactgcgaggtggcggggcccccggggcagagctcgaggggaaggacgcggcgggtggcacggacagggacaggcttttgcaattcggaatcttttcgtaagggggttgaggaggagccaggcagcgccgagggccgagaggggcgtgagggggagtgttcccggaaagctgcggcgttggagccgcgctgcgcctgccgcccgaggagttgagaaagaaaacaggaaacgtggtggccgcgcacccggccgcggctgattcattcacttcaagtgccgtgcagaaggctcggcaggcggggcgggcgtggggccgcggctccgggttggggaccgaggagatccggctgtggaccagacgctcctctgcggggcgggcacccaagcgcgctcgccaccccctcgccatccgctagagccgggctcctggactgggactcgggcccgccgcacagttgaaaagtcgcatagtggtttttccgctcgcgtcgctgtgtgaaagttggctcgccgctctttgcacgccctccctggaggccgacccgagacgccaagctggagagaccgtgcctccccgaggccggccgccccgcgagcacagcctccgcccccgttgcactgccgggctgggcaatatgaaggagcagccctcatgtgccggcaccgggcatccgagcatggcggggtatggcaggatggccccctttgaactcgctagcggacccgtgaagcgcttgagaactgagtccccctttccctgtctcttcgcagaggaggcctaccagaaactggccagcgagaccctggaggagctggactggtgtctggaccagctagagaccctacagaccaggcactccgtcagtgagatggcctccaacaagtttaaaaggatgcttaatcgggagctcacccatctctctgaaatgagtcggtctggaaatcaagtgtcagagtttatatcaaacacattcttagataagcaacatgaagtggaaattccttctccaactcagaaggaaaaggagaaaaagaaaagaccaatgtctcagatcagtggagtcaagaaattgatgcacagctctagtctgactaattcaagtatcccaaggtttggagttaaaactgaacaagaagatgtccttgccaaggaactagaagatgtgaacaaatggggtcttcatgttttcagaatagcagagttgtctggtaaccggcccttgactgttatcatgcacaccatttttcaggaacgggatttattaaaaacatttaaaattccagtagatactttaattacatatcttatgactctcgaagaccattaccatgctgatgtggcctatcacaacaatatccatgctgcagatgttgtccagtctactcatgtgctattatctacacctgctttggaggctgtgtttacagatttggagattcttgcagcaatttttgccagtgcaatacatgatgtagatcatcctggtgtgtccaatcaatttctgatcaatacaaactctgaacttgccttgatgtacaatgattcctcagtcttagagaaccatcatttggctgtgggctttaaattgcttcaggaagaaaactgtgacattttccagaatttgaccaaaaaacaaagacaatctttaaggaaaatggtcattgacatcgtacttgcaacagatatgtcaaaacacatgaatctactggctgatttgaagactatggttgaaactaagaaagtgacaagctctggagttcttcttcttgataattattccgataggattcaggttcttcagaatatggtgcactgtgcagatctgagcaacccaacaaagcctctccagctgtaccgccagtggacggaccggataatggaggagttcttccgccaaggagaccgagagagggaacgtggcatggagataagccccatgtgtgacaagcacaatgcttccgtggaaaaatcacaggtgggcttcatagactatattgttcatcccctctgggagacatgggcagacctcgtccaccctgacgcccaggatattttggacactttggaggacaatcgtgaatggtaccagagcacaatccctcagagcccctctcctgcacctgatgacccagaggagggccggcagggtcaaactgagaaattccagtttgaactaactttagaggaagatggtgagtcagacacggaaaaggacagtggcagtcaagtggaagaagacactagctgcagtgactccaagactctttgtactcaagactcagagtctactgaaattccccttgatgaacaggttgaagaggaggcagtaggggaagaagaggaaagccagcctgaagcctgtgtcatagatgatcgttctcctgacacgtaacagtgcaaaaactttcatgccttttttttttttaagtagaaaaattgtttccaaagtgcatgtcacatgccacaaccacggtcacacctcactgtcatctgccaggacgtttgttgaacaaaactgaccttgactactcagtccagcgctcaggaatatcgtaaccagttttttcacctccatgtcatccgagcaaggtggacatcttcacgaacagcgtttttaacaagatttcagcttggtagagctgacaaagcagataaaatctactccaaattattttcaagagagtgtgactcatcaggcagcccaaaagtttattggacttggggtttctattcctttttatttgtttgcaatattttcagaagaaaggcattgcacagagtgaacttaatggacgaagcaacaaatatgtcaagaacaggacatagcacgaatctgttaccagtaggaggaggatgagccacagaaattgcataattttctaatttcaagtcttcctgatacatgactgaatagtgtggttcagtgagctgcactgacctctacattttgtatgatatgtaaaacagattttttgtagagcttacttttattattaaatgtattgaggtattatatttaaaaaaaactatgttcagaacttcatctgccactggttatttttttctaaggagtaacttgcaagttttcagtacaaatctgtgctacactggataaaaatctaatttatgaattttacttgcaccttatagttcatagcaattaactgatttgtagtgattcattgtttgttttatataccaatgacttccatattttaaaagagaaaaacaactttatgttgcaggaaaccctttttgtaagtctttattatttactttgcattttgtttcactctttccagataagcagagttgctcttcaccagtgtttttcttcatgtgcaaagtgactatttgttctataatacttttatgtgtgttatatcaaatgtgtcttaagcttcatgcaaactcagtcatcagttcgtgttgtctgaagcaagtgggagatatataaatacccagtagctaaaatggtcagtcttttttagatgttttcctacttagtatctcctaataacgttttgctgtgtcactagatgttcatttcacaagtgcatgtctttctaataatccacacatttcatgctctaataatccacacatttcatgctcatttttattgtttttacagccagttatagtaagaaaaaggtttttccccttgtgctgctttataatttagcgtgtgtctgaaccttatccatgtttgctagatgaggtcttgtcaaatatatcactaccattgtcaccggtgaaaagaaacaggtagttaagttagggttaacattcatttcaaccacgaggttgtatatcatgactagcttttactcttggtttacagagaaaagttaaacagccaactaggcagtttttaagaatattaacaatatattaacaaacaccaatacaactaatcctatttggttttaatgatttcaccatgggattaagaactatatcaggaacatccctgagaaacggttttaagtgtagcaactactcttccttaatggacagccacataacgtgtaggaagtcctttatcacttatcctcgatccataagcatatcttgcagaggggaactacttctttaaacacatggagggaaagaagatgatgccactggcaccagagggttagtactgtgatgcatcctaaaatatttattatattggtaaaaattctggttaaataaaaaattagagatcactcttggctgatttcagcaccaggaactgtattacagttttagagattaattcctagtgtttacctgattatagcagttggcatcatggggcatttaattctgactttatccccacgtcagccttaataaagtcttctttaccttctctatgaagactttaaagcccaaataatcatttttcacattgatattcaagaattgagatagatagaagccaaagtgggtatctgacaagtggaaaatcaaacgtttaagaagaattacaactctgaaaagcatttatatgtggaacttctcaaggagcctcctggggactggaaagtaagtcatcagccaggcaaatgactcatgctgaagagagtccccatttcagtcccctgagatctagctgatgcttagatcctttgaaataaaaattatgtctttataactctgatcttttacataaagcagaagaggaatcaactagttaattgcaaggtttctactctgtttcctctgtaaagatcagatggtaatctttcaaataagaaaaaaataaagacgtatgtttgaccaagtagtttcacaagaatatttgggaacttgtttcttttaattttatttgtccctgagtgaagtctagaaagaaaggtaaagagtctagagtttattcctctttccaaaacattctcattcctctcctccctacacttagtatttcccccacagagtgcctagaatcttaataatgaataaaataaaaagcagcaatatgtcattaacaaatccagacctgaaagggtaaagggtttataactgcactaataaagagaggctctttttttttcttccagtttgttggtttttaatggtaccgtgttgtaaagatacccactaatggacaatcaaattgcagaaaaggctcaatatccaagagacagggactaatgcactgtacaatctgcttatccttgcccttctctcttgccaaagtgtgcttcagaaatatatactgctttaaaaaagaataaaagaatatccttttacaagtggctttacatttcctaaaatgccataagaaaatgcaatatctgggtactgtatggggaaaaaaatgtccaagtttgtgtaaaaccagtgcatttcagcttgcaagttactgaacacaataatgctgttttaattttgttttatatcagttaaaattcacaataatgtagatagaacaaattacagacaaggaaagaaaaaacttgaatgaaatggattttacagaaagctttatgataatttttgaatgcattatttattttttgtgccatgcattttttttctcaccaaatgaccttacctgtaatacagtcttgtttgtctgtttacaaccatgtatttattgcaatgtacatactgtaatgttaattgtaaattatctgttcttattaaaacatcatcccatgatgggatggtgttgatatatttggaaactcttggtgagagaatgaatggtgtgtatacatactctgtacatttttcttttctcctgtaatatagtcttgtcaccttagagcttgtttatggaagattcaagaaaactataaaatacttaaagatatataaatttaaaaaaacatagctgcaggtctttggtcccagggctgtgccttaactttaaccaatattttcttctgttttgctgcatttgaaaggtaacagtggagctagggctgggcattttacatccaggcttttaattgattagaattctgccaataggtggattttacaaaaccacagacaacctctgaaagattctgagacccttttgagacagaagctcttaagtacttcttgccagggagcagcactgcatgtgtgatggttgtttgccatctgttgatcaggaactacttcagctacttgcatttgattatttcctttttttttttttttaactcggaaacacaactggggaaatatattctttcccagtgattataaacaatctttttcttttttttaagtccttttggcttctagagctcataggaaaatggacttgatttgaaattggagccagagtttactcgtgttggttatctattcatcagcttcctgacatgttaagagaatacattaaagagaaaatactgttttttaatcctaaaatttttcttccactaagataaaccaaatgtccttacatatatgtaaacccatctatttaaacgcaaaggtgggttgatgtcagtttacatagcagaaagcattcactatcctctaagatttgtttctgcaaaactttcattgctttagaattttaaaatttcaccttgtacaatggccagcccctaaagcaggaaacatttataatggattatatggaaacatcctcccagtacttgcccagcccttgaatcatgtggcttttcagtgaaaggaaagattctttttctaggaaaaatgagcctattttattttattttattttattttttgacacaaactgtagattttagcagccctggcccaaaggaatttgattacttttgttttaaacagtacaaaggggacactataattacaaaaacatccttaactgatttgagttgtttttatttctttggatatattttcagagtggtaaattgtgtgtgagaattacaaatgattattcttttagtggtttcttagcctctcttacagcccacggggatagtactgtacatcaataccttcatatgaaatttttatatgcaatgaaaataaaagcatgggttgattctgcctatttatgactcaatcttttacaaataaaagattattcattttaaattatagttcaatcagcatgtctctt

SEQ ID NO: 10815 - protein, 585 aa, Homo sapiens
MKEQPSCAGTGHPSMAGYGRMAPFELASGPVKRLRTESPFPCLFAEEAYQKLASETLEELDWCLDQLETLQTRHSVSEMASNKFKRMLNRELTHLSEMSRSGNQVSEFISNTFLDKQHEVEIPSPTQKEKEKKKRPMSQISGVKKLMHSSSLTNSSIPRFGVKTEQEDVLAKELEDVNKWGLHVFRIAELSGNRPLTVIMHTIFQERDLLKTFKIPVDTLITYLMTLEDHYHADVAYHNNIHAADVVQSTHVLLSTPALEAVFTDLEILAAIFASAIHDVDHPGVSNQFLINTNSELALMYNDSSVLENHHLAVGFKLLQEENCDIFQNLTKKQRQSLRKMVIDIVLATDMSKHMNLLADLKTMVETKKVTSSGVLLLDNYSDRIQVLQNMVHCADLSNPTKPLQLYRQWTDRIMEEFFRQGDRERERGMEISPMCDKHNASVEKSQVGFIDYIVHPLWETWADLVHPDAQDILDTLEDNREWYQSTIPQSPSPAPDDPEEGRQGQTEKFQFELTLEEDGESDTEKDSGSQVEEDTSCSDSKTLCTQDSESTEIPLDEQVEEEAVGEEEESQPEACVIDDRSPDT

SEQ ID NO: 10816 - DNA, 6979 bp, Homo sapiens
ggggggatggcactgcgaggtggcggggcccccggggcagagctcgaggggaaggacgcggcgggtggcacggacagggacaggcttttgcaattcggaatcttttcgtaagggggttgaggaggagccaggcagcgccgagggccgagaggggcgtgagggggagtgttcccggaaagctgcggcgttggagccgcgctgcgcctgccgcccgaggagttgagaaagaaaacaggaaacgtggtggccgcgcacccggccgcggctgattcattcacttcaagtgccgtgcagaaggctcggcaggcggggcgggcgtggggccgcggctccgggttggggaccgaggagatccggctgtggaccagacgctcctctgcggggcgggcacccaagcgcgctcgccaccccctcgccatccgctagagccgggctcctggactgggactcgggcccgccgcacagttgaaaagtcgcatagtggtttttccgctcgcgtcgctgtgtgaaagttggctcgccgctctttgcacgccctccctggaggccgacccgagacgccaagctggagagaccgtgcctccccgaggccggccgccccgcgagcacagcctccgcccccgttgcactgccgggctgggcaatatgaaggagcagccctcatgtgccggcaccgggcatccgagcatggcgggaggaggcctaccagaaactggccagcgagaccctggaggagctggactggtgtctggaccagctagagaccctacagaccaggcactccgtcagtgagatggcctccaacaagtttaaaaggatgcttaatcgggagctcacccatctctctgaaatgagtcggtctggaaatcaagtgtcagagtttatatcaaacacattcttagataagcaacatgaagtggaaattccttctccaactcagaaggaaaaggagaaaaagaaaagaccaatgtctcagatcagtggagtcaagaaattgatgcacagctctagtctgactaattcaagtatcccaaggtttggagttaaaactgaacaagaagatgtccttgccaaggaactagaagatgtgaacaaatggggtcttcatgttttcagaatagcagagttgtctggtaaccggcccttgactgttatcatgcacaccatttttcaggaacgggatttattaaaaacatttaaaattccagtagatactttaattacatatcttatgactctcgaagaccattaccatgctgatgtggcctatcacaacaatatccatgctgcagatgttgtccagtctactcatgtgctattatctacacctgctttggaggctgtgtttacagatttggagattcttgcagcaatttttgccagtgcaatacatgatgtagatcatcctggtgtgtccaatcaatttctgatcaatacaaactctgaacttgccttgatgtacaatgattcctcagtcttagagaaccatcatttggctgtgggctttaaattgcttcaggaagaaaactgtgacattttccagaatttgaccaaaaaacaaagacaatctttaaggaaaatggtcattgacatcgtacttgcaacagatatgtcaaaacacatgaatctactggctgatttgaagactatggttgaaactaagaaagtgacaagctctggagttcttcttcttgataattattccgataggattcaggttcttcagaatatggtgcactgtgcagatctgagcaacccaacaaagcctctccagctgtaccgccagtggacggaccggataatggaggagttcttccgccaaggagaccgagagagggaacgtggcatggagataagccccatgtgtgacaagcacaatgcttccgtggaaaaatcacaggtgggcttcatagactatattgttcatcccctctgggagacatgggcagacctcgtccaccctgacgcccaggatattttggacactttggaggacaatcgtgaatggtaccagagcacaatccctcagagcccctctcctgcacctgatgacccagaggagggccggcagggtcaaactgagaaattccagtttgaactaactttagaggaagatggtgagtcagacacggaaaaggacagtggcagtcaagtggaagaagacactagctgcagtgactccaagactctttgtactcaagactcagagtctactgaaattccccttgatgaacaggttgaagaggaggcagtaggggaagaagaggaaagccagcctgaagcctgtgtcatagatgatcgttctcctgacacgtaacagtgcaaaaactttcatgccttttttttttttaagtagaaaaattgtttccaaagtgcatgtcacatgccacaaccacggtcacacctcactgtcatctgccaggacgtttgttgaacaaaactgaccttgactactcagtccagcgctcaggaatatcgtaaccagttttttcacctccatgtcatccgagcaaggtggacatcttcacgaacagcgtttttaacaagatttcagcttggtagagctgacaaagcagataaaatctactccaaattattttcaagagagtgtgactcatcaggcagcccaaaagtttattggacttggggtttctattcctttttatttgtttgcaatattttcagaagaaaggcattgcacagagtgaacttaatggacgaagcaacaaatatgtcaagaacaggacatagcacgaatctgttaccagtaggaggaggatgagccacagaaattgcataattttctaatttcaagtcttcctgatacatgactgaatagtgtggttcagtgagctgcactgacctctacattttgtatgatatgtaaaacagattttttgtagagcttacttttattattaaatgtattgaggtattatatttaaaaaaaactatgttcagaacttcatctgccactggttatttttttctaaggagtaacttgcaagttttcagtacaaatctgtgctacactggataaaaatctaatttatgaattttacttgcaccttatagttcatagcaattaactgatttgtagtgattcattgtttgttttatataccaatgacttccatattttaaaagagaaaaacaactttatgttgcaggaaaccctttttgtaagtctttattatttactttgcattttgtttcactctttccagataagcagagttgctcttcaccagtgtttttcttcatgtgcaaagtgactatttgttctataatacttttatgtgtgttatatcaaatgtgtcttaagcttcatgcaaactcagtcatcagttcgtgttgtctgaagcaagtgggagatatataaatacccagtagctaaaatggtcagtcttttttagatgttttcctacttagtatctcctaataacgttttgctgtgtcactagatgttcatttcacaagtgcatgtctttctaataatccacacatttcatgctctaataatccacacatttcatgctcatttttattgtttttacagccagttatagtaagaaaaaggtttttccccttgtgctgctttataatttagcgtgtgtctgaaccttatccatgtttgctagatgaggtcttgtcaaatatatcactaccattgtcaccggtgaaaagaaacaggtagttaagttagggttaacattcatttcaaccacgaggttgtatatcatgactagcttttactcttggtttacagagaaaagttaaacagccaactaggcagtttttaagaatattaacaatatattaacaaacaccaatacaactaatcctatttggttttaatgatttcaccatgggattaagaactatatcaggaacatccctgagaaacggttttaagtgtagcaactactcttccttaatggacagccacataacgtgtaggaagtcctttatcacttatcctcgatccataagcatatcttgcagaggggaactacttctttaaacacatggagggaaagaagatgatgccactggcaccagagggttagtactgtgatgcatcctaaaatatttattatattggtaaaaattctggttaaataaaaaattagagatcactcttggctgatttcagcaccaggaactgtattacagttttagagattaattcctagtgtttacctgattatagcagttggcatcatggggcatttaattctgactttatccccacgtcagccttaataaagtcttctttaccttctctatgaagactttaaagcccaaataatcatttttcacattgatattcaagaattgagatagatagaagccaaagtgggtatctgacaagtggaaaatcaaacgtttaagaagaattacaactctgaaaagcatttatatgtggaacttctcaaggagcctcctggggactggaaagtaagtcatcagccaggcaaatgactcatgctgaagagagtccccatttcagtcccctgagatctagctgatgcttagatcctttgaaataaaaattatgtctttataactctgatcttttacataaagcagaagaggaatcaactagttaattgcaaggtttctactctgtttcctctgtaaagatcagatggtaatctttcaaataagaaaaaaataaagacgtatgtttgaccaagtagtttcacaagaatatttgggaacttgtttcttttaattttatttgtccctgagtgaagtctagaaagaaaggtaaagagtctagagtttattcctctttccaaaacattctcattcctctcctccctacacttagtatttcccccacagagtgcctagaatcttaataatgaataaaataaaaagcagcaatatgtcattaacaaatccagacctgaaagggtaaagggtttataactgcactaataaagagaggctctttttttttcttccagtttgttggtttttaatggtaccgtgttgtaaagatacccactaatggacaatcaaattgcagaaaaggctcaatatccaagagacagggactaatgcactgtacaatctgcttatccttgcccttctctcttgccaaagtgtgcttcagaaatatatactgctttaaaaaagaataaaagaatatccttttacaagtggctttacatttcctaaaatgccataagaaaatgcaatatctgggtactgtatggggaaaaaaatgtccaagtttgtgtaaaaccagtgcatttcagcttgcaagttactgaacacaataatgctgttttaattttgttttatatcagttaaaattcacaataatgtagatagaacaaattacagacaaggaaagaaaaaacttgaatgaaatggattttacagaaagctttatgataatttttgaatgcattatttattttttgtgccatgcattttttttctcaccaaatgaccttacctgtaatacagtcttgtttgtctgtttacaaccatgtatttattgcaatgtacatactgtaatgttaattgtaaattatctgttcttattaaaacatcatcccatgatgggatggtgttgatatatttggaaactcttggtgagagaatgaatggtgtgtatacatactctgtacatttttcttttctcctgtaatatagtcttgtcaccttagagcttgtttatggaagattcaagaaaactataaaatacttaaagatatataaatttaaaaaaacatagctgcaggtctttggtcccagggctgtgccttaactttaaccaatattttcttctgttttgctgcatttgaaaggtaacagtggagctagggctgggcattttacatccaggcttttaattgattagaattctgccaataggtggattttacaaaaccacagacaacctctgaaagattctgagacccttttgagacagaagctcttaagtacttcttgccagggagcagcactgcatgtgtgatggttgtttgccatctgttgatcaggaactacttcagctacttgcatttgattatttcctttttttttttttttaactcggaaacacaactggggaaatatattctttcccagtgattataaacaatctttttcttttttttaagtccttttggcttctagagctcataggaaaatggacttgatttgaaattggagccagagtttactcgtgttggttatctattcatcagcttcctgacatgttaagagaatacattaaagagaaaatactgttttttaatcctaaaatttttcttccactaagataaaccaaatgtccttacatatatgtaaacccatctatttaaacgcaaaggtgggttgatgtcagtttacatagcagaaagcattcactatcctctaagatttgtttctgcaaaactttcattgctttagaattttaaaatttcaccttgtacaatggccagcccctaaagcaggaaacatttataatggattatatggaaacatcctcccagtacttgcccagcccttgaatcatgtggcttttcagtgaaaggaaagattctttttctaggaaaaatgagcctattttattttattttattttattttttgacacaaactgtagattttagcagccctggcccaaaggaatttgattacttttgttttaaacagtacaaaggggacactataattacaaaaacatccttaactgatttgagttgtttttatttctttggatatattttcagagtggtaaattgtgtgtgagaattacaaatgattattcttttagtggtttcttagcctctcttacagcccacggggatagtactgtacatcaataccttcatatgaaatttttatatgcaatgaaaataaaagcatgggttgattctgcctatttatgactcaatcttttacaaataaaagattattcattttaaattatagttcaatcagcatgtctctt

SEQ ID NO: 10817 - protein, 507 aa, Homo sapiens
MASNKFKRMLNRELTHLSEMSRSGNQVSEFISNTFLDKQHEVEIPSPTQKEKEKKKRPMSQISGVKKLMHSSSLTNSSIPRFGVKTEQEDVLAKELEDVNKWGLHVFRIAELSGNRPLTVIMHTIFQERDLLKTFKIPVDTLITYLMTLEDHYHADVAYHNNIHAADVVQSTHVLLSTPALEAVFTDLEILAAIFASAIHDVDHPGVSNQFLINTNSELALMYNDSSVLENHHLAVGFKLLQEENCDIFQNLTKKQRQSLRKMVIDIVLATDMSKHMNLLADLKTMVETKKVTSSGVLLLDNYSDRIQVLQNMVHCADLSNPTKPLQLYRQWTDRIMEEFFRQGDRERERGMEISPMCDKHNASVEKSQVGFIDYIVHPLWETWADLVHPDAQDILDTLEDNREWYQSTIPQSPSPAPDDPEEGRQGQTEKFQFELTLEEDGESDTEKDSGSQVEEDTSCSDSKTLCTQDSESTEIPLDEQVEEEAVGEEEESQPEACVIDDRSPDT

SEQ ID NO: 10818 - DNA, 7419 bp, Homo sapiens
ttctcactgccctgcggtgttttgaactgccttcttacagacgtcatacagcccttgaggaatagtttctgcctggtgagattgaatgatagttctcattcacaaaaccctggattctaagcagggacacacagaaattactttcgcaggtaaatcagcccacccagccaaagtgtggagagatttgttccttggctgacttctttgctccacggagaggagtgttttcctgtgcttgccctgaaatggaacttccttgacagctctcccgtgttacagtacctcccggtcattttctttttctctctctctacctgcgctcttcgagtgtcagaaacctttaaagctgttactatggaattgcaaaaaagagatcaagtgactctttcactatgctggtttcccttgtgacccagatgaagaatcaattcagaattcagttcctcccttggcattgcaagacacagaagaaactgtcacttcctaacagcctagtactggagtaaattcagtatgaaggaagaaagcgctcctgcgtgttagaaccttgcccatgagctggaccgaggacaggagatggactccaggaaaattggatttcttcaagcagcctcccttggaaatggaatatctttaaaatcttctttgcagaaagacagttagaatgtattaatcagaatagttgaagacttattttcctttttattttttttcaaaatgagcattattatgaagccaagatcccgatctacaagttccctaaggactgcagaggcagtttgttttgatgtggacaatggcacatctgcgggacggagtcccttggatcccatgaccagcccaggatccgggctaattctccaagcaaattttgtccacagtcaacgacgggagtccttcctgtatcgatccgacagcgattatgacctctctccaaagtctatgtcccggaactcctccattgccagtgatatacacggagatgacttgattgtgactccatttgctcaggtcttggccagtctgcgaactgtacgaaacaactttgctgcattaactaatttgcaagatcgagcacctagcaaaagatcacccatgtgcaaccaaccatccatcaacaaagccaccataacagaggaggcctaccagaaactggccagcgagaccctggaggagctggactggtgtctggaccagctagagaccctacagaccaggcactccgtcagtgagatggcctccaacaagtttaaaaggatgcttaatcgggagctcacccatctctctgaaatgagtcggtctggaaatcaagtgtcagagtttatatcaaacacattcttagataagcaacatgaagtggaaattccttctccaactcagaaggaaaaggagaaaaagaaaagaccaatgtctcagatcagtggagtcaagaaattgatgcacagctctagtctgactaattcaagtatcccaaggtttggagttaaaactgaacaagaagatgtccttgccaaggaactagaagatgtgaacaaatggggtcttcatgttttcagaatagcagagttgtctggtaaccggcccttgactgttatcatgcacaccatttttcaggaacgggatttattaaaaacatttaaaattccagtagatactttaattacatatcttatgactctcgaagaccattaccatgctgatgtggcctatcacaacaatatccatgctgcagatgttgtccagtctactcatgtgctattatctacacctgctttggaggctgtgtttacagatttggagattcttgcagcaatttttgccagtgcaatacatgatgtagatcatcctggtgtgtccaatcaatttctgatcaatacaaactctgaacttgccttgatgtacaatgattcctcagtcttagagaaccatcatttggctgtgggctttaaattgcttcaggaagaaaactgtgacattttccagaatttgaccaaaaaacaaagacaatctttaaggaaaatggtcattgacatcgtacttgcaacagatatgtcaaaacacatgaatctactggctgatttgaagactatggttgaaactaagaaagtgacaagctctggagttcttcttcttgataattattccgataggattcaggttcttcagaatatggtgcactgtgcagatctgagcaacccaacaaagcctctccagctgtaccgccagtggacggaccggataatggaggagttcttccgccaaggagaccgagagagggaacgtggcatggagataagccccatgtgtgacaagcacaatgcttccgtggaaaaatcacaggtgggcttcatagactatattgttcatcccctctgggagacatgggcagacctcgtccaccctgacgcccaggatattttggacactttggaggacaatcgtgaatggtaccagagcacaatccctcagagcccctctcctgcacctgatgacccagaggagggccggcagggtcaaactgagaaattccagtttgaactaactttagaggaagatggtgagtcagacacggaaaaggacagtggcagtcaagtggaagaagacactagctgcagtgactccaagactctttgtactcaagactcagagtctactgaaattccccttgatgaacaggttgaagaggaggcagtaggggaagaagaggaaagccagcctgaagcctgtgtcatagatgatcgttctcctgacacgtaacagtgcaaaaactttcatgccttttttttttttaagtagaaaaattgtttccaaagtgcatgtcacatgccacaaccacggtcacacctcactgtcatctgccaggacgtttgttgaacaaaactgaccttgactactcagtccagcgctcaggaatatcgtaaccagttttttcacctccatgtcatccgagcaaggtggacatcttcacgaacagcgtttttaacaagatttcagcttggtagagctgacaaagcagataaaatctactccaaattattttcaagagagtgtgactcatcaggcagcccaaaagtttattggacttggggtttctattcctttttatttgtttgcaatattttcagaagaaaggcattgcacagagtgaacttaatggacgaagcaacaaatatgtcaagaacaggacatagcacgaatctgttaccagtaggaggaggatgagccacagaaattgcataattttctaatttcaagtcttcctgatacatgactgaatagtgtggttcagtgagctgcactgacctctacattttgtatgatatgtaaaacagattttttgtagagcttacttttattattaaatgtattgaggtattatatttaaaaaaaactatgttcagaacttcatctgccactggttatttttttctaaggagtaacttgcaagttttcagtacaaatctgtgctacactggataaaaatctaatttatgaattttacttgcaccttatagttcatagcaattaactgatttgtagtgattcattgtttgttttatataccaatgacttccatattttaaaagagaaaaacaactttatgttgcaggaaaccctttttgtaagtctttattatttactttgcattttgtttcactctttccagataagcagagttgctcttcaccagtgtttttcttcatgtgcaaagtgactatttgttctataatacttttatgtgtgttatatcaaatgtgtcttaagcttcatgcaaactcagtcatcagttcgtgttgtctgaagcaagtgggagatatataaatacccagtagctaaaatggtcagtcttttttagatgttttcctacttagtatctcctaataacgttttgctgtgtcactagatgttcatttcacaagtgcatgtctttctaataatccacacatttcatgctctaataatccacacatttcatgctcatttttattgtttttacagccagttatagtaagaaaaaggtttttccccttgtgctgctttataatttagcgtgtgtctgaaccttatccatgtttgctagatgaggtcttgtcaaatatatcactaccattgtcaccggtgaaaagaaacaggtagttaagttagggttaacattcatttcaaccacgaggttgtatatcatgactagcttttactcttggtttacagagaaaagttaaacagccaactaggcagtttttaagaatattaacaatatattaacaaacaccaatacaactaatcctatttggttttaatgatttcaccatgggattaagaactatatcaggaacatccctgagaaacggttttaagtgtagcaactactcttccttaatggacagccacataacgtgtaggaagtcctttatcacttatcctcgatccataagcatatcttgcagaggggaactacttctttaaacacatggagggaaagaagatgatgccactggcaccagagggttagtactgtgatgcatcctaaaatatttattatattggtaaaaattctggttaaataaaaaattagagatcactcttggctgatttcagcaccaggaactgtattacagttttagagattaattcctagtgtttacctgattatagcagttggcatcatggggcatttaattctgactttatccccacgtcagccttaataaagtcttctttaccttctctatgaagactttaaagcccaaataatcatttttcacattgatattcaagaattgagatagatagaagccaaagtgggtatctgacaagtggaaaatcaaacgtttaagaagaattacaactctgaaaagcatttatatgtggaacttctcaaggagcctcctggggactggaaagtaagtcatcagccaggcaaatgactcatgctgaagagagtccccatttcagtcccctgagatctagctgatgcttagatcctttgaaataaaaattatgtctttataactctgatcttttacataaagcagaagaggaatcaactagttaattgcaaggtttctactctgtttcctctgtaaagatcagatggtaatctttcaaataagaaaaaaataaagacgtatgtttgaccaagtagtttcacaagaatatttgggaacttgtttcttttaattttatttgtccctgagtgaagtctagaaagaaaggtaaagagtctagagtttattcctctttccaaaacattctcattcctctcctccctacacttagtatttcccccacagagtgcctagaatcttaataatgaataaaataaaaagcagcaatatgtcattaacaaatccagacctgaaagggtaaagggtttataactgcactaataaagagaggctctttttttttcttccagtttgttggtttttaatggtaccgtgttgtaaagatacccactaatggacaatcaaattgcagaaaaggctcaatatccaagagacagggactaatgcactgtacaatctgcttatccttgcccttctctcttgccaaagtgtgcttcagaaatatatactgctttaaaaaagaataaaagaatatccttttacaagtggctttacatttcctaaaatgccataagaaaatgcaatatctgggtactgtatggggaaaaaaatgtccaagtttgtgtaaaaccagtgcatttcagcttgcaagttactgaacacaataatgctgttttaattttgttttatatcagttaaaattcacaataatgtagatagaacaaattacagacaaggaaagaaaaaacttgaatgaaatggattttacagaaagctttatgataatttttgaatgcattatttattttttgtgccatgcattttttttctcaccaaatgaccttacctgtaatacagtcttgtttgtctgtttacaaccatgtatttattgcaatgtacatactgtaatgttaattgtaaattatctgttcttattaaaacatcatcccatgatgggatggtgttgatatatttggaaactcttggtgagagaatgaatggtgtgtatacatactctgtacatttttcttttctcctgtaatatagtcttgtcaccttagagcttgtttatggaagattcaagaaaactataaaatacttaaagatatataaatttaaaaaaacatagctgcaggtctttggtcccagggctgtgccttaactttaaccaatattttcttctgttttgctgcatttgaaaggtaacagtggagctagggctgggcattttacatccaggcttttaattgattagaattctgccaataggtggattttacaaaaccacagacaacctctgaaagattctgagacccttttgagacagaagctcttaagtacttcttgccagggagcagcactgcatgtgtgatggttgtttgccatctgttgatcaggaactacttcagctacttgcatttgattatttcctttttttttttttttaactcggaaacacaactggggaaatatattctttcccagtgattataaacaatctttttcttttttttaagtccttttggcttctagagctcataggaaaatggacttgatttgaaattggagccagagtttactcgtgttggttatctattcatcagcttcctgacatgttaagagaatacattaaagagaaaatactgttttttaatcctaaaatttttcttccactaagataaaccaaatgtccttacatatatgtaaacccatctatttaaacgcaaaggtgggttgatgtcagtttacatagcagaaagcattcactatcctctaagatttgtttctgcaaaactttcattgctttagaattttaaaatttcaccttgtacaatggccagcccctaaagcaggaaacatttataatggattatatggaaacatcctcccagtacttgcccagcccttgaatcatgtggcttttcagtgaaaggaaagattctttttctaggaaaaatgagcctattttattttattttattttattttttgacacaaactgtagattttagcagccctggcccaaaggaatttgattacttttgttttaaacagtacaaaggggacactataattacaaaaacatccttaactgatttgagttgtttttatttctttggatatattttcagagtggtaaattgtgtgtgagaattacaaatgattattcttttagtggtttcttagcctctcttacagcccacggggatagtactgtacatcaataccttcatatgaaatttttatatgcaatgaaaataaaagcatgggttgattctgcctatttatgactcaatcttttacaaataaaagattattcattttaaattatagttcaatcagcatgtctctt

SEQ ID NO: 10819 - protein, 679 aa, Homo sapiens
MSIIMKPRSRSTSSLRTAEAVCFDVDNGTSAGRSPLDPMTSPGSGLILQANFVHSQRRESFLYRSDSDYDLSPKSMSRNSSIASDIHGDDLIVTPFAQVLASLRTVRNNFAALTNLQDRAPSKRSPMCNQPSINKATITEEAYQKLASETLEELDWCLDQLETLQTRHSVSEMASNKFKRMLNRELTHLSEMSRSGNQVSEFISNTFLDKQHEVEIPSPTQKEKEKKKRPMSQISGVKKLMHSSSLTNSSIPRFGVKTEQEDVLAKELEDVNKWGLHVFRIAELSGNRPLTVIMHTIFQERDLLKTFKIPVDTLITYLMTLEDHYHADVAYHNNIHAADVVQSTHVLLSTPALEAVFTDLEILAAIFASAIHDVDHPGVSNQFLINTNSELALMYNDSSVLENHHLAVGFKLLQEENCDIFQNLTKKQRQSLRKMVIDIVLATDMSKHMNLLADLKTMVETKKVTSSGVLLLDNYSDRIQVLQNMVHCADLSNPTKPLQLYRQWTDRIMEEFFRQGDRERERGMEISPMCDKHNASVEKSQVGFIDYIVHPLWETWADLVHPDAQDILDTLEDNREWYQSTIPQSPSPAPDDPEEGRQGQTEKFQFELTLEEDGESDTEKDSGSQVEEDTSCSDSKTLCTQDSESTEIPLDEQVEEEAVGEEEESQPEACVIDDRSPDT

SEQ ID NO: 10820 - DNA, 6855 bp, Homo sapiens
actgcacaaaggaaatgccctcactcagctacaagtgcctcctgctccgtgcggggcctcagggccccagagccccgcaccagctctgacttctcgtggttcctggggatcttggcatcgtccttaaaaatggcttttgtttgggatcctctgggagccacggtgccaggaccatctacaagagccaaatcaagattgcgtttctcaaagtcctacagttttgatgtggacaatggcacatctgcgggacggagtcccttggatcccatgaccagcccaggatccgggctaattctccaagcaaattttgtccacagtcaacgacgggagtccttcctgtatcgatccgacagcgattatgacctctctccaaagtctatgtcccggaactcctccattgccagtgatatacacggagatgacttgattgtgactccatttgctcaggtcttggccagtctgcgaactgtacgaaacaactttgctgcattaactaatttgcaagatcgagcacctagcaaaagatcacccatgtgcaaccaaccatccatcaacaaagccaccataacagaggaggcctaccagaaactggccagcgagaccctggaggagctggactggtgtctggaccagctagagaccctacagaccaggcactccgtcagtgagatggcctccaacaagtttaaaaggatgcttaatcgggagctcacccatctctctgaaatgagtcggtctggaaatcaagtgtcagagtttatatcaaacacattcttagataagcaacatgaagtggaaattccttctccaactcagaaggaaaaggagaaaaagaaaagaccaatgtctcagatcagtggagtcaagaaattgatgcacagctctagtctgactaattcaagtatcccaaggtttggagttaaaactgaacaagaagatgtccttgccaaggaactagaagatgtgaacaaatggggtcttcatgttttcagaatagcagagttgtctggtaaccggcccttgactgttatcatgcacaccatttttcaggaacgggatttattaaaaacatttaaaattccagtagatactttaattacatatcttatgactctcgaagaccattaccatgctgatgtggcctatcacaacaatatccatgctgcagatgttgtccagtctactcatgtgctattatctacacctgctttggaggctgtgtttacagatttggagattcttgcagcaatttttgccagtgcaatacatgatgtagatcatcctggtgtgtccaatcaatttctgatcaatacaaactctgaacttgccttgatgtacaatgattcctcagtcttagagaaccatcatttggctgtgggctttaaattgcttcaggaagaaaactgtgacattttccagaatttgaccaaaaaacaaagacaatctttaaggaaaatggtcattgacatcgtacttgcaacagatatgtcaaaacacatgaatctactggctgatttgaagactatggttgaaactaagaaagtgacaagctctggagttcttcttcttgataattattccgataggattcaggttcttcagaatatggtgcactgtgcagatctgagcaacccaacaaagcctctccagctgtaccgccagtggacggaccggataatggaggagttcttccgccaaggagaccgagagagggaacgtggcatggagataagccccatgtgtgacaagcacaatgcttccgtggaaaaatcacaggtgggcttcatagactatattgttcatcccctctgggagacatgggcagacctcgtccaccctgacgcccaggatattttggacactttggaggacaatcgtgaatggtaccagagcacaatccctcagagcccctctcctgcacctgatgacccagaggagggccggcagggtcaaactgagaaattccagtttgaactaactttagaggaagatggtgagtcagacacggaaaaggacagtggcagtcaagtggaagaagacactagctgcagtgactccaagactctttgtactcaagactcagagtctactgaaattccccttgatgaacaggttgaagaggaggcagtaggggaagaagaggaaagccagcctgaagcctgtgtcatagatgatcgttctcctgacacgtaacagtgcaaaaactttcatgccttttttttttttaagtagaaaaattgtttccaaagtgcatgtcacatgccacaaccacggtcacacctcactgtcatctgccaggacgtttgttgaacaaaactgaccttgactactcagtccagcgctcaggaatatcgtaaccagttttttcacctccatgtcatccgagcaaggtggacatcttcacgaacagcgtttttaacaagatttcagcttggtagagctgacaaagcagataaaatctactccaaattattttcaagagagtgtgactcatcaggcagcccaaaagtttattggacttggggtttctattcctttttatttgtttgcaatattttcagaagaaaggcattgcacagagtgaacttaatggacgaagcaacaaatatgtcaagaacaggacatagcacgaatctgttaccagtaggaggaggatgagccacagaaattgcataattttctaatttcaagtcttcctgatacatgactgaatagtgtggttcagtgagctgcactgacctctacattttgtatgatatgtaaaacagattttttgtagagcttacttttattattaaatgtattgaggtattatatttaaaaaaaactatgttcagaacttcatctgccactggttatttttttctaaggagtaacttgcaagttttcagtacaaatctgtgctacactggataaaaatctaatttatgaattttacttgcaccttatagttcatagcaattaactgatttgtagtgattcattgtttgttttatataccaatgacttccatattttaaaagagaaaaacaactttatgttgcaggaaaccctttttgtaagtctttattatttactttgcattttgtttcactctttccagataagcagagttgctcttcaccagtgtttttcttcatgtgcaaagtgactatttgttctataatacttttatgtgtgttatatcaaatgtgtcttaagcttcatgcaaactcagtcatcagttcgtgttgtctgaagcaagtgggagatatataaatacccagtagctaaaatggtcagtcttttttagatgttttcctacttagtatctcctaataacgttttgctgtgtcactagatgttcatttcacaagtgcatgtctttctaataatccacacatttcatgctctaataatccacacatttcatgctcatttttattgtttttacagccagttatagtaagaaaaaggtttttccccttgtgctgctttataatttagcgtgtgtctgaaccttatccatgtttgctagatgaggtcttgtcaaatatatcactaccattgtcaccggtgaaaagaaacaggtagttaagttagggttaacattcatttcaaccacgaggttgtatatcatgactagcttttactcttggtttacagagaaaagttaaacagccaactaggcagtttttaagaatattaacaatatattaacaaacaccaatacaactaatcctatttggttttaatgatttcaccatgggattaagaactatatcaggaacatccctgagaaacggttttaagtgtagcaactactcttccttaatggacagccacataacgtgtaggaagtcctttatcacttatcctcgatccataagcatatcttgcagaggggaactacttctttaaacacatggagggaaagaagatgatgccactggcaccagagggttagtactgtgatgcatcctaaaatatttattatattggtaaaaattctggttaaataaaaaattagagatcactcttggctgatttcagcaccaggaactgtattacagttttagagattaattcctagtgtttacctgattatagcagttggcatcatggggcatttaattctgactttatccccacgtcagccttaataaagtcttctttaccttctctatgaagactttaaagcccaaataatcatttttcacattgatattcaagaattgagatagatagaagccaaagtgggtatctgacaagtggaaaatcaaacgtttaagaagaattacaactctgaaaagcatttatatgtggaacttctcaaggagcctcctggggactggaaagtaagtcatcagccaggcaaatgactcatgctgaagagagtccccatttcagtcccctgagatctagctgatgcttagatcctttgaaataaaaattatgtctttataactctgatcttttacataaagcagaagaggaatcaactagttaattgcaaggtttctactctgtttcctctgtaaagatcagatggtaatctttcaaataagaaaaaaataaagacgtatgtttgaccaagtagtttcacaagaatatttgggaacttgtttcttttaattttatttgtccctgagtgaagtctagaaagaaaggtaaagagtctagagtttattcctctttccaaaacattctcattcctctcctccctacacttagtatttcccccacagagtgcctagaatcttaataatgaataaaataaaaagcagcaatatgtcattaacaaatccagacctgaaagggtaaagggtttataactgcactaataaagagaggctctttttttttcttccagtttgttggtttttaatggtaccgtgttgtaaagatacccactaatggacaatcaaattgcagaaaaggctcaatatccaagagacagggactaatgcactgtacaatctgcttatccttgcccttctctcttgccaaagtgtgcttcagaaatatatactgctttaaaaaagaataaaagaatatccttttacaagtggctttacatttcctaaaatgccataagaaaatgcaatatctgggtactgtatggggaaaaaaatgtccaagtttgtgtaaaaccagtgcatttcagcttgcaagttactgaacacaataatgctgttttaattttgttttatatcagttaaaattcacaataatgtagatagaacaaattacagacaaggaaagaaaaaacttgaatgaaatggattttacagaaagctttatgataatttttgaatgcattatttattttttgtgccatgcattttttttctcaccaaatgaccttacctgtaatacagtcttgtttgtctgtttacaaccatgtatttattgcaatgtacatactgtaatgttaattgtaaattatctgttcttattaaaacatcatcccatgatgggatggtgttgatatatttggaaactcttggtgagagaatgaatggtgtgtatacatactctgtacatttttcttttctcctgtaatatagtcttgtcaccttagagcttgtttatggaagattcaagaaaactataaaatacttaaagatatataaatttaaaaaaacatagctgcaggtctttggtcccagggctgtgccttaactttaaccaatattttcttctgttttgctgcatttgaaaggtaacagtggagctagggctgggcattttacatccaggcttttaattgattagaattctgccaataggtggattttacaaaaccacagacaacctctgaaagattctgagacccttttgagacagaagctcttaagtacttcttgccagggagcagcactgcatgtgtgatggttgtttgccatctgttgatcaggaactacttcagctacttgcatttgattatttcctttttttttttttttaactcggaaacacaactggggaaatatattctttcccagtgattataaacaatctttttcttttttttaagtccttttggcttctagagctcataggaaaatggacttgatttgaaattggagccagagtttactcgtgttggttatctattcatcagcttcctgacatgttaagagaatacattaaagagaaaatactgttttttaatcctaaaatttttcttccactaagataaaccaaatgtccttacatatatgtaaacccatctatttaaacgcaaaggtgggttgatgtcagtttacatagcagaaagcattcactatcctctaagatttgtttctgcaaaactttcattgctttagaattttaaaatttcaccttgtacaatggccagcccctaaagcaggaaacatttataatggattatatggaaacatcctcccagtacttgcccagcccttgaatcatgtggcttttcagtgaaaggaaagattctttttctaggaaaaatgagcctattttattttattttattttattttttgacacaaactgtagattttagcagccctggcccaaaggaatttgattacttttgttttaaacagtacaaaggggacactataattacaaaaacatccttaactgatttgagttgtttttatttctttggatatattttcagagtggtaaattgtgtgtgagaattacaaatgattattcttttagtggtttcttagcctctcttacagcccacggggatagtactgtacatcaataccttcatatgaaatttttatatgcaatgaaaataaaagcatgggttgattctgcctatttatgactcaatcttttacaaataaaagattattcattttaaattatagttcaatcagcatgtctctt

SEQ ID NO: 10821 - protein, 687 aa, Homo sapiens
MAFVWDPLGATVPGPSTRAKSRLRFSKSYSFDVDNGTSAGRSPLDPMTSPGSGLILQANFVHSQRRESFLYRSDSDYDLSPKSMSRNSSIASDIHGDDLIVTPFAQVLASLRTVRNNFAALTNLQDRAPSKRSPMCNQPSINKATITEEAYQKLASETLEELDWCLDQLETLQTRHSVSEMASNKFKRMLNRELTHLSEMSRSGNQVSEFISNTFLDKQHEVEIPSPTQKEKEKKKRPMSQISGVKKLMHSSSLTNSSIPRFGVKTEQEDVLAKELEDVNKWGLHVFRIAELSGNRPLTVIMHTIFQERDLLKTFKIPVDTLITYLMTLEDHYHADVAYHNNIHAADVVQSTHVLLSTPALEAVFTDLEILAAIFASAIHDVDHPGVSNQFLINTNSELALMYNDSSVLENHHLAVGFKLLQEENCDIFQNLTKKQRQSLRKMVIDIVLATDMSKHMNLLADLKTMVETKKVTSSGVLLLDNYSDRIQVLQNMVHCADLSNPTKPLQLYRQWTDRIMEEFFRQGDRERERGMEISPMCDKHNASVEKSQVGFIDYIVHPLWETWADLVHPDAQDILDTLEDNREWYQSTIPQSPSPAPDDPEEGRQGQTEKFQFELTLEEDGESDTEKDSGSQVEEDTSCSDSKTLCTQDSESTEIPLDEQVEEEAVGEEEESQPEACVIDDRSPDT

SEQ ID NO: 10822 - DNA, 6349 bp, Homo sapiens
gacagaagatctgcgaacatgatgcacgtgaataattttccctttagaaggcattcctggatatgaggaggcctaccagaaactggccagcgagaccctggaggagctggactggtgtctggaccagctagagaccctacagaccaggcactccgtcagtgagatggcctccaacaagtttaaaaggatgcttaatcgggagctcacccatctctctgaaatgagtcggtctggaaatcaagtgtcagagtttatatcaaacacattcttagataagcaacatgaagtggaaattccttctccaactcagaaggaaaaggagaaaaagaaaagaccaatgtctcagatcagtggagtcaagaaattgatgcacagctctagtctgactaattcaagtatcccaaggtttggagttaaaactgaacaagaagatgtccttgccaaggaactagaagatgtgaacaaatggggtcttcatgttttcagaatagcagagttgtctggtaaccggcccttgactgttatcatgcacaccatttttcaggaacgggatttattaaaaacatttaaaattccagtagatactttaattacatatcttatgactctcgaagaccattaccatgctgatgtggcctatcacaacaatatccatgctgcagatgttgtccagtctactcatgtgctattatctacacctgctttggaggctgtgtttacagatttggagattcttgcagcaatttttgccagtgcaatacatgatgtagatcatcctggtgtgtccaatcaatttctgatcaatacaaactctgaacttgccttgatgtacaatgattcctcagtcttagagaaccatcatttggctgtgggctttaaattgcttcaggaagaaaactgtgacattttccagaatttgaccaaaaaacaaagacaatctttaaggaaaatggtcattgacatcgtacttgcaacagatatgtcaaaacacatgaatctactggctgatttgaagactatggttgaaactaagaaagtgacaagctctggagttcttcttcttgataattattccgataggattcaggttcttcagaatatggtgcactgtgcagatctgagcaacccaacaaagcctctccagctgtaccgccagtggacggaccggataatggaggagttcttccgccaaggagaccgagagagggaacgtggcatggagataagccccatgtgtgacaagcacaatgcttccgtggaaaaatcacaggtgggcttcatagactatattgttcatcccctctgggagacatgggcagacctcgtccaccctgacgcccaggatattttggacactttggaggacaatcgtgaatggtaccagagcacaatccctcagagcccctctcctgcacctgatgacccagaggagggccggcagggtcaaactgagaaattccagtttgaactaactttagaggaagatggtgagtcagacacggaaaaggacagtggcagtcaagtggaagaagacactagctgcagtgactccaagactctttgtactcaagactcagagtctactgaaattccccttgatgaacaggttgaagaggaggcagtaggggaagaagaggaaagccagcctgaagcctgtgtcatagatgatcgttctcctgacacgtaacagtgcaaaaactttcatgccttttttttttttaagtagaaaaattgtttccaaagtgcatgtcacatgccacaaccacggtcacacctcactgtcatctgccaggacgtttgttgaacaaaactgaccttgactactcagtccagcgctcaggaatatcgtaaccagttttttcacctccatgtcatccgagcaaggtggacatcttcacgaacagcgtttttaacaagatttcagcttggtagagctgacaaagcagataaaatctactccaaattattttcaagagagtgtgactcatcaggcagcccaaaagtttattggacttggggtttctattcctttttatttgtttgcaatattttcagaagaaaggcattgcacagagtgaacttaatggacgaagcaacaaatatgtcaagaacaggacatagcacgaatctgttaccagtaggaggaggatgagccacagaaattgcataattttctaatttcaagtcttcctgatacatgactgaatagtgtggttcagtgagctgcactgacctctacattttgtatgatatgtaaaacagattttttgtagagcttacttttattattaaatgtattgaggtattatatttaaaaaaaactatgttcagaacttcatctgccactggttatttttttctaaggagtaacttgcaagttttcagtacaaatctgtgctacactggataaaaatctaatttatgaattttacttgcaccttatagttcatagcaattaactgatttgtagtgattcattgtttgttttatataccaatgacttccatattttaaaagagaaaaacaactttatgttgcaggaaaccctttttgtaagtctttattatttactttgcattttgtttcactctttccagataagcagagttgctcttcaccagtgtttttcttcatgtgcaaagtgactatttgttctataatacttttatgtgtgttatatcaaatgtgtcttaagcttcatgcaaactcagtcatcagttcgtgttgtctgaagcaagtgggagatatataaatacccagtagctaaaatggtcagtcttttttagatgttttcctacttagtatctcctaataacgttttgctgtgtcactagatgttcatttcacaagtgcatgtctttctaataatccacacatttcatgctctaataatccacacatttcatgctcatttttattgtttttacagccagttatagtaagaaaaaggtttttccccttgtgctgctttataatttagcgtgtgtctgaaccttatccatgtttgctagatgaggtcttgtcaaatatatcactaccattgtcaccggtgaaaagaaacaggtagttaagttagggttaacattcatttcaaccacgaggttgtatatcatgactagcttttactcttggtttacagagaaaagttaaacagccaactaggcagtttttaagaatattaacaatatattaacaaacaccaatacaactaatcctatttggttttaatgatttcaccatgggattaagaactatatcaggaacatccctgagaaacggttttaagtgtagcaactactcttccttaatggacagccacataacgtgtaggaagtcctttatcacttatcctcgatccataagcatatcttgcagaggggaactacttctttaaacacatggagggaaagaagatgatgccactggcaccagagggttagtactgtgatgcatcctaaaatatttattatattggtaaaaattctggttaaataaaaaattagagatcactcttggctgatttcagcaccaggaactgtattacagttttagagattaattcctagtgtttacctgattatagcagttggcatcatggggcatttaattctgactttatccccacgtcagccttaataaagtcttctttaccttctctatgaagactttaaagcccaaataatcatttttcacattgatattcaagaattgagatagatagaagccaaagtgggtatctgacaagtggaaaatcaaacgtttaagaagaattacaactctgaaaagcatttatatgtggaacttctcaaggagcctcctggggactggaaagtaagtcatcagccaggcaaatgactcatgctgaagagagtccccatttcagtcccctgagatctagctgatgcttagatcctttgaaataaaaattatgtctttataactctgatcttttacataaagcagaagaggaatcaactagttaattgcaaggtttctactctgtttcctctgtaaagatcagatggtaatctttcaaataagaaaaaaataaagacgtatgtttgaccaagtagtttcacaagaatatttgggaacttgtttcttttaattttatttgtccctgagtgaagtctagaaagaaaggtaaagagtctagagtttattcctctttccaaaacattctcattcctctcctccctacacttagtatttcccccacagagtgcctagaatcttaataatgaataaaataaaaagcagcaatatgtcattaacaaatccagacctgaaagggtaaagggtttataactgcactaataaagagaggctctttttttttcttccagtttgttggtttttaatggtaccgtgttgtaaagatacccactaatggacaatcaaattgcagaaaaggctcaatatccaagagacagggactaatgcactgtacaatctgcttatccttgcccttctctcttgccaaagtgtgcttcagaaatatatactgctttaaaaaagaataaaagaatatccttttacaagtggctttacatttcctaaaatgccataagaaaatgcaatatctgggtactgtatggggaaaaaaatgtccaagtttgtgtaaaaccagtgcatttcagcttgcaagttactgaacacaataatgctgttttaattttgttttatatcagttaaaattcacaataatgtagatagaacaaattacagacaaggaaagaaaaaacttgaatgaaatggattttacagaaagctttatgataatttttgaatgcattatttattttttgtgccatgcattttttttctcaccaaatgaccttacctgtaatacagtcttgtttgtctgtttacaaccatgtatttattgcaatgtacatactgtaatgttaattgtaaattatctgttcttattaaaacatcatcccatgatgggatggtgttgatatatttggaaactcttggtgagagaatgaatggtgtgtatacatactctgtacatttttcttttctcctgtaatatagtcttgtcaccttagagcttgtttatggaagattcaagaaaactataaaatacttaaagatatataaatttaaaaaaacatagctgcaggtctttggtcccagggctgtgccttaactttaaccaatattttcttctgttttgctgcatttgaaaggtaacagtggagctagggctgggcattttacatccaggcttttaattgattagaattctgccaataggtggattttacaaaaccacagacaacctctgaaagattctgagacccttttgagacagaagctcttaagtacttcttgccagggagcagcactgcatgtgtgatggttgtttgccatctgttgatcaggaactacttcagctacttgcatttgattatttcctttttttttttttttaactcggaaacacaactggggaaatatattctttcccagtgattataaacaatctttttcttttttttaagtccttttggcttctagagctcataggaaaatggacttgatttgaaattggagccagagtttactcgtgttggttatctattcatcagcttcctgacatgttaagagaatacattaaagagaaaatactgttttttaatcctaaaatttttcttccactaagataaaccaaatgtccttacatatatgtaaacccatctatttaaacgcaaaggtgggttgatgtcagtttacatagcagaaagcattcactatcctctaagatttgtttctgcaaaactttcattgctttagaattttaaaatttcaccttgtacaatggccagcccctaaagcaggaaacatttataatggattatatggaaacatcctcccagtacttgcccagcccttgaatcatgtggcttttcagtgaaaggaaagattctttttctaggaaaaatgagcctattttattttattttattttattttttgacacaaactgtagattttagcagccctggcccaaaggaatttgattacttttgttttaaacagtacaaaggggacactataattacaaaaacatccttaactgatttgagttgtttttatttctttggatatattttcagagtggtaaattgtgtgtgagaattacaaatgattattcttttagtggtttcttagcctctcttacagcccacggggatagtactgtacatcaataccttcatatgaaatttttatatgcaatgaaaataaaagcatgggttgattctgcctatttatgactcaatcttttacaaataaaagattattcattttaaattatagttcaatcagcatgtctctt

SEQ ID NO: 10823 - protein, 507 aa, Homo sapiens; identical to SEQ ID NO: 10817

SEQ ID NO: 10824 - DNA, 6808 bp, Homo sapiens
caatacttgttgcaataattgcccacgatagctgctcaaacaagagagttggaattcatctgtaaaaatcactacatgtaacgtaggagacaagaaaaatattaatgacagaagatctgcgaacatgatgcacgtgaataattttccctttagaaggcattcctggatatgttttgatgtggacaatggcacatctgcgggacggagtcccttggatcccatgaccagcccaggatccgggctaattctccaagcaaattttgtccacagtcaacgacgggagtccttcctgtatcgatccgacagcgattatgacctctctccaaagtctatgtcccggaactcctccattgccagtgatatacacggagatgacttgattgtgactccatttgctcaggtcttggccagtctgcgaactgtacgaaacaactttgctgcattaactaatttgcaagatcgagcacctagcaaaagatcacccatgtgcaaccaaccatccatcaacaaagccaccataacagaggaggcctaccagaaactggccagcgagaccctggaggagctggactggtgtctggaccagctagagaccctacagaccaggcactccgtcagtgagatggcctccaacaagtttaaaaggatgcttaatcgggagctcacccatctctctgaaatgagtcggtctggaaatcaagtgtcagagtttatatcaaacacattcttagataagcaacatgaagtggaaattccttctccaactcagaaggaaaaggagaaaaagaaaagaccaatgtctcagatcagtggagtcaagaaattgatgcacagctctagtctgactaattcaagtatcccaaggtttggagttaaaactgaacaagaagatgtccttgccaaggaactagaagatgtgaacaaatggggtcttcatgttttcagaatagcagagttgtctggtaaccggcccttgactgttatcatgcacaccatttttcaggaacgggatttattaaaaacatttaaaattccagtagatactttaattacatatcttatgactctcgaagaccattaccatgctgatgtggcctatcacaacaatatccatgctgcagatgttgtccagtctactcatgtgctattatctacacctgctttggaggctgtgtttacagatttggagattcttgcagcaatttttgccagtgcaatacatgatgtagatcatcctggtgtgtccaatcaatttctgatcaatacaaactctgaacttgccttgatgtacaatgattcctcagtcttagagaaccatcatttggctgtgggctttaaattgcttcaggaagaaaactgtgacattttccagaatttgaccaaaaaacaaagacaatctttaaggaaaatggtcattgacatcgtacttgcaacagatatgtcaaaacacatgaatctactggctgatttgaagactatggttgaaactaagaaagtgacaagctctggagttcttcttcttgataattattccgataggattcaggttcttcagaatatggtgcactgtgcagatctgagcaacccaacaaagcctctccagctgtaccgccagtggacggaccggataatggaggagttcttccgccaaggagaccgagagagggaacgtggcatggagataagccccatgtgtgacaagcacaatgcttccgtggaaaaatcacaggtgggcttcatagactatattgttcatcccctctgggagacatgggcagacctcgtccaccctgacgcccaggatattttggacactttggaggacaatcgtgaatggtaccagagcacaatccctcagagcccctctcctgcacctgatgacccagaggagggccggcagggtcaaactgagaaattccagtttgaactaactttagaggaagatggtgagtcagacacggaaaaggacagtggcagtcaagtggaagaagacactagctgcagtgactccaagactctttgtactcaagactcagagtctactgaaattccccttgatgaacaggttgaagaggaggcagtaggggaagaagaggaaagccagcctgaagcctgtgtcatagatgatcgttctcctgacacgtaacagtgcaaaaactttcatgccttttttttttttaagtagaaaaattgtttccaaagtgcatgtcacatgccacaaccacggtcacacctcactgtcatctgccaggacgtttgttgaacaaaactgaccttgactactcagtccagcgctcaggaatatcgtaaccagttttttcacctccatgtcatccgagcaaggtggacatcttcacgaacagcgtttttaacaagatttcagcttggtagagctgacaaagcagataaaatctactccaaattattttcaagagagtgtgactcatcaggcagcccaaaagtttattggacttggggtttctattcctttttatttgtttgcaatattttcagaagaaaggcattgcacagagtgaacttaatggacgaagcaacaaatatgtcaagaacaggacatagcacgaatctgttaccagtaggaggaggatgagccacagaaattgcataattttctaatttcaagtcttcctgatacatgactgaatagtgtggttcagtgagctgcactgacctctacattttgtatgatatgtaaaacagattttttgtagagcttacttttattattaaatgtattgaggtattatatttaaaaaaaactatgttcagaacttcatctgccactggttatttttttctaaggagtaacttgcaagttttcagtacaaatctgtgctacactggataaaaatctaatttatgaattttacttgcaccttatagttcatagcaattaactgatttgtagtgattcattgtttgttttatataccaatgacttccatattttaaaagagaaaaacaactttatgttgcaggaaaccctttttgtaagtctttattatttactttgcattttgtttcactctttccagataagcagagttgctcttcaccagtgtttttcttcatgtgcaaagtgactatttgttctataatacttttatgtgtgttatatcaaatgtgtcttaagcttcatgcaaactcagtcatcagttcgtgttgtctgaagcaagtgggagatatataaatacccagtagctaaaatggtcagtcttttttagatgttttcctacttagtatctcctaataacgttttgctgtgtcactagatgttcatttcacaagtgcatgtctttctaataatccacacatttcatgctctaataatccacacatttcatgctcatttttattgtttttacagccagttatagtaagaaaaaggtttttccccttgtgctgctttataatttagcgtgtgtctgaaccttatccatgtttgctagatgaggtcttgtcaaatatatcactaccattgtcaccggtgaaaagaaacaggtagttaagttagggttaacattcatttcaaccacgaggttgtatatcatgactagcttttactcttggtttacagagaaaagttaaacagccaactaggcagtttttaagaatattaacaatatattaacaaacaccaatacaactaatcctatttggttttaatgatttcaccatgggattaagaactatatcaggaacatccctgagaaacggttttaagtgtagcaactactcttccttaatggacagccacataacgtgtaggaagtcctttatcacttatcctcgatccataagcatatcttgcagaggggaactacttctttaaacacatggagggaaagaagatgatgccactggcaccagagggttagtactgtgatgcatcctaaaatatttattatattggtaaaaattctggttaaataaaaaattagagatcactcttggctgatttcagcaccaggaactgtattacagttttagagattaattcctagtgtttacctgattatagcagttggcatcatggggcatttaattctgactttatccccacgtcagccttaataaagtcttctttaccttctctatgaagactttaaagcccaaataatcatttttcacattgatattcaagaattgagatagatagaagccaaagtgggtatctgacaagtggaaaatcaaacgtttaagaagaattacaactctgaaaagcatttatatgtggaacttctcaaggagcctcctggggactggaaagtaagtcatcagccaggcaaatgactcatgctgaagagagtccccatttcagtcccctgagatctagctgatgcttagatcctttgaaataaaaattatgtctttataactctgatcttttacataaagcagaagaggaatcaactagttaattgcaaggtttctactctgtttcctctgtaaagatcagatggtaatctttcaaataagaaaaaaataaagacgtatgtttgaccaagtagtttcacaagaatatttgggaacttgtttcttttaattttatttgtccctgagtgaagtctagaaagaaaggtaaagagtctagagtttattcctctttccaaaacattctcattcctctcctccctacacttagtatttcccccacagagtgcctagaatcttaataatgaataaaataaaaagcagcaatatgtcattaacaaatccagacctgaaagggtaaagggtttataactgcactaataaagagaggctctttttttttcttccagtttgttggtttttaatggtaccgtgttgtaaagatacccactaatggacaatcaaattgcagaaaaggctcaatatccaagagacagggactaatgcactgtacaatctgcttatccttgcccttctctcttgccaaagtgtgcttcagaaatatatactgctttaaaaaagaataaaagaatatccttttacaagtggctttacatttcctaaaatgccataagaaaatgcaatatctgggtactgtatggggaaaaaaatgtccaagtttgtgtaaaaccagtgcatttcagcttgcaagttactgaacacaataatgctgttttaattttgttttatatcagttaaaattcacaataatgtagatagaacaaattacagacaaggaaagaaaaaacttgaatgaaatggattttacagaaagctttatgataatttttgaatgcattatttattttttgtgccatgcattttttttctcaccaaatgaccttacctgtaatacagtcttgtttgtctgtttacaaccatgtatttattgcaatgtacatactgtaatgttaattgtaaattatctgttcttattaaaacatcatcccatgatgggatggtgttgatatatttggaaactcttggtgagagaatgaatggtgtgtatacatactctgtacatttttcttttctcctgtaatatagtcttgtcaccttagagcttgtttatggaagattcaagaaaactataaaatacttaaagatatataaatttaaaaaaacatagctgcaggtctttggtcccagggctgtgccttaactttaaccaatattttcttctgttttgctgcatttgaaaggtaacagtggagctagggctgggcattttacatccaggcttttaattgattagaattctgccaataggtggattttacaaaaccacagacaacctctgaaagattctgagacccttttgagacagaagctcttaagtacttcttgccagggagcagcactgcatgtgtgatggttgtttgccatctgttgatcaggaactacttcagctacttgcatttgattatttcctttttttttttttttaactcggaaacacaactggggaaatatattctttcccagtgattataaacaatctttttcttttttttaagtccttttggcttctagagctcataggaaaatggacttgatttgaaattggagccagagtttactcgtgttggttatctattcatcagcttcctgacatgttaagagaatacattaaagagaaaatactgttttttaatcctaaaatttttcttccactaagataaaccaaatgtccttacatatatgtaaacccatctatttaaacgcaaaggtgggttgatgtcagtttacatagcagaaagcattcactatcctctaagatttgtttctgcaaaactttcattgctttagaattttaaaatttcaccttgtacaatggccagcccctaaagcaggaaacatttataatggattatatggaaacatcctcccagtacttgcccagcccttgaatcatgtggcttttcagtgaaaggaaagattctttttctaggaaaaatgagcctattttattttattttattttattttttgacacaaactgtagattttagcagccctggcccaaaggaatttgattacttttgttttaaacagtacaaaggggacactataattacaaaaacatccttaactgatttgagttgtttttatttctttggatatattttcagagtggtaaattgtgtgtgagaattacaaatgattattcttttagtggtttcttagcctctcttacagcccacggggatagtactgtacatcaataccttcatatgaaatttttatatgcaatgaaaataaaagcatgggttgattctgcctatttatgactcaatcttttacaaataaaagattattcattttaaattatagttcaatcagcatgtctctt

SEQ ID NO: 10825 - protein, 673 aa, Homo sapiens; identical to SEQ ID NO: 976

SEQ ID NO: 10826 - DNA, 7240 bp, Homo sapiens
tgcggcgcattagttccaatagtttaacaggctgctttgtagcacggacaaagccgtgcgagcgcggtgctttccctccttgttcatttgctatgcgagcttgtcagtgatctttggcaggggcttgggagaggaggggtgacgtttaatacgcttccgcggaggagtgcgctcgcctcctctgcacccagccccaggctctacagagagactgaggcaggcgactgaatgcactaacagcagcaggctcagacctgcttccctggacatttccgggaccgtgagcgagggaaccacgttgccctggattcttgccagctgtacaaagttgaccaggaaaatggctcagcagacaagcccggacactttaacagtacctgaagtggataatccgcattgtccaaacccgtggctgaacgaagaccttgtgaaatccttgcgagaaaacctgttgcagcatgagaagtccaagacagcgaggaaatcggtttctcccaagctctctccagtgatctctccgagaaattcccccaggcttctgcgcagaatgcttctcagcagcaacatccccaaacagcggcgtttcacggtggcacatacatgttttgatgtggacaatggcacatctgcgggacggagtcccttggatcccatgaccagcccaggatccgggctaattctccaagcaaattttgtccacagtcaacgacgggagtccttcctgtatcgatccgacagcgattatgacctctctccaaagtctatgtcccggaactcctccattgccagtgatatacacggagatgacttgattgtgactccatttgctcaggtcttggccagtctgcgaactgtacgaaacaactttgctgcattaactaatttgcaagatcgagcacctagcaaaagatcacccatgtgcaaccaaccatccatcaacaaagccaccataacagaggaggcctaccagaaactggccagcgagaccctggaggagctggactggtgtctggaccagctagagaccctacagaccaggcactccgtcagtgagatggcctccaacaagtttaaaaggatgcttaatcgggagctcacccatctctctgaaatgagtcggtctggaaatcaagtgtcagagtttatatcaaacacattcttagataagcaacatgaagtggaaattccttctccaactcagaaggaaaaggagaaaaagaaaagaccaatgtctcagatcagtggagtcaagaaattgatgcacagctctagtctgactaattcaagtatcccaaggtttggagttaaaactgaacaagaagatgtccttgccaaggaactagaagatgtgaacaaatggggtcttcatgttttcagaatagcagagttgtctggtaaccggcccttgactgttatcatgcacaccatttttcaggaacgggatttattaaaaacatttaaaattccagtagatactttaattacatatcttatgactctcgaagaccattaccatgctgatgtggcctatcacaacaatatccatgctgcagatgttgtccagtctactcatgtgctattatctacacctgctttggaggctgtgtttacagatttggagattcttgcagcaatttttgccagtgcaatacatgatgtagatcatcctggtgtgtccaatcaatttctgatcaatacaaactctgaacttgccttgatgtacaatgattcctcagtcttagagaaccatcatttggctgtgggctttaaattgcttcaggaagaaaactgtgacattttccagaatttgaccaaaaaacaaagacaatctttaaggaaaatggtcattgacatcgtacttgcaacagatatgtcaaaacacatgaatctactggctgatttgaagactatggttgaaactaagaaagtgacaagctctggagttcttcttcttgataattattccgataggattcaggttcttcagaatatggtgcactgtgcagatctgagcaacccaacaaagcctctccagctgtaccgccagtggacggaccggataatggaggagttcttccgccaaggagaccgagagagggaacgtggcatggagataagccccatgtgtgacaagcacaatgcttccgtggaaaaatcacaggtgggcttcatagactatattgttcatcccctctgggagacatgggcagacctcgtccaccctgacgcccaggatattttggacactttggaggacaatcgtgaatggtaccagagcacaatccctcagagcccctctcctgcacctgatgacccagaggagggccggcagggtcaaactgagaaattccagtttgaactaactttagaggaagatggtgagtcagacacggaaaaggacagtggcagtcaagtggaagaagacactagctgcagtgactccaagactctttgtactcaagactcagagtctactgaaattccccttgatgaacaggttgaagaggaggcagtaggggaagaagaggaaagccagcctgaagcctgtgtcatagatgatcgttctcctgacacgtaacagtgcaaaaactttcatgccttttttttttttaagtagaaaaattgtttccaaagtgcatgtcacatgccacaaccacggtcacacctcactgtcatctgccaggacgtttgttgaacaaaactgaccttgactactcagtccagcgctcaggaatatcgtaaccagttttttcacctccatgtcatccgagcaaggtggacatcttcacgaacagcgtttttaacaagatttcagcttggtagagctgacaaagcagataaaatctactccaaattattttcaagagagtgtgactcatcaggcagcccaaaagtttattggacttggggtttctattcctttttatttgtttgcaatattttcagaagaaaggcattgcacagagtgaacttaatggacgaagcaacaaatatgtcaagaacaggacatagcacgaatctgttaccagtaggaggaggatgagccacagaaattgcataattttctaatttcaagtcttcctgatacatgactgaatagtgtggttcagtgagctgcactgacctctacattttgtatgatatgtaaaacagattttttgtagagcttacttttattattaaatgtattgaggtattatatttaaaaaaaactatgttcagaacttcatctgccactggttatttttttctaaggagtaacttgcaagttttcagtacaaatctgtgctacactggataaaaatctaatttatgaattttacttgcaccttatagttcatagcaattaactgatttgtagtgattcattgtttgttttatataccaatgacttccatattttaaaagagaaaaacaactttatgttgcaggaaaccctttttgtaagtctttattatttactttgcattttgtttcactctttccagataagcagagttgctcttcaccagtgtttttcttcatgtgcaaagtgactatttgttctataatacttttatgtgtgttatatcaaatgtgtcttaagcttcatgcaaactcagtcatcagttcgtgttgtctgaagcaagtgggagatatataaatacccagtagctaaaatggtcagtcttttttagatgttttcctacttagtatctcctaataacgttttgctgtgtcactagatgttcatttcacaagtgcatgtctttctaataatccacacatttcatgctctaataatccacacatttcatgctcatttttattgtttttacagccagttatagtaagaaaaaggtttttccccttgtgctgctttataatttagcgtgtgtctgaaccttatccatgtttgctagatgaggtcttgtcaaatatatcactaccattgtcaccggtgaaaagaaacaggtagttaagttagggttaacattcatttcaaccacgaggttgtatatcatgactagcttttactcttggtttacagagaaaagttaaacagccaactaggcagtttttaagaatattaacaatatattaacaaacaccaatacaactaatcctatttggttttaatgatttcaccatgggattaagaactatatcaggaacatccctgagaaacggttttaagtgtagcaactactcttccttaatggacagccacataacgtgtaggaagtcctttatcacttatcctcgatccataagcatatcttgcagaggggaactacttctttaaacacatggagggaaagaagatgatgccactggcaccagagggttagtactgtgatgcatcctaaaatatttattatattggtaaaaattctggttaaataaaaaattagagatcactcttggctgatttcagcaccaggaactgtattacagttttagagattaattcctagtgtttacctgattatagcagttggcatcatggggcatttaattctgactttatccccacgtcagccttaataaagtcttctttaccttctctatgaagactttaaagcccaaataatcatttttcacattgatattcaagaattgagatagatagaagccaaagtgggtatctgacaagtggaaaatcaaacgtttaagaagaattacaactctgaaaagcatttatatgtggaacttctcaaggagcctcctggggactggaaagtaagtcatcagccaggcaaatgactcatgctgaagagagtccccatttcagtcccctgagatctagctgatgcttagatcctttgaaataaaaattatgtctttataactctgatcttttacataaagcagaagaggaatcaactagttaattgcaaggtttctactctgtttcctctgtaaagatcagatggtaatctttcaaataagaaaaaaataaagacgtatgtttgaccaagtagtttcacaagaatatttgggaacttgtttcttttaattttatttgtccctgagtgaagtctagaaagaaaggtaaagagtctagagtttattcctctttccaaaacattctcattcctctcctccctacacttagtatttcccccacagagtgcctagaatcttaataatgaataaaataaaaagcagcaatatgtcattaacaaatccagacctgaaagggtaaagggtttataactgcactaataaagagaggctctttttttttcttccagtttgttggtttttaatggtaccgtgttgtaaagatacccactaatggacaatcaaattgcagaaaaggctcaatatccaagagacagggactaatgcactgtacaatctgcttatccttgcccttctctcttgccaaagtgtgcttcagaaatatatactgctttaaaaaagaataaaagaatatccttttacaagtggctttacatttcctaaaatgccataagaaaatgcaatatctgggtactgtatggggaaaaaaatgtccaagtttgtgtaaaaccagtgcatttcagcttgcaagttactgaacacaataatgctgttttaattttgttttatatcagttaaaattcacaataatgtagatagaacaaattacagacaaggaaagaaaaaacttgaatgaaatggattttacagaaagctttatgataatttttgaatgcattatttattttttgtgccatgcattttttttctcaccaaatgaccttacctgtaatacagtcttgtttgtctgtttacaaccatgtatttattgcaatgtacatactgtaatgttaattgtaaattatctgttcttattaaaacatcatcccatgatgggatggtgttgatatatttggaaactcttggtgagagaatgaatggtgtgtatacatactctgtacatttttcttttctcctgtaatatagtcttgtcaccttagagcttgtttatggaagattcaagaaaactataaaatacttaaagatatataaatttaaaaaaacatagctgcaggtctttggtcccagggctgtgccttaactttaaccaatattttcttctgttttgctgcatttgaaaggtaacagtggagctagggctgggcattttacatccaggcttttaattgattagaattctgccaataggtggattttacaaaaccacagacaacctctgaaagattctgagacccttttgagacagaagctcttaagtacttcttgccagggagcagcactgcatgtgtgatggttgtttgccatctgttgatcaggaactacttcagctacttgcatttgattatttcctttttttttttttttaactcggaaacacaactggggaaatatattctttcccagtgattataaacaatctttttcttttttttaagtccttttggcttctagagctcataggaaaatggacttgatttgaaattggagccagagtttactcgtgttggttatctattcatcagcttcctgacatgttaagagaatacattaaagagaaaatactgttttttaatcctaaaatttttcttccactaagataaaccaaatgtccttacatatatgtaaacccatctatttaaacgcaaaggtgggttgatgtcagtttacatagcagaaagcattcactatcctctaagatttgtttctgcaaaactttcattgctttagaattttaaaatttcaccttgtacaatggccagcccctaaagcaggaaacatttataatggattatatggaaacatcctcccagtacttgcccagcccttgaatcatgtggcttttcagtgaaaggaaagattctttttctaggaaaaatgagcctattttattttattttattttattttttgacacaaactgtagattttagcagccctggcccaaaggaatttgattacttttgttttaaacagtacaaaggggacactataattacaaaaacatccttaactgatttgagttgtttttatttctttggatatattttcagagtggtaaattgtgtgtgagaattacaaatgattattcttttagtggtttcttagcctctcttacagcccacggggatagtactgtacatcaataccttcatatgaaatttttatatgcaatgaaaataaaagcatgggttgattctgcctatttatgactcaatcttttacaaataaaagattattcattttaaattatagttcaatcagcatgtctctt

SEQ ID NO: 10827 - protein, 745 aa, Homo sapiens
MAQQTSPDTLTVPEVDNPHCPNPWLNEDLVKSLRENLLQHEKSKTARKSVSPKLSPVISPRNSPRLLRRMLLSSNIPKQRRFTVAHTCFDVDNGTSAGRSPLDPMTSPGSGLILQANFVHSQRRESFLYRSDSDYDLSPKSMSRNSSIASDIHGDDLIVTPFAQVLASLRTVRNNFAALTNLQDRAPSKRSPMCNQPSINKATITEEAYQKLASETLEELDWCLDQLETLQTRHSVSEMASNKFKRMLNRELTHLSEMSRSGNQVSEFISNTFLDKQHEVEIPSPTQKEKEKKKRPMSQISGVKKLMHSSSLTNSSIPRFGVKTEQEDVLAKELEDVNKWGLHVFRIAELSGNRPLTVIMHTIFQERDLLKTFKIPVDTLITYLMTLEDHYHADVAYHNNIHAADVVQSTHVLLSTPALEAVFTDLEILAAIFASAIHDVDHPGVSNQFLINTNSELALMYNDSSVLENHHLAVGFKLLQEENCDIFQNLTKKQRQSLRKMVIDIVLATDMSKHMNLLADLKTMVETKKVTSSGVLLLDNYSDRIQVLQNMVHCADLSNPTKPLQLYRQWTDRIMEEFFRQGDRERERGMEISPMCDKHNASVEKSQVGFIDYIVHPLWETWADLVHPDAQDILDTLEDNREWYQSTIPQSPSPAPDDPEEGRQGQTEKFQFELTLEEDGESDTEKDSGSQVEEDTSCSDSKTLCTQDSESTEIPLDEQVEEEAVGEEEESQPEACVIDDRSPDT

SEQ ID NO: 10828 - DNA, 7284 bp, Homo sapiens
tgcggcgcattagttccaatagtttaacaggctgctttgtagcacggacaaagccgtgcgagcgcggtgctttccctccttgttcatttgctatgcgagcttgtcagtgatctttggcaggggcttgggagaggaggggtgacgtttaatacgcttccgcggaggagtgcgctcgcctcctctgcacccagccccaggctctacagagagactgaggcaggcgactgaatgcactaacagcagcaggctcagacctgcttccctggacatttccgggaccgtgagcgagggaaccacgttgccctggattcttgccagctgtacaaagttgaccaggaaaatggctcagcagacaagcccggacactttaacagtacctgaagtggataatccgcattgtccaaacccgtggctgaacgaagaccttgtgaaatccttgcgagaaaacctgttgcagcatgagaagtccaagacagcgaggaaatcggtttctcccaagctctctccagtgatctctccgagaaattcccccaggcttctgcgcagaatgcttctcagcagcaacatccccaaacagcggcgtttcacggtggcacatacatgttttgatgtggacaatggcacatctgcgggacggagtcccttggatcccatgaccagcccaggatccgggctaattctccaagcaaattttgtccacagtcaacgacgggagtccttcctgtatcgatccgacagcgattatgacctctctccaaagtctatgtcccggaactcctccattgccagtgatatacacggagatgacttgattgtgactccatttgctcaggtcttggccagtctgcgaactgtacgaaacaactttgctgcattaactaatttgcaagatcgagcacctagcaaaagatcacccatgtgcaaccaaccatccatcaacaaagccaccataacagggctctataatgggatcattgcatttctctgattactaatgagaaggaggcctaccagaaactggccagcgagaccctggaggagctggactggtgtctggaccagctagagaccctacagaccaggcactccgtcagtgagatggcctccaacaagtttaaaaggatgcttaatcgggagctcacccatctctctgaaatgagtcggtctggaaatcaagtgtcagagtttatatcaaacacattcttagataagcaacatgaagtggaaattccttctccaactcagaaggaaaaggagaaaaagaaaagaccaatgtctcagatcagtggagtcaagaaattgatgcacagctctagtctgactaattcaagtatcccaaggtttggagttaaaactgaacaagaagatgtccttgccaaggaactagaagatgtgaacaaatggggtcttcatgttttcagaatagcagagttgtctggtaaccggcccttgactgttatcatgcacaccatttttcaggaacgggatttattaaaaacatttaaaattccagtagatactttaattacatatcttatgactctcgaagaccattaccatgctgatgtggcctatcacaacaatatccatgctgcagatgttgtccagtctactcatgtgctattatctacacctgctttggaggctgtgtttacagatttggagattcttgcagcaatttttgccagtgcaatacatgatgtagatcatcctggtgtgtccaatcaatttctgatcaatacaaactctgaacttgccttgatgtacaatgattcctcagtcttagagaaccatcatttggctgtgggctttaaattgcttcaggaagaaaactgtgacattttccagaatttgaccaaaaaacaaagacaatctttaaggaaaatggtcattgacatcgtacttgcaacagatatgtcaaaacacatgaatctactggctgatttgaagactatggttgaaactaagaaagtgacaagctctggagttcttcttcttgataattattccgataggattcaggttcttcagaatatggtgcactgtgcagatctgagcaacccaacaaagcctctccagctgtaccgccagtggacggaccggataatggaggagttcttccgccaaggagaccgagagagggaacgtggcatggagataagccccatgtgtgacaagcacaatgcttccgtggaaaaatcacaggtgggcttcatagactatattgttcatcccctctgggagacatgggcagacctcgtccaccctgacgcccaggatattttggacactttggaggacaatcgtgaatggtaccagagcacaatccctcagagcccctctcctgcacctgatgacccagaggagggccggcagggtcaaactgagaaattccagtttgaactaactttagaggaagatggtgagtcagacacggaaaaggacagtggcagtcaagtggaagaagacactagctgcagtgactccaagactctttgtactcaagactcagagtctactgaaattccccttgatgaacaggttgaagaggaggcagtaggggaagaagaggaaagccagcctgaagcctgtgtcatagatgatcgttctcctgacacgtaacagtgcaaaaactttcatgccttttttttttttaagtagaaaaattgtttccaaagtgcatgtcacatgccacaaccacggtcacacctcactgtcatctgccaggacgtttgttgaacaaaactgaccttgactactcagtccagcgctcaggaatatcgtaaccagttttttcacctccatgtcatccgagcaaggtggacatcttcacgaacagcgtttttaacaagatttcagcttggtagagctgacaaagcagataaaatctactccaaattattttcaagagagtgtgactcatcaggcagcccaaaagtttattggacttggggtttctattcctttttatttgtttgcaatattttcagaagaaaggcattgcacagagtgaacttaatggacgaagcaacaaatatgtcaagaacaggacatagcacgaatctgttaccagtaggaggaggatgagccacagaaattgcataattttctaatttcaagtcttcctgatacatgactgaatagtgtggttcagtgagctgcactgacctctacattttgtatgatatgtaaaacagattttttgtagagcttacttttattattaaatgtattgaggtattatatttaaaaaaaactatgttcagaacttcatctgccactggttatttttttctaaggagtaacttgcaagttttcagtacaaatctgtgctacactggataaaaatctaatttatgaattttacttgcaccttatagttcatagcaattaactgatttgtagtgattcattgtttgttttatataccaatgacttccatattttaaaagagaaaaacaactttatgttgcaggaaaccctttttgtaagtctttattatttactttgcattttgtttcactctttccagataagcagagttgctcttcaccagtgtttttcttcatgtgcaaagtgactatttgttctataatacttttatgtgtgttatatcaaatgtgtcttaagcttcatgcaaactcagtcatcagttcgtgttgtctgaagcaagtgggagatatataaatacccagtagctaaaatggtcagtcttttttagatgttttcctacttagtatctcctaataacgttttgctgtgtcactagatgttcatttcacaagtgcatgtctttctaataatccacacatttcatgctctaataatccacacatttcatgctcatttttattgtttttacagccagttatagtaagaaaaaggtttttccccttgtgctgctttataatttagcgtgtgtctgaaccttatccatgtttgctagatgaggtcttgtcaaatatatcactaccattgtcaccggtgaaaagaaacaggtagttaagttagggttaacattcatttcaaccacgaggttgtatatcatgactagcttttactcttggtttacagagaaaagttaaacagccaactaggcagtttttaagaatattaacaatatattaacaaacaccaatacaactaatcctatttggttttaatgatttcaccatgggattaagaactatatcaggaacatccctgagaaacggttttaagtgtagcaactactcttccttaatggacagccacataacgtgtaggaagtcctttatcacttatcctcgatccataagcatatcttgcagaggggaactacttctttaaacacatggagggaaagaagatgatgccactggcaccagagggttagtactgtgatgcatcctaaaatatttattatattggtaaaaattctggttaaataaaaaattagagatcactcttggctgatttcagcaccaggaactgtattacagttttagagattaattcctagtgtttacctgattatagcagttggcatcatggggcatttaattctgactttatccccacgtcagccttaataaagtcttctttaccttctctatgaagactttaaagcccaaataatcatttttcacattgatattcaagaattgagatagatagaagccaaagtgggtatctgacaagtggaaaatcaaacgtttaagaagaattacaactctgaaaagcatttatatgtggaacttctcaaggagcctcctggggactggaaagtaagtcatcagccaggcaaatgactcatgctgaagagagtccccatttcagtcccctgagatctagctgatgcttagatcctttgaaataaaaattatgtctttataactctgatcttttacataaagcagaagaggaatcaactagttaattgcaaggtttctactctgtttcctctgtaaagatcagatggtaatctttcaaataagaaaaaaataaagacgtatgtttgaccaagtagtttcacaagaatatttgggaacttgtttcttttaattttatttgtccctgagtgaagtctagaaagaaaggtaaagagtctagagtttattcctctttccaaaacattctcattcctctcctccctacacttagtatttcccccacagagtgcctagaatcttaataatgaataaaataaaaagcagcaatatgtcattaacaaatccagacctgaaagggtaaagggtttataactgcactaataaagagaggctctttttttttcttccagtttgttggtttttaatggtaccgtgttgtaaagatacccactaatggacaatcaaattgcagaaaaggctcaatatccaagagacagggactaatgcactgtacaatctgcttatccttgcccttctctcttgccaaagtgtgcttcagaaatatatactgctttaaaaaagaataaaagaatatccttttacaagtggctttacatttcctaaaatgccataagaaaatgcaatatctgggtactgtatggggaaaaaaatgtccaagtttgtgtaaaaccagtgcatttcagcttgcaagttactgaacacaataatgctgttttaattttgttttatatcagttaaaattcacaataatgtagatagaacaaattacagacaaggaaagaaaaaacttgaatgaaatggattttacagaaagctttatgataatttttgaatgcattatttattttttgtgccatgcattttttttctcaccaaatgaccttacctgtaatacagtcttgtttgtctgtttacaaccatgtatttattgcaatgtacatactgtaatgttaattgtaaattatctgttcttattaaaacatcatcccatgatgggatggtgttgatatatttggaaactcttggtgagagaatgaatggtgtgtatacatactctgtacatttttcttttctcctgtaatatagtcttgtcaccttagagcttgtttatggaagattcaagaaaactataaaatacttaaagatatataaatttaaaaaaacatagctgcaggtctttggtcccagggctgtgccttaactttaaccaatattttcttctgttttgctgcatttgaaaggtaacagtggagctagggctgggcattttacatccaggcttttaattgattagaattctgccaataggtggattttacaaaaccacagacaacctctgaaagattctgagacccttttgagacagaagctcttaagtacttcttgccagggagcagcactgcatgtgtgatggttgtttgccatctgttgatcaggaactacttcagctacttgcatttgattatttcctttttttttttttttaactcggaaacacaactggggaaatatattctttcccagtgattataaacaatctttttcttttttttaagtccttttggcttctagagctcataggaaaatggacttgatttgaaattggagccagagtttactcgtgttggttatctattcatcagcttcctgacatgttaagagaatacattaaagagaaaatactgttttttaatcctaaaatttttcttccactaagataaaccaaatgtccttacatatatgtaaacccatctatttaaacgcaaaggtgggttgatgtcagtttacatagcagaaagcattcactatcctctaagatttgtttctgcaaaactttcattgctttagaattttaaaatttcaccttgtacaatggccagcccctaaagcaggaaacatttataatggattatatggaaacatcctcccagtacttgcccagcccttgaatcatgtggcttttcagtgaaaggaaagattctttttctaggaaaaatgagcctattttattttattttattttattttttgacacaaactgtagattttagcagccctggcccaaaggaatttgattacttttgttttaaacagtacaaaggggacactataattacaaaaacatccttaactgatttgagttgtttttatttctttggatatattttcagagtggtaaattgtgtgtgagaattacaaatgattattcttttagtggtttcttagcctctcttacagcccacggggatagtactgtacatcaataccttcatatgaaatttttatatgcaatgaaaataaaagcatgggttgattctgcctatttatgactcaatcttttacaaataaaagattattcattttaaattatagttcaatcagcatgtctctt

SEQ ID NO: 10829 - protein, 507 aa, Homo sapiens; identical to SEQ ID NO: 10817

SEQ ID NO: 10830 - DNA, 7264 bp, Homo sapiens
cccctctcggtagccctgaggctctggcgccttcaagtgagaagctaagcaccagcctctgctgggctgcagaagcggcggcggcggcagcagcagcagcagcatcaggaaggcgctcgggccagcgcggtgaacccgggctgggcagcaggtcgcggagccgcgagccaggatggaggcagagggcagcagcgcgccggcccgggcgggcagcggagagggcagcgacagcgccggcggggccacgctcaaagcccccaagcatctctggaggcacgagcagcaccaccagtacccgctccggcagccccagttccgcctcctgcatccccatcaccacctgcccccgccgccgccaccctcgccccagccccagccccagtgtccgctacagccgccgccgccgccccccctgccgccgcccccgccgccgcccggggctgcccgcggccgctacgcctcgagcggggccaccggccgcgtccggcatcgcggctactcggacaccgagcgctacctgtactgtcgcgccatggaccgcacctcctacgcggtggagaccggccaccggcccggcctgaagaaatccaggatgtcctggccctcctcgttccagggactcaggcgttttgatgtggacaatggcacatctgcgggacggagtcccttggatcccatgaccagcccaggatccgggctaattctccaagcaaattttgtccacagtcaacgacgggagtccttcctgtatcgatccgacagcgattatgacctctctccaaagtctatgtcccggaactcctccattgccagtgatatacacggagatgacttgattgtgactccatttgctcaggtcttggccagtctgcgaactgtacgaaacaactttgctgcattaactaatttgcaagatcgagcacctagcaaaagatcacccatgtgcaaccaaccatccatcaacaaagccaccataacagaggaggcctaccagaaactggccagcgagaccctggaggagctggactggtgtctggaccagctagagaccctacagaccaggcactccgtcagtgagatggcctccaacaagtttaaaaggatgcttaatcgggagctcacccatctctctgaaatgagtcggtctggaaatcaagtgtcagagtttatatcaaacacattcttagataagcaacatgaagtggaaattccttctccaactcagaaggaaaaggagaaaaagaaaagaccaatgtctcagatcagtggagtcaagaaattgatgcacagctctagtctgactaattcaagtatcccaaggtttggagttaaaactgaacaagaagatgtccttgccaaggaactagaagatgtgaacaaatggggtcttcatgttttcagaatagcagagttgtctggtaaccggcccttgactgttatcatgcacaccatttttcaggaacgggatttattaaaaacatttaaaattccagtagatactttaattacatatcttatgactctcgaagaccattaccatgctgatgtggcctatcacaacaatatccatgctgcagatgttgtccagtctactcatgtgctattatctacacctgctttggaggctgtgtttacagatttggagattcttgcagcaatttttgccagtgcaatacatgatgtagatcatcctggtgtgtccaatcaatttctgatcaatacaaactctgaacttgccttgatgtacaatgattcctcagtcttagagaaccatcatttggctgtgggctttaaattgcttcaggaagaaaactgtgacattttccagaatttgaccaaaaaacaaagacaatctttaaggaaaatggtcattgacatcgtacttgcaacagatatgtcaaaacacatgaatctactggctgatttgaagactatggttgaaactaagaaagtgacaagctctggagttcttcttcttgataattattccgataggattcaggttcttcagaatatggtgcactgtgcagatctgagcaacccaacaaagcctctccagctgtaccgccagtggacggaccggataatggaggagttcttccgccaaggagaccgagagagggaacgtggcatggagataagccccatgtgtgacaagcacaatgcttccgtggaaaaatcacaggtgggcttcatagactatattgttcatcccctctgggagacatgggcagacctcgtccaccctgacgcccaggatattttggacactttggaggacaatcgtgaatggtaccagagcacaatccctcagagcccctctcctgcacctgatgacccagaggagggccggcagggtcaaactgagaaattccagtttgaactaactttagaggaagatggtgagtcagacacggaaaaggacagtggcagtcaagtggaagaagacactagctgcagtgactccaagactctttgtactcaagactcagagtctactgaaattccccttgatgaacaggttgaagaggaggcagtaggggaagaagaggaaagccagcctgaagcctgtgtcatagatgatcgttctcctgacacgtaacagtgcaaaaactttcatgccttttttttttttaagtagaaaaattgtttccaaagtgcatgtcacatgccacaaccacggtcacacctcactgtcatctgccaggacgtttgttgaacaaaactgaccttgactactcagtccagcgctcaggaatatcgtaaccagttttttcacctccatgtcatccgagcaaggtggacatcttcacgaacagcgtttttaacaagatttcagcttggtagagctgacaaagcagataaaatctactccaaattattttcaagagagtgtgactcatcaggcagcccaaaagtttattggacttggggtttctattcctttttatttgtttgcaatattttcagaagaaaggcattgcacagagtgaacttaatggacgaagcaacaaatatgtcaagaacaggacatagcacgaatctgttaccagtaggaggaggatgagccacagaaattgcataattttctaatttcaagtcttcctgatacatgactgaatagtgtggttcagtgagctgcactgacctctacattttgtatgatatgtaaaacagattttttgtagagcttacttttattattaaatgtattgaggtattatatttaaaaaaaactatgttcagaacttcatctgccactggttatttttttctaaggagtaacttgcaagttttcagtacaaatctgtgctacactggataaaaatctaatttatgaattttacttgcaccttatagttcatagcaattaactgatttgtagtgattcattgtttgttttatataccaatgacttccatattttaaaagagaaaaacaactttatgttgcaggaaaccctttttgtaagtctttattatttactttgcattttgtttcactctttccagataagcagagttgctcttcaccagtgtttttcttcatgtgcaaagtgactatttgttctataatacttttatgtgtgttatatcaaatgtgtcttaagcttcatgcaaactcagtcatcagttcgtgttgtctgaagcaagtgggagatatataaatacccagtagctaaaatggtcagtcttttttagatgttttcctacttagtatctcctaataacgttttgctgtgtcactagatgttcatttcacaagtgcatgtctttctaataatccacacatttcatgctctaataatccacacatttcatgctcatttttattgtttttacagccagttatagtaagaaaaaggtttttccccttgtgctgctttataatttagcgtgtgtctgaaccttatccatgtttgctagatgaggtcttgtcaaatatatcactaccattgtcaccggtgaaaagaaacaggtagttaagttagggttaacattcatttcaaccacgaggttgtatatcatgactagcttttactcttggtttacagagaaaagttaaacagccaactaggcagtttttaagaatattaacaatatattaacaaacaccaatacaactaatcctatttggttttaatgatttcaccatgggattaagaactatatcaggaacatccctgagaaacggttttaagtgtagcaactactcttccttaatggacagccacataacgtgtaggaagtcctttatcacttatcctcgatccataagcatatcttgcagaggggaactacttctttaaacacatggagggaaagaagatgatgccactggcaccagagggttagtactgtgatgcatcctaaaatatttattatattggtaaaaattctggttaaataaaaaattagagatcactcttggctgatttcagcaccaggaactgtattacagttttagagattaattcctagtgtttacctgattatagcagttggcatcatggggcatttaattctgactttatccccacgtcagccttaataaagtcttctttaccttctctatgaagactttaaagcccaaataatcatttttcacattgatattcaagaattgagatagatagaagccaaagtgggtatctgacaagtggaaaatcaaacgtttaagaagaattacaactctgaaaagcatttatatgtggaacttctcaaggagcctcctggggactggaaagtaagtcatcagccaggcaaatgactcatgctgaagagagtccccatttcagtcccctgagatctagctgatgcttagatcctttgaaataaaaattatgtctttataactctgatcttttacataaagcagaagaggaatcaactagttaattgcaaggtttctactctgtttcctctgtaaagatcagatggtaatctttcaaataagaaaaaaataaagacgtatgtttgaccaagtagtttcacaagaatatttgggaacttgtttcttttaattttatttgtccctgagtgaagtctagaaagaaaggtaaagagtctagagtttattcctctttccaaaacattctcattcctctcctccctacacttagtatttcccccacagagtgcctagaatcttaataatgaataaaataaaaagcagcaatatgtcattaacaaatccagacctgaaagggtaaagggtttataactgcactaataaagagaggctctttttttttcttccagtttgttggtttttaatggtaccgtgttgtaaagatacccactaatggacaatcaaattgcagaaaaggctcaatatccaagagacagggactaatgcactgtacaatctgcttatccttgcccttctctcttgccaaagtgtgcttcagaaatatatactgctttaaaaaagaataaaagaatatccttttacaagtggctttacatttcctaaaatgccataagaaaatgcaatatctgggtactgtatggggaaaaaaatgtccaagtttgtgtaaaaccagtgcatttcagcttgcaagttactgaacacaataatgctgttttaattttgttttatatcagttaaaattcacaataatgtagatagaacaaattacagacaaggaaagaaaaaacttgaatgaaatggattttacagaaagctttatgataatttttgaatgcattatttattttttgtgccatgcattttttttctcaccaaatgaccttacctgtaatacagtcttgtttgtctgtttacaaccatgtatttattgcaatgtacatactgtaatgttaattgtaaattatctgttcttattaaaacatcatcccatgatgggatggtgttgatatatttggaaactcttggtgagagaatgaatggtgtgtatacatactctgtacatttttcttttctcctgtaatatagtcttgtcaccttagagcttgtttatggaagattcaagaaaactataaaatacttaaagatatataaatttaaaaaaacatagctgcaggtctttggtcccagggctgtgccttaactttaaccaatattttcttctgttttgctgcatttgaaaggtaacagtggagctagggctgggcattttacatccaggcttttaattgattagaattctgccaataggtggattttacaaaaccacagacaacctctgaaagattctgagacccttttgagacagaagctcttaagtacttcttgccagggagcagcactgcatgtgtgatggttgtttgccatctgttgatcaggaactacttcagctacttgcatttgattatttcctttttttttttttttaactcggaaacacaactggggaaatatattctttcccagtgattataaacaatctttttcttttttttaagtccttttggcttctagagctcataggaaaatggacttgatttgaaattggagccagagtttactcgtgttggttatctattcatcagcttcctgacatgttaagagaatacattaaagagaaaatactgttttttaatcctaaaatttttcttccactaagataaaccaaatgtccttacatatatgtaaacccatctatttaaacgcaaaggtgggttgatgtcagtttacatagcagaaagcattcactatcctctaagatttgtttctgcaaaactttcattgctttagaattttaaaatttcaccttgtacaatggccagcccctaaagcaggaaacatttataatggattatatggaaacatcctcccagtacttgcccagcccttgaatcatgtggcttttcagtgaaaggaaagattctttttctaggaaaaatgagcctattttattttattttattttattttttgacacaaactgtagattttagcagccctggcccaaaggaatttgattacttttgttttaaacagtacaaaggggacactataattacaaaaacatccttaactgatttgagttgtttttatttctttggatatattttcagagtggtaaattgtgtgtgagaattacaaatgattattcttttagtggtttcttagcctctcttacagcccacggggatagtactgtacatcaataccttcatatgaaatttttatatgcaatgaaaataaaagcatgggttgattctgcctatttatgactcaatcttttacaaataaaagattattcattttaaattatagttcaatcagcatgtctctt

SEQ ID NO: 10831 - protein, 809 aa, Homo sapiens
MEAEGSSAPARAGSGEGSDSAGGATLKAPKHLWRHEQHHQYPLRQPQFRLLHPHHHLPPPPPPSPQPQPQCPLQPPPPPPLPPPPPPPGAARGRYASSGATGRVRHRGYSDTERYLYCRAMDRTSYAVETGHRPGLKKSRMSWPSSFQGLRRFDVDNGTSAGRSPLDPMTSPGSGLILQANFVHSQRRESFLYRSDSDYDLSPKSMSRNSSIASDIHGDDLIVTPFAQVLASLRTVRNNFAALTNLQDRAPSKRSPMCNQPSINKATITEEAYQKLASETLEELDWCLDQLETLQTRHSVSEMASNKFKRMLNRELTHLSEMSRSGNQVSEFISNTFLDKQHEVEIPSPTQKEKEKKKRPMSQISGVKKLMHSSSLTNSSIPRFGVKTEQEDVLAKELEDVNKWGLHVFRIAELSGNRPLTVIMHTIFQERDLLKTFKIPVDTLITYLMTLEDHYHADVAYHNNIHAADVVQSTHVLLSTPALEAVFTDLEILAAIFASAIHDVDHPGVSNQFLINTNSELALMYNDSSVLENHHLAVGFKLLQEENCDIFQNLTKKQRQSLRKMVIDIVLATDMSKHMNLLADLKTMVETKKVTSSGVLLLDNYSDRIQVLQNMVHCADLSNPTKPLQLYRQWTDRIMEEFFRQGDRERERGMEISPMCDKHNASVEKSQVGFIDYIVHPLWETWADLVHPDAQDILDTLEDNREWYQSTIPQSPSPAPDDPEEGRQGQTEKFQFELTLEEDGESDTEKDSGSQVEEDTSCSDSKTLCTQDSESTEIPLDEQVEEEAVGEEEESQPEACVIDDRSPDT

SEQ ID NO: 10832 - DNA, 6545 bp, Homo sapiens
agttccttatttggtagcttttgacaggactagcctttcttgcaactaagcatcttgacatacattattcattaagccctggagctcgggagagaaagatgcagacccttagatctttagatattcctttatcacgtggattttctttattcagaatagttgctgaattttgtgccattctggagtcttacaaatggcatgtattcgatgggaagacggctggatgggatttaatgcgaggctttcttatgtatacttaattaccaaaaatctttaaaaactcatactctgcgtggcttgtggaggttgttaaagtgtcgagattttgaagctaaatacattttagagcttactatatatatacatatatatatatatacatataatcaatcaaaaatgcctgaagcaaactatttactgtcagtgtcttggggctacataaagtttaaaaggatgcttaatcgggagctcacccatctctctgaaatgagtcggtctggaaatcaagtgtcagagtttatatcaaacacattcttagataagcaacatgaagtggaaattccttctccaactcagaaggaaaaggagaaaaagaaaagaccaatgtctcagatcagtggagtcaagaaattgatgcacagctctagtctgactaattcaagtatcccaaggtttggagttaaaactgaacaagaagatgtccttgccaaggaactagaagatgtgaacaaatggggtcttcatgttttcagaatagcagagttgtctggtaaccggcccttgactgttatcatgcacaccatttttcaggaacgggatttattaaaaacatttaaaattccagtagatactttaattacatatcttatgactctcgaagaccattaccatgctgatgtggcctatcacaacaatatccatgctgcagatgttgtccagtctactcatgtgctattatctacacctgctttggaggctgtgtttacagatttggagattcttgcagcaatttttgccagtgcaatacatgatgtagatcatcctggtgtgtccaatcaatttctgatcaatacaaactctgaacttgccttgatgtacaatgattcctcagtcttagagaaccatcatttggctgtgggctttaaattgcttcaggaagaaaactgtgacattttccagaatttgaccaaaaaacaaagacaatctttaaggaaaatggtcattgacatcgtacttgcaacagatatgtcaaaacacatgaatctactggctgatttgaagactatggttgaaactaagaaagtgacaagctctggagttcttcttcttgataattattccgataggattcaggttcttcagaatatggtgcactgtgcagatctgagcaacccaacaaagcctctccagctgtaccgccagtggacggaccggataatggaggagttcttccgccaaggagaccgagagagggaacgtggcatggagataagccccatgtgtgacaagcacaatgcttccgtggaaaaatcacaggtgggcttcatagactatattgttcatcccctctgggagacatgggcagacctcgtccaccctgacgcccaggatattttggacactttggaggacaatcgtgaatggtaccagagcacaatccctcagagcccctctcctgcacctgatgacccagaggagggccggcagggtcaaactgagaaattccagtttgaactaactttagaggaagatggtgagtcagacacggaaaaggacagtggcagtcaagtggaagaagacactagctgcagtgactccaagactctttgtactcaagactcagagtctactgaaattccccttgatgaacaggttgaagaggaggcagtaggggaagaagaggaaagccagcctgaagcctgtgtcatagatgatcgttctcctgacacgtaacagtgcaaaaactttcatgccttttttttttttaagtagaaaaattgtttccaaagtgcatgtcacatgccacaaccacggtcacacctcactgtcatctgccaggacgtttgttgaacaaaactgaccttgactactcagtccagcgctcaggaatatcgtaaccagttttttcacctccatgtcatccgagcaaggtggacatcttcacgaacagcgtttttaacaagatttcagcttggtagagctgacaaagcagataaaatctactccaaattattttcaagagagtgtgactcatcaggcagcccaaaagtttattggacttggggtttctattcctttttatttgtttgcaatattttcagaagaaaggcattgcacagagtgaacttaatggacgaagcaacaaatatgtcaagaacaggacatagcacgaatctgttaccagtaggaggaggatgagccacagaaattgcataattttctaatttcaagtcttcctgatacatgactgaatagtgtggttcagtgagctgcactgacctctacattttgtatgatatgtaaaacagattttttgtagagcttacttttattattaaatgtattgaggtattatatttaaaaaaaactatgttcagaacttcatctgccactggttatttttttctaaggagtaacttgcaagttttcagtacaaatctgtgctacactggataaaaatctaatttatgaattttacttgcaccttatagttcatagcaattaactgatttgtagtgattcattgtttgttttatataccaatgacttccatattttaaaagagaaaaacaactttatgttgcaggaaaccctttttgtaagtctttattatttactttgcattttgtttcactctttccagataagcagagttgctcttcaccagtgtttttcttcatgtgcaaagtgactatttgttctataatacttttatgtgtgttatatcaaatgtgtcttaagcttcatgcaaactcagtcatcagttcgtgttgtctgaagcaagtgggagatatataaatacccagtagctaaaatggtcagtcttttttagatgttttcctacttagtatctcctaataacgttttgctgtgtcactagatgttcatttcacaagtgcatgtctttctaataatccacacatttcatgctctaataatccacacatttcatgctcatttttattgtttttacagccagttatagtaagaaaaaggtttttccccttgtgctgctttataatttagcgtgtgtctgaaccttatccatgtttgctagatgaggtcttgtcaaatatatcactaccattgtcaccggtgaaaagaaacaggtagttaagttagggttaacattcatttcaaccacgaggttgtatatcatgactagcttttactcttggtttacagagaaaagttaaacagccaactaggcagtttttaagaatattaacaatatattaacaaacaccaatacaactaatcctatttggttttaatgatttcaccatgggattaagaactatatcaggaacatccctgagaaacggttttaagtgtagcaactactcttccttaatggacagccacataacgtgtaggaagtcctttatcacttatcctcgatccataagcatatcttgcagaggggaactacttctttaaacacatggagggaaagaagatgatgccactggcaccagagggttagtactgtgatgcatcctaaaatatttattatattggtaaaaattctggttaaataaaaaattagagatcactcttggctgatttcagcaccaggaactgtattacagttttagagattaattcctagtgtttacctgattatagcagttggcatcatggggcatttaattctgactttatccccacgtcagccttaataaagtcttctttaccttctctatgaagactttaaagcccaaataatcatttttcacattgatattcaagaattgagatagatagaagccaaagtgggtatctgacaagtggaaaatcaaacgtttaagaagaattacaactctgaaaagcatttatatgtggaacttctcaaggagcctcctggggactggaaagtaagtcatcagccaggcaaatgactcatgctgaagagagtccccatttcagtcccctgagatctagctgatgcttagatcctttgaaataaaaattatgtctttataactctgatcttttacataaagcagaagaggaatcaactagttaattgcaaggtttctactctgtttcctctgtaaagatcagatggtaatctttcaaataagaaaaaaataaagacgtatgtttgaccaagtagtttcacaagaatatttgggaacttgtttcttttaattttatttgtccctgagtgaagtctagaaagaaaggtaaagagtctagagtttattcctctttccaaaacattctcattcctctcctccctacacttagtatttcccccacagagtgcctagaatcttaataatgaataaaataaaaagcagcaatatgtcattaacaaatccagacctgaaagggtaaagggtttataactgcactaataaagagaggctctttttttttcttccagtttgttggtttttaatggtaccgtgttgtaaagatacccactaatggacaatcaaattgcagaaaaggctcaatatccaagagacagggactaatgcactgtacaatctgcttatccttgcccttctctcttgccaaagtgtgcttcagaaatatatactgctttaaaaaagaataaaagaatatccttttacaagtggctttacatttcctaaaatgccataagaaaatgcaatatctgggtactgtatggggaaaaaaatgtccaagtttgtgtaaaaccagtgcatttcagcttgcaagttactgaacacaataatgctgttttaattttgttttatatcagttaaaattcacaataatgtagatagaacaaattacagacaaggaaagaaaaaacttgaatgaaatggattttacagaaagctttatgataatttttgaatgcattatttattttttgtgccatgcattttttttctcaccaaatgaccttacctgtaatacagtcttgtttgtctgtttacaaccatgtatttattgcaatgtacatactgtaatgttaattgtaaattatctgttcttattaaaacatcatcccatgatgggatggtgttgatatatttggaaactcttggtgagagaatgaatggtgtgtatacatactctgtacatttttcttttctcctgtaatatagtcttgtcaccttagagcttgtttatggaagattcaagaaaactataaaatacttaaagatatataaatttaaaaaaacatagctgcaggtctttggtcccagggctgtgccttaactttaaccaatattttcttctgttttgctgcatttgaaaggtaacagtggagctagggctgggcattttacatccaggcttttaattgattagaattctgccaataggtggattttacaaaaccacagacaacctctgaaagattctgagacccttttgagacagaagctcttaagtacttcttgccagggagcagcactgcatgtgtgatggttgtttgccatctgttgatcaggaactacttcagctacttgcatttgattatttcctttttttttttttttaactcggaaacacaactggggaaatatattctttcccagtgattataaacaatctttttcttttttttaagtccttttggcttctagagctcataggaaaatggacttgatttgaaattggagccagagtttactcgtgttggttatctattcatcagcttcctgacatgttaagagaatacattaaagagaaaatactgttttttaatcctaaaatttttcttccactaagataaaccaaatgtccttacatatatgtaaacccatctatttaaacgcaaaggtgggttgatgtcagtttacatagcagaaagcattcactatcctctaagatttgtttctgcaaaactttcattgctttagaattttaaaatttcaccttgtacaatggccagcccctaaagcaggaaacatttataatggattatatggaaacatcctcccagtacttgcccagcccttgaatcatgtggcttttcagtgaaaggaaagattctttttctaggaaaaatgagcctattttattttattttattttattttttgacacaaactgtagattttagcagccctggcccaaaggaatttgattacttttgttttaaacagtacaaaggggacactataattacaaaaacatccttaactgatttgagttgtttttatttctttggatatattttcagagtggtaaattgtgtgtgagaattacaaatgattattcttttagtggtttcttagcctctcttacagcccacggggatagtactgtacatcaataccttcatatgaaatttttatatgcaatgaaaataaaagcatgggttgattctgcct

SEQ ID NO: 10833 - protein, 518 aa, Homo sapiens; identical to SEQ ID NO: 10813

SEQ ID NO: 10834 - DNA, 6995 bp, Homo sapiens
ggggggatggcactgcgaggtggcggggcccccggggcagagctcgaggggaaggacgcggcgggtggcacggacagggacaggcttttgcaattcggaatcttttcgtaagggggttgaggaggagccaggcagcgccgagggccgagaggggcgtgagggggagtgttcccggaaagctgcggcgttggagccgcgctgcgcctgccgcccgaggagttgagaaagaaaacaggaaacgtggtggccgcgcacccggccgcggctgattcattcacttcaagtgccgtgcagaaggctcggcaggcggggcgggcgtggggccgcggctccgggttggggaccgaggagatccggctgtggaccagacgctcctctgcggggcgggcacccaagcgcgctcgccaccccctcgccatccgctagagccgggctcctggactgggactcgggcccgccgcacagttgaaaagtcgcatagtggtttttccgctcgcgtcgctgtgtgaaagttggctcgccgctctttgcacgccctccctggaggccgacccgagacgccaagctggagagaccgtgcctccccgaggccggccgccccgcgagcacagcctccgcccccgttgcactgccgggctgggcaatatgaaggagcagccctcatgtgccggcaccgggcatccgagcatggcggggtatggcaggatggccccctttgaactcgctagcggacccgtgaagcgcttgagaactgagtccccctttccctgtctcttcgcagaggaggcctaccagaaactggccagcgagaccctggaggagctggactggtgtctggaccagctagagaccctacagaccaggcactccgtcagtgagatggcctccaacaagtttaaaaggatgcttaatcgggagctcacccatctctctgaaatgagtcggtctggaaatcaagtgtcagagtttatatcaaacacattcttagataagcaacatgaagtggaaattccttctccaactcagaaggaaaaggagaaaaagaaaagaccaatgtctcagatcagtggagtcaagaaattgatgcacagctctagtctgactaattcaagtatcccaaggtttggagttaaaactgaacaagaagatgtccttgccaaggaactagaagatgtgaacaaatggggtcttcatgttttcagaatagcagagttgtctggtaaccggcccttgactgttatcatgcacaccatttttcaggaacgggatttattaaaaacatttaaaattccagtagatactttaattacatatcttatgactctcgaagaccattaccatgctgatgtggcctatcacaacaatatccatgctgcagatgttgtccagtctactcatgtgctattatctacacctgctttggaggctgtgtttacagatttggagattcttgcagcaatttttgccagtgcaatacatgatgtagatcatcctggtgtgtccaatcaatttctgatcaatacaaactctgaacttgccttgatgtacaatgattcctcagtcttagagaaccatcatttggctgtgggctttaaattgcttcaggaagaaaactgtgacattttccagaatttgaccaaaaaacaaagacaatctttaaggaaaatggtcattgacatcgtacttgcaacagatatgtcaaaacacatgaatctactggctgatttgaagactatggttgaaactaagaaagtgacaagctctggagttcttcttcttgataattattccgataggattcaggttcttcagaatatggtgcactgtgcagatctgagcaacccaacaaagcctctccagctgtaccgccagtggacggaccggataatggaggagttcttccgccaaggagaccgagagagggaacgtggcatggagataagccccatgtgtgacaagcacaatgcttccgtggaaaaatcacaggtgggcttcatagactatattgttcatcccctctgggagacatgggcagacctcgtccaccctgacgcccaggatattttggacactttggaggacaatcgtgaatggtaccagagcacaatccctcagagcccctctcctgcacctgatgacccagaggagggccggcagggtcaaactgagaaattccagtttgaactaactttagaggaagatggtgagtcagacacggaaaaggacagtggcagtcaagtggaagaagacactagctgcagtgactccaagactctttgtactcaagactcagagtctactgaaattccccttgatgaacaggttgaagaggaggcagtaggggaagaagaggaaagccagcctgaagcctgtgtcatagatgatcgttctcctgacacgtaacagtgcaaaaactttcatgccttttttttttttaagtagaaaaattgtttccaaagtgcatgtcacatgccacaaccacggtcacacctcactgtcatctgccaggacgtttgttgaacaaaactgaccttgactactcagtccagcgctcaggaatatcgtaaccagttttttcacctccatgtcatccgagcaaggtggacatcttcacgaacagcgtttttaacaagatttcagcttggtagagctgacaaagcagataaaatctactccaaattattttcaagagagtgtgactcatcaggcagcccaaaagtttattggacttggggtttctattcctttttatttgtttgcaatattttcagaagaaaggcattgcacagagtgaacttaatggacgaagcaacaaatatgtcaagaacaggacatagcacgaatctgttaccagtaggaggaggatgagccacagaaattgcataattttctaatttcaagtcttcctgatacatgactgaatagtgtggttcagtgagctgcactgacctctacattttgtatgatatgtaaaacagattttttgtagagcttacttttattattaaatgtattgaggtattatatttaaaaaaaactatgttcagaacttcatctgccactggttatttttttctaaggagtaacttgcaagttttcagtacaaatctgtgctacactggataaaaatctaatttatgaattttacttgcaccttatagttcatagcaattaactgatttgtagtgattcattgtttgttttatataccaatgacttccatattttaaaagagaaaaacaactttatgttgcaggaaaccctttttgtaagtctttattatttactttgcattttgtttcactctttccagataagcagagttgctcttcaccagtgtttttcttcatgtgcaaagtgactatttgttctataatacttttatgtgtgttatatcaaatgtgtcttaagcttcatgcaaactcagtcatcagttcgtgttgtctgaagcaagtgggagatatataaatacccagtagctaaaatggtcagtcttttttagatgttttcctacttagtatctcctaataacgttttgctgtgtcactagatgttcatttcacaagtgcatgtctttctaataatccacacatttcatgctctaataatccacacatttcatgctcatttttattgtttttacagccagttatagtaagaaaaaggtttttccccttgtgctgctttataatttagcgtgtgtctgaaccttatccatgtttgctagatgaggtcttgtcaaatatatcactaccattgtcaccggtgaaaagaaacaggtagttaagttagggttaacattcatttcaaccacgaggttgtatatcatgactagcttttactcttggtttacagagaaaagttaaacagccaactaggcagtttttaagaatattaacaatatattaacaaacaccaatacaactaatcctatttggttttaatgatttcaccatgggattaagaactatatcaggaacatccctgagaaacggttttaagtgtagcaactactcttccttaatggacagccacataacgtgtaggaagtcctttatcacttatcctcgatccataagcatatcttgcagaggggaactacttctttaaacacatggagggaaagaagatgatgccactggcaccagagggttagtactgtgatgcatcctaaaatatttattatattggtaaaaattctggttaaataaaaaattagagatcactcttggctgatttcagcaccaggaactgtattacagttttagagattaattcctagtgtttacctgattatagcagttggcatcatggggcatttaattctgactttatccccacgtcagccttaataaagtcttctttaccttctctatgaagactttaaagcccaaataatcatttttcacattgatattcaagaattgagatagatagaagccaaagtgggtatctgacaagtggaaaatcaaacgtttaagaagaattacaactctgaaaagcatttatatgtggaacttctcaaggagcctcctggggactggaaagtaagtcatcagccaggcaaatgactcatgctgaagagagtccccatttcagtcccctgagatctagctgatgcttagatcctttgaaataaaaattatgtctttataactctgatcttttacataaagcagaagaggaatcaactagttaattgcaaggtttctactctgtttcctctgtaaagatcagatggtaatctttcaaataagaaaaaaataaagacgtatgtttgaccaagtagtttcacaagaatatttgggaacttgtttcttttaattttatttgtccctgagtgaagtctagaaagaaaggtaaagagtctagagtttattcctctttccaaaacattctcattcctctcctccctacacttagtatttcccccacagagtgcctagaatcttaataatgaataaaataaaaagcagcaatatgtcattaacaaatccagacctgaaagggtaaagggtttataactgcactaataaagagaggctctttttttttcttccagtttgttggtttttaatggtaccgtgttgtaaagatacccactaatggacaatcaaattgcagaaaaggctcaatatccaagagacagggactaatgcactgtacaatctgcttatccttgcccttctctcttgccaaagtgtgcttcagaaatatatactgctttaaaaaagaataaaagaatatccttttacaagtggctttacatttcctaaaatgccataagaaaatgcaatatctgggtactgtatggggaaaaaaatgtccaagtttgtgtaaaaccagtgcatttcagcttgcaagttactgaacacaataatgctgttttaattttgttttatatcagttaaaattcacaataatgtagatagaacaaattacagacaaggaaagaaaaaacttgaatgaaatggattttacagaaagctttatgataatttttgaatgcattatttattttttgtgccatgcattttttttctcaccaaatgaccttacctgtaatacagtcttgtttgtctgtttacaaccatgtatttattgcaatgtacatactgtaatgttaattgtaaattatctgttcttattaaaacatcatcccatgatgggatggtgttgatatatttggaaactcttggtgagagaatgaatggtgtgtatacatactctgtacatttttcttttctcctgtaatatagtcttgtcaccttagagcttgtttatggaagattcaagaaaactataaaatacttaaagatatataaatttaaaaaaacatagctgcaggtctttggtcccagggctgtgccttaactttaaccaatattttcttctgttttgctgcatttgaaaggtaacagtggagctagggctgggcattttacatccaggcttttaattgattagaattctgccaataggtggattttacaaaaccacagacaacctctgaaagattctgagacccttttgagacagaagctcttaagtacttcttgccagggagcagcactgcatgtgtgatggttgtttgccatctgttgatcaggaactacttcagctacttgcatttgattatttcctttttttttttttttaactcggaaacacaactggggaaatatattctttcccagtgattataaacaatctttttcttttttttaagtccttttggcttctagagctcataggaaaatggacttgatttgaaattggagccagagtttactcgtgttggttatctattcatcagcttcctgacatgttaagagaatacattaaagagaaaatactgttttttaatcctaaaatttttcttccactaagataaaccaaatgtccttacatatatgtaaacccatctatttaaacgcaaaggtgggttgatgtcagtttacatagcagaaagcattcactatcctctaagatttgtttctgcaaaactttcattgctttagaattttaaaatttcaccttgtacaatggccagcccctaaagcaggaaacatttataatggattatatggaaacatcctcccagtacttgcccagcccttgaatcatgtggcttttcagtgaaaggaaagattctttttctaggaaaaatgagcctattttattttattttattttattttttgacacaaactgtagattttagcagccctggcccaaaggaatttgattacttttgttttaaacagtacaaaggggacactataattacaaaaacatccttaactgatttgagttgtttttatttctttggatatattttcagagtggtaaattgtgtgtgagaattacaaatgattattcttttagtggtttcttagcctctcttacagcccacggggatagtactgtacatcaataccttcatatgaaatttttatatgcaatgaaaataaaagcatgggttgattctgcct

SEQ ID NO: 10835 - protein, 585 aa, Homo sapiens; identical to SEQ ID NO: 10815

SEQ ID NO: 10836 - DNA, 6909 bp, Homo sapiens
ggggggatggcactgcgaggtggcggggcccccggggcagagctcgaggggaaggacgcggcgggtggcacggacagggacaggcttttgcaattcggaatcttttcgtaagggggttgaggaggagccaggcagcgccgagggccgagaggggcgtgagggggagtgttcccggaaagctgcggcgttggagccgcgctgcgcctgccgcccgaggagttgagaaagaaaacaggaaacgtggtggccgcgcacccggccgcggctgattcattcacttcaagtgccgtgcagaaggctcggcaggcggggcgggcgtggggccgcggctccgggttggggaccgaggagatccggctgtggaccagacgctcctctgcggggcgggcacccaagcgcgctcgccaccccctcgccatccgctagagccgggctcctggactgggactcgggcccgccgcacagttgaaaagtcgcatagtggtttttccgctcgcgtcgctgtgtgaaagttggctcgccgctctttgcacgccctccctggaggccgacccgagacgccaagctggagagaccgtgcctccccgaggccggccgccccgcgagcacagcctccgcccccgttgcactgccgggctgggcaatatgaaggagcagccctcatgtgccggcaccgggcatccgagcatggcgggaggaggcctaccagaaactggccagcgagaccctggaggagctggactggtgtctggaccagctagagaccctacagaccaggcactccgtcagtgagatggcctccaacaagtttaaaaggatgcttaatcgggagctcacccatctctctgaaatgagtcggtctggaaatcaagtgtcagagtttatatcaaacacattcttagataagcaacatgaagtggaaattccttctccaactcagaaggaaaaggagaaaaagaaaagaccaatgtctcagatcagtggagtcaagaaattgatgcacagctctagtctgactaattcaagtatcccaaggtttggagttaaaactgaacaagaagatgtccttgccaaggaactagaagatgtgaacaaatggggtcttcatgttttcagaatagcagagttgtctggtaaccggcccttgactgttatcatgcacaccatttttcaggaacgggatttattaaaaacatttaaaattccagtagatactttaattacatatcttatgactctcgaagaccattaccatgctgatgtggcctatcacaacaatatccatgctgcagatgttgtccagtctactcatgtgctattatctacacctgctttggaggctgtgtttacagatttggagattcttgcagcaatttttgccagtgcaatacatgatgtagatcatcctggtgtgtccaatcaatttctgatcaatacaaactctgaacttgccttgatgtacaatgattcctcagtcttagagaaccatcatttggctgtgggctttaaattgcttcaggaagaaaactgtgacattttccagaatttgaccaaaaaacaaagacaatctttaaggaaaatggtcattgacatcgtacttgcaacagatatgtcaaaacacatgaatctactggctgatttgaagactatggttgaaactaagaaagtgacaagctctggagttcttcttcttgataattattccgataggattcaggttcttcagaatatggtgcactgtgcagatctgagcaacccaacaaagcctctccagctgtaccgccagtggacggaccggataatggaggagttcttccgccaaggagaccgagagagggaacgtggcatggagataagccccatgtgtgacaagcacaatgcttccgtggaaaaatcacaggtgggcttcatagactatattgttcatcccctctgggagacatgggcagacctcgtccaccctgacgcccaggatattttggacactttggaggacaatcgtgaatggtaccagagcacaatccctcagagcccctctcctgcacctgatgacccagaggagggccggcagggtcaaactgagaaattccagtttgaactaactttagaggaagatggtgagtcagacacggaaaaggacagtggcagtcaagtggaagaagacactagctgcagtgactccaagactctttgtactcaagactcagagtctactgaaattccccttgatgaacaggttgaagaggaggcagtaggggaagaagaggaaagccagcctgaagcctgtgtcatagatgatcgttctcctgacacgtaacagtgcaaaaactttcatgccttttttttttttaagtagaaaaattgtttccaaagtgcatgtcacatgccacaaccacggtcacacctcactgtcatctgccaggacgtttgttgaacaaaactgaccttgactactcagtccagcgctcaggaatatcgtaaccagttttttcacctccatgtcatccgagcaaggtggacatcttcacgaacagcgtttttaacaagatttcagcttggtagagctgacaaagcagataaaatctactccaaattattttcaagagagtgtgactcatcaggcagcccaaaagtttattggacttggggtttctattcctttttatttgtttgcaatattttcagaagaaaggcattgcacagagtgaacttaatggacgaagcaacaaatatgtcaagaacaggacatagcacgaatctgttaccagtaggaggaggatgagccacagaaattgcataattttctaatttcaagtcttcctgatacatgactgaatagtgtggttcagtgagctgcactgacctctacattttgtatgatatgtaaaacagattttttgtagagcttacttttattattaaatgtattgaggtattatatttaaaaaaaactatgttcagaacttcatctgccactggttatttttttctaaggagtaacttgcaagttttcagtacaaatctgtgctacactggataaaaatctaatttatgaattttacttgcaccttatagttcatagcaattaactgatttgtagtgattcattgtttgttttatataccaatgacttccatattttaaaagagaaaaacaactttatgttgcaggaaaccctttttgtaagtctttattatttactttgcattttgtttcactctttccagataagcagagttgctcttcaccagtgtttttcttcatgtgcaaagtgactatttgttctataatacttttatgtgtgttatatcaaatgtgtcttaagcttcatgcaaactcagtcatcagttcgtgttgtctgaagcaagtgggagatatataaatacccagtagctaaaatggtcagtcttttttagatgttttcctacttagtatctcctaataacgttttgctgtgtcactagatgttcatttcacaagtgcatgtctttctaataatccacacatttcatgctctaataatccacacatttcatgctcatttttattgtttttacagccagttatagtaagaaaaaggtttttccccttgtgctgctttataatttagcgtgtgtctgaaccttatccatgtttgctagatgaggtcttgtcaaatatatcactaccattgtcaccggtgaaaagaaacaggtagttaagttagggttaacattcatttcaaccacgaggttgtatatcatgactagcttttactcttggtttacagagaaaagttaaacagccaactaggcagtttttaagaatattaacaatatattaacaaacaccaatacaactaatcctatttggttttaatgatttcaccatgggattaagaactatatcaggaacatccctgagaaacggttttaagtgtagcaactactcttccttaatggacagccacataacgtgtaggaagtcctttatcacttatcctcgatccataagcatatcttgcagaggggaactacttctttaaacacatggagggaaagaagatgatgccactggcaccagagggttagtactgtgatgcatcctaaaatatttattatattggtaaaaattctggttaaataaaaaattagagatcactcttggctgatttcagcaccaggaactgtattacagttttagagattaattcctagtgtttacctgattatagcagttggcatcatggggcatttaattctgactttatccccacgtcagccttaataaagtcttctttaccttctctatgaagactttaaagcccaaataatcatttttcacattgatattcaagaattgagatagatagaagccaaagtgggtatctgacaagtggaaaatcaaacgtttaagaagaattacaactctgaaaagcatttatatgtggaacttctcaaggagcctcctggggactggaaagtaagtcatcagccaggcaaatgactcatgctgaagagagtccccatttcagtcccctgagatctagctgatgcttagatcctttgaaataaaaattatgtctttataactctgatcttttacataaagcagaagaggaatcaactagttaattgcaaggtttctactctgtttcctctgtaaagatcagatggtaatctttcaaataagaaaaaaataaagacgtatgtttgaccaagtagtttcacaagaatatttgggaacttgtttcttttaattttatttgtccctgagtgaagtctagaaagaaaggtaaagagtctagagtttattcctctttccaaaacattctcattcctctcctccctacacttagtatttcccccacagagtgcctagaatcttaataatgaataaaataaaaagcagcaatatgtcattaacaaatccagacctgaaagggtaaagggtttataactgcactaataaagagaggctctttttttttcttccagtttgttggtttttaatggtaccgtgttgtaaagatacccactaatggacaatcaaattgcagaaaaggctcaatatccaagagacagggactaatgcactgtacaatctgcttatccttgcccttctctcttgccaaagtgtgcttcagaaatatatactgctttaaaaaagaataaaagaatatccttttacaagtggctttacatttcctaaaatgccataagaaaatgcaatatctgggtactgtatggggaaaaaaatgtccaagtttgtgtaaaaccagtgcatttcagcttgcaagttactgaacacaataatgctgttttaattttgttttatatcagttaaaattcacaataatgtagatagaacaaattacagacaaggaaagaaaaaacttgaatgaaatggattttacagaaagctttatgataatttttgaatgcattatttattttttgtgccatgcattttttttctcaccaaatgaccttacctgtaatacagtcttgtttgtctgtttacaaccatgtatttattgcaatgtacatactgtaatgttaattgtaaattatctgttcttattaaaacatcatcccatgatgggatggtgttgatatatttggaaactcttggtgagagaatgaatggtgtgtatacatactctgtacatttttcttttctcctgtaatatagtcttgtcaccttagagcttgtttatggaagattcaagaaaactataaaatacttaaagatatataaatttaaaaaaacatagctgcaggtctttggtcccagggctgtgccttaactttaaccaatattttcttctgttttgctgcatttgaaaggtaacagtggagctagggctgggcattttacatccaggcttttaattgattagaattctgccaataggtggattttacaaaaccacagacaacctctgaaagattctgagacccttttgagacagaagctcttaagtacttcttgccagggagcagcactgcatgtgtgatggttgtttgccatctgttgatcaggaactacttcagctacttgcatttgattatttcctttttttttttttttaactcggaaacacaactggggaaatatattctttcccagtgattataaacaatctttttcttttttttaagtccttttggcttctagagctcataggaaaatggacttgatttgaaattggagccagagtttactcgtgttggttatctattcatcagcttcctgacatgttaagagaatacattaaagagaaaatactgttttttaatcctaaaatttttcttccactaagataaaccaaatgtccttacatatatgtaaacccatctatttaaacgcaaaggtgggttgatgtcagtttacatagcagaaagcattcactatcctctaagatttgtttctgcaaaactttcattgctttagaattttaaaatttcaccttgtacaatggccagcccctaaagcaggaaacatttataatggattatatggaaacatcctcccagtacttgcccagcccttgaatcatgtggcttttcagtgaaaggaaagattctttttctaggaaaaatgagcctattttattttattttattttattttttgacacaaactgtagattttagcagccctggcccaaaggaatttgattacttttgttttaaacagtacaaaggggacactataattacaaaaacatccttaactgatttgagttgtttttatttctttggatatattttcagagtggtaaattgtgtgtgagaattacaaatgattattcttttagtggtttcttagcctctcttacagcccacggggatagtactgtacatcaataccttcatatgaaatttttatatgcaatgaaaataaaagcatgggttgattctgcct

SEQ ID NO: 10837 - protein, 507 aa, Homo sapiens; identical to SEQ ID NO: 10817

SEQ ID NO: 10838 - DNA, 7349 bp, Homo sapiens
ttctcactgccctgcggtgttttgaactgccttcttacagacgtcatacagcccttgaggaatagtttctgcctggtgagattgaatgatagttctcattcacaaaaccctggattctaagcagggacacacagaaattactttcgcaggtaaatcagcccacccagccaaagtgtggagagatttgttccttggctgacttctttgctccacggagaggagtgttttcctgtgcttgccctgaaatggaacttccttgacagctctcccgtgttacagtacctcccggtcattttctttttctctctctctacctgcgctcttcgagtgtcagaaacctttaaagctgttactatggaattgcaaaaaagagatcaagtgactctttcactatgctggtttcccttgtgacccagatgaagaatcaattcagaattcagttcctcccttggcattgcaagacacagaagaaactgtcacttcctaacagcctagtactggagtaaattcagtatgaaggaagaaagcgctcctgcgtgttagaaccttgcccatgagctggaccgaggacaggagatggactccaggaaaattggatttcttcaagcagcctcccttggaaatggaatatctttaaaatcttctttgcagaaagacagttagaatgtattaatcagaatagttgaagacttattttcctttttattttttttcaaaatgagcattattatgaagccaagatcccgatctacaagttccctaaggactgcagaggcagtttgttttgatgtggacaatggcacatctgcgggacggagtcccttggatcccatgaccagcccaggatccgggctaattctccaagcaaattttgtccacagtcaacgacgggagtccttcctgtatcgatccgacagcgattatgacctctctccaaagtctatgtcccggaactcctccattgccagtgatatacacggagatgacttgattgtgactccatttgctcaggtcttggccagtctgcgaactgtacgaaacaactttgctgcattaactaatttgcaagatcgagcacctagcaaaagatcacccatgtgcaaccaaccatccatcaacaaagccaccataacagaggaggcctaccagaaactggccagcgagaccctggaggagctggactggtgtctggaccagctagagaccctacagaccaggcactccgtcagtgagatggcctccaacaagtttaaaaggatgcttaatcgggagctcacccatctctctgaaatgagtcggtctggaaatcaagtgtcagagtttatatcaaacacattcttagataagcaacatgaagtggaaattccttctccaactcagaaggaaaaggagaaaaagaaaagaccaatgtctcagatcagtggagtcaagaaattgatgcacagctctagtctgactaattcaagtatcccaaggtttggagttaaaactgaacaagaagatgtccttgccaaggaactagaagatgtgaacaaatggggtcttcatgttttcagaatagcagagttgtctggtaaccggcccttgactgttatcatgcacaccatttttcaggaacgggatttattaaaaacatttaaaattccagtagatactttaattacatatcttatgactctcgaagaccattaccatgctgatgtggcctatcacaacaatatccatgctgcagatgttgtccagtctactcatgtgctattatctacacctgctttggaggctgtgtttacagatttggagattcttgcagcaatttttgccagtgcaatacatgatgtagatcatcctggtgtgtccaatcaatttctgatcaatacaaactctgaacttgccttgatgtacaatgattcctcagtcttagagaaccatcatttggctgtgggctttaaattgcttcaggaagaaaactgtgacattttccagaatttgaccaaaaaacaaagacaatctttaaggaaaatggtcattgacatcgtacttgcaacagatatgtcaaaacacatgaatctactggctgatttgaagactatggttgaaactaagaaagtgacaagctctggagttcttcttcttgataattattccgataggattcaggttcttcagaatatggtgcactgtgcagatctgagcaacccaacaaagcctctccagctgtaccgccagtggacggaccggataatggaggagttcttccgccaaggagaccgagagagggaacgtggcatggagataagccccatgtgtgacaagcacaatgcttccgtggaaaaatcacaggtgggcttcatagactatattgttcatcccctctgggagacatgggcagacctcgtccaccctgacgcccaggatattttggacactttggaggacaatcgtgaatggtaccagagcacaatccctcagagcccctctcctgcacctgatgacccagaggagggccggcagggtcaaactgagaaattccagtttgaactaactttagaggaagatggtgagtcagacacggaaaaggacagtggcagtcaagtggaagaagacactagctgcagtgactccaagactctttgtactcaagactcagagtctactgaaattccccttgatgaacaggttgaagaggaggcagtaggggaagaagaggaaagccagcctgaagcctgtgtcatagatgatcgttctcctgacacgtaacagtgcaaaaactttcatgccttttttttttttaagtagaaaaattgtttccaaagtgcatgtcacatgccacaaccacggtcacacctcactgtcatctgccaggacgtttgttgaacaaaactgaccttgactactcagtccagcgctcaggaatatcgtaaccagttttttcacctccatgtcatccgagcaaggtggacatcttcacgaacagcgtttttaacaagatttcagcttggtagagctgacaaagcagataaaatctactccaaattattttcaagagagtgtgactcatcaggcagcccaaaagtttattggacttggggtttctattcctttttatttgtttgcaatattttcagaagaaaggcattgcacagagtgaacttaatggacgaagcaacaaatatgtcaagaacaggacatagcacgaatctgttaccagtaggaggaggatgagccacagaaattgcataattttctaatttcaagtcttcctgatacatgactgaatagtgtggttcagtgagctgcactgacctctacattttgtatgatatgtaaaacagattttttgtagagcttacttttattattaaatgtattgaggtattatatttaaaaaaaactatgttcagaacttcatctgccactggttatttttttctaaggagtaacttgcaagttttcagtacaaatctgtgctacactggataaaaatctaatttatgaattttacttgcaccttatagttcatagcaattaactgatttgtagtgattcattgtttgttttatataccaatgacttccatattttaaaagagaaaaacaactttatgttgcaggaaaccctttttgtaagtctttattatttactttgcattttgtttcactctttccagataagcagagttgctcttcaccagtgtttttcttcatgtgcaaagtgactatttgttctataatacttttatgtgtgttatatcaaatgtgtcttaagcttcatgcaaactcagtcatcagttcgtgttgtctgaagcaagtgggagatatataaatacccagtagctaaaatggtcagtcttttttagatgttttcctacttagtatctcctaataacgttttgctgtgtcactagatgttcatttcacaagtgcatgtctttctaataatccacacatttcatgctctaataatccacacatttcatgctcatttttattgtttttacagccagttatagtaagaaaaaggtttttccccttgtgctgctttataatttagcgtgtgtctgaaccttatccatgtttgctagatgaggtcttgtcaaatatatcactaccattgtcaccggtgaaaagaaacaggtagttaagttagggttaacattcatttcaaccacgaggttgtatatcatgactagcttttactcttggtttacagagaaaagttaaacagccaactaggcagtttttaagaatattaacaatatattaacaaacaccaatacaactaatcctatttggttttaatgatttcaccatgggattaagaactatatcaggaacatccctgagaaacggttttaagtgtagcaactactcttccttaatggacagccacataacgtgtaggaagtcctttatcacttatcctcgatccataagcatatcttgcagaggggaactacttctttaaacacatggagggaaagaagatgatgccactggcaccagagggttagtactgtgatgcatcctaaaatatttattatattggtaaaaattctggttaaataaaaaattagagatcactcttggctgatttcagcaccaggaactgtattacagttttagagattaattcctagtgtttacctgattatagcagttggcatcatggggcatttaattctgactttatccccacgtcagccttaataaagtcttctttaccttctctatgaagactttaaagcccaaataatcatttttcacattgatattcaagaattgagatagatagaagccaaagtgggtatctgacaagtggaaaatcaaacgtttaagaagaattacaactctgaaaagcatttatatgtggaacttctcaaggagcctcctggggactggaaagtaagtcatcagccaggcaaatgactcatgctgaagagagtccccatttcagtcccctgagatctagctgatgcttagatcctttgaaataaaaattatgtctttataactctgatcttttacataaagcagaagaggaatcaactagttaattgcaaggtttctactctgtttcctctgtaaagatcagatggtaatctttcaaataagaaaaaaataaagacgtatgtttgaccaagtagtttcacaagaatatttgggaacttgtttcttttaattttatttgtccctgagtgaagtctagaaagaaaggtaaagagtctagagtttattcctctttccaaaacattctcattcctctcctccctacacttagtatttcccccacagagtgcctagaatcttaataatgaataaaataaaaagcagcaatatgtcattaacaaatccagacctgaaagggtaaagggtttataactgcactaataaagagaggctctttttttttcttccagtttgttggtttttaatggtaccgtgttgtaaagatacccactaatggacaatcaaattgcagaaaaggctcaatatccaagagacagggactaatgcactgtacaatctgcttatccttgcccttctctcttgccaaagtgtgcttcagaaatatatactgctttaaaaaagaataaaagaatatccttttacaagtggctttacatttcctaaaatgccataagaaaatgcaatatctgggtactgtatggggaaaaaaatgtccaagtttgtgtaaaaccagtgcatttcagcttgcaagttactgaacacaataatgctgttttaattttgttttatatcagttaaaattcacaataatgtagatagaacaaattacagacaaggaaagaaaaaacttgaatgaaatggattttacagaaagctttatgataatttttgaatgcattatttattttttgtgccatgcattttttttctcaccaaatgaccttacctgtaatacagtcttgtttgtctgtttacaaccatgtatttattgcaatgtacatactgtaatgttaattgtaaattatctgttcttattaaaacatcatcccatgatgggatggtgttgatatatttggaaactcttggtgagagaatgaatggtgtgtatacatactctgtacatttttcttttctcctgtaatatagtcttgtcaccttagagcttgtttatggaagattcaagaaaactataaaatacttaaagatatataaatttaaaaaaacatagctgcaggtctttggtcccagggctgtgccttaactttaaccaatattttcttctgttttgctgcatttgaaaggtaacagtggagctagggctgggcattttacatccaggcttttaattgattagaattctgccaataggtggattttacaaaaccacagacaacctctgaaagattctgagacccttttgagacagaagctcttaagtacttcttgccagggagcagcactgcatgtgtgatggttgtttgccatctgttgatcaggaactacttcagctacttgcatttgattatttcctttttttttttttttaactcggaaacacaactggggaaatatattctttcccagtgattataaacaatctttttcttttttttaagtccttttggcttctagagctcataggaaaatggacttgatttgaaattggagccagagtttactcgtgttggttatctattcatcagcttcctgacatgttaagagaatacattaaagagaaaatactgttttttaatcctaaaatttttcttccactaagataaaccaaatgtccttacatatatgtaaacccatctatttaaacgcaaaggtgggttgatgtcagtttacatagcagaaagcattcactatcctctaagatttgtttctgcaaaactttcattgctttagaattttaaaatttcaccttgtacaatggccagcccctaaagcaggaaacatttataatggattatatggaaacatcctcccagtacttgcccagcccttgaatcatgtggcttttcagtgaaaggaaagattctttttctaggaaaaatgagcctattttattttattttattttattttttgacacaaactgtagattttagcagccctggcccaaaggaatttgattacttttgttttaaacagtacaaaggggacactataattacaaaaacatccttaactgatttgagttgtttttatttctttggatatattttcagagtggtaaattgtgtgtgagaattacaaatgattattcttttagtggtttcttagcctctcttacagcccacggggatagtactgtacatcaataccttcatatgaaatttttatatgcaatgaaaataaaagcatgggttgattctgcct

SEQ ID NO: 10839 - protein, 679 aa, Homo sapiens; identical to SEQ ID NO: 10819

SEQ ID NO: 10840 - DNA, 6785 bp, Homo sapiens
actgcacaaaggaaatgccctcactcagctacaagtgcctcctgctccgtgcggggcctcagggccccagagccccgcaccagctctgacttctcgtggttcctggggatcttggcatcgtccttaaaaatggcttttgtttgggatcctctgggagccacggtgccaggaccatctacaagagccaaatcaagattgcgtttctcaaagtcctacagttttgatgtggacaatggcacatctgcgggacggagtcccttggatcccatgaccagcccaggatccgggctaattctccaagcaaattttgtccacagtcaacgacgggagtccttcctgtatcgatccgacagcgattatgacctctctccaaagtctatgtcccggaactcctccattgccagtgatatacacggagatgacttgattgtgactccatttgctcaggtcttggccagtctgcgaactgtacgaaacaactttgctgcattaactaatttgcaagatcgagcacctagcaaaagatcacccatgtgcaaccaaccatccatcaacaaagccaccataacagaggaggcctaccagaaactggccagcgagaccctggaggagctggactggtgtctggaccagctagagaccctacagaccaggcactccgtcagtgagatggcctccaacaagtttaaaaggatgcttaatcgggagctcacccatctctctgaaatgagtcggtctggaaatcaagtgtcagagtttatatcaaacacattcttagataagcaacatgaagtggaaattccttctccaactcagaaggaaaaggagaaaaagaaaagaccaatgtctcagatcagtggagtcaagaaattgatgcacagctctagtctgactaattcaagtatcccaaggtttggagttaaaactgaacaagaagatgtccttgccaaggaactagaagatgtgaacaaatggggtcttcatgttttcagaatagcagagttgtctggtaaccggcccttgactgttatcatgcacaccatttttcaggaacgggatttattaaaaacatttaaaattccagtagatactttaattacatatcttatgactctcgaagaccattaccatgctgatgtggcctatcacaacaatatccatgctgcagatgttgtccagtctactcatgtgctattatctacacctgctttggaggctgtgtttacagatttggagattcttgcagcaatttttgccagtgcaatacatgatgtagatcatcctggtgtgtccaatcaatttctgatcaatacaaactctgaacttgccttgatgtacaatgattcctcagtcttagagaaccatcatttggctgtgggctttaaattgcttcaggaagaaaactgtgacattttccagaatttgaccaaaaaacaaagacaatctttaaggaaaatggtcattgacatcgtacttgcaacagatatgtcaaaacacatgaatctactggctgatttgaagactatggttgaaactaagaaagtgacaagctctggagttcttcttcttgataattattccgataggattcaggttcttcagaatatggtgcactgtgcagatctgagcaacccaacaaagcctctccagctgtaccgccagtggacggaccggataatggaggagttcttccgccaaggagaccgagagagggaacgtggcatggagataagccccatgtgtgacaagcacaatgcttccgtggaaaaatcacaggtgggcttcatagactatattgttcatcccctctgggagacatgggcagacctcgtccaccctgacgcccaggatattttggacactttggaggacaatcgtgaatggtaccagagcacaatccctcagagcccctctcctgcacctgatgacccagaggagggccggcagggtcaaactgagaaattccagtttgaactaactttagaggaagatggtgagtcagacacggaaaaggacagtggcagtcaagtggaagaagacactagctgcagtgactccaagactctttgtactcaagactcagagtctactgaaattccccttgatgaacaggttgaagaggaggcagtaggggaagaagaggaaagccagcctgaagcctgtgtcatagatgatcgttctcctgacacgtaacagtgcaaaaactttcatgccttttttttttttaagtagaaaaattgtttccaaagtgcatgtcacatgccacaaccacggtcacacctcactgtcatctgccaggacgtttgttgaacaaaactgaccttgactactcagtccagcgctcaggaatatcgtaaccagttttttcacctccatgtcatccgagcaaggtggacatcttcacgaacagcgtttttaacaagatttcagcttggtagagctgacaaagcagataaaatctactccaaattattttcaagagagtgtgactcatcaggcagcccaaaagtttattggacttggggtttctattcctttttatttgtttgcaatattttcagaagaaaggcattgcacagagtgaacttaatggacgaagcaacaaatatgtcaagaacaggacatagcacgaatctgttaccagtaggaggaggatgagccacagaaattgcataattttctaatttcaagtcttcctgatacatgactgaatagtgtggttcagtgagctgcactgacctctacattttgtatgatatgtaaaacagattttttgtagagcttacttttattattaaatgtattgaggtattatatttaaaaaaaactatgttcagaacttcatctgccactggttatttttttctaaggagtaacttgcaagttttcagtacaaatctgtgctacactggataaaaatctaatttatgaattttacttgcaccttatagttcatagcaattaactgatttgtagtgattcattgtttgttttatataccaatgacttccatattttaaaagagaaaaacaactttatgttgcaggaaaccctttttgtaagtctttattatttactttgcattttgtttcactctttccagataagcagagttgctcttcaccagtgtttttcttcatgtgcaaagtgactatttgttctataatacttttatgtgtgttatatcaaatgtgtcttaagcttcatgcaaactcagtcatcagttcgtgttgtctgaagcaagtgggagatatataaatacccagtagctaaaatggtcagtcttttttagatgttttcctacttagtatctcctaataacgttttgctgtgtcactagatgttcatttcacaagtgcatgtctttctaataatccacacatttcatgctctaataatccacacatttcatgctcatttttattgtttttacagccagttatagtaagaaaaaggtttttccccttgtgctgctttataatttagcgtgtgtctgaaccttatccatgtttgctagatgaggtcttgtcaaatatatcactaccattgtcaccggtgaaaagaaacaggtagttaagttagggttaacattcatttcaaccacgaggttgtatatcatgactagcttttactcttggtttacagagaaaagttaaacagccaactaggcagtttttaagaatattaacaatatattaacaaacaccaatacaactaatcctatttggttttaatgatttcaccatgggattaagaactatatcaggaacatccctgagaaacggttttaagtgtagcaactactcttccttaatggacagccacataacgtgtaggaagtcctttatcacttatcctcgatccataagcatatcttgcagaggggaactacttctttaaacacatggagggaaagaagatgatgccactggcaccagagggttagtactgtgatgcatcctaaaatatttattatattggtaaaaattctggttaaataaaaaattagagatcactcttggctgatttcagcaccaggaactgtattacagttttagagattaattcctagtgtttacctgattatagcagttggcatcatggggcatttaattctgactttatccccacgtcagccttaataaagtcttctttaccttctctatgaagactttaaagcccaaataatcatttttcacattgatattcaagaattgagatagatagaagccaaagtgggtatctgacaagtggaaaatcaaacgtttaagaagaattacaactctgaaaagcatttatatgtggaacttctcaaggagcctcctggggactggaaagtaagtcatcagccaggcaaatgactcatgctgaagagagtccccatttcagtcccctgagatctagctgatgcttagatcctttgaaataaaaattatgtctttataactctgatcttttacataaagcagaagaggaatcaactagttaattgcaaggtttctactctgtttcctctgtaaagatcagatggtaatctttcaaataagaaaaaaataaagacgtatgtttgaccaagtagtttcacaagaatatttgggaacttgtttcttttaattttatttgtccctgagtgaagtctagaaagaaaggtaaagagtctagagtttattcctctttccaaaacattctcattcctctcctccctacacttagtatttcccccacagagtgcctagaatcttaataatgaataaaataaaaagcagcaatatgtcattaacaaatccagacctgaaagggtaaagggtttataactgcactaataaagagaggctctttttttttcttccagtttgttggtttttaatggtaccgtgttgtaaagatacccactaatggacaatcaaattgcagaaaaggctcaatatccaagagacagggactaatgcactgtacaatctgcttatccttgcccttctctcttgccaaagtgtgcttcagaaatatatactgctttaaaaaagaataaaagaatatccttttacaagtggctttacatttcctaaaatgccataagaaaatgcaatatctgggtactgtatggggaaaaaaatgtccaagtttgtgtaaaaccagtgcatttcagcttgcaagttactgaacacaataatgctgttttaattttgttttatatcagttaaaattcacaataatgtagatagaacaaattacagacaaggaaagaaaaaacttgaatgaaatggattttacagaaagctttatgataatttttgaatgcattatttattttttgtgccatgcattttttttctcaccaaatgaccttacctgtaatacagtcttgtttgtctgtttacaaccatgtatttattgcaatgtacatactgtaatgttaattgtaaattatctgttcttattaaaacatcatcccatgatgggatggtgttgatatatttggaaactcttggtgagagaatgaatggtgtgtatacatactctgtacatttttcttttctcctgtaatatagtcttgtcaccttagagcttgtttatggaagattcaagaaaactataaaatacttaaagatatataaatttaaaaaaacatagctgcaggtctttggtcccagggctgtgccttaactttaaccaatattttcttctgttttgctgcatttgaaaggtaacagtggagctagggctgggcattttacatccaggcttttaattgattagaattctgccaataggtggattttacaaaaccacagacaacctctgaaagattctgagacccttttgagacagaagctcttaagtacttcttgccagggagcagcactgcatgtgtgatggttgtttgccatctgttgatcaggaactacttcagctacttgcatttgattatttcctttttttttttttttaactcggaaacacaactggggaaatatattctttcccagtgattataaacaatctttttcttttttttaagtccttttggcttctagagctcataggaaaatggacttgatttgaaattggagccagagtttactcgtgttggttatctattcatcagcttcctgacatgttaagagaatacattaaagagaaaatactgttttttaatcctaaaatttttcttccactaagataaaccaaatgtccttacatatatgtaaacccatctatttaaacgcaaaggtgggttgatgtcagtttacatagcagaaagcattcactatcctctaagatttgtttctgcaaaactttcattgctttagaattttaaaatttcaccttgtacaatggccagcccctaaagcaggaaacatttataatggattatatggaaacatcctcccagtacttgcccagcccttgaatcatgtggcttttcagtgaaaggaaagattctttttctaggaaaaatgagcctattttattttattttattttattttttgacacaaactgtagattttagcagccctggcccaaaggaatttgattacttttgttttaaacagtacaaaggggacactataattacaaaaacatccttaactgatttgagttgtttttatttctttggatatattttcagagtggtaaattgtgtgtgagaattacaaatgattattcttttagtggtttcttagcctctcttacagcccacggggatagtactgtacatcaataccttcatatgaaatttttatatgcaatgaaaataaaagcatgggttgattctgcct

SEQ ID NO: 10841 - protein, 687 aa, Homo sapiens; identical to SEQ ID NO: 10821

SEQ ID NO: 10842 - DNA, 6279 bp, Homo sapiens
gacagaagatctgcgaacatgatgcacgtgaataattttccctttagaaggcattcctggatatgaggaggcctaccagaaactggccagcgagaccctggaggagctggactggtgtctggaccagctagagaccctacagaccaggcactccgtcagtgagatggcctccaacaagtttaaaaggatgcttaatcgggagctcacccatctctctgaaatgagtcggtctggaaatcaagtgtcagagtttatatcaaacacattcttagataagcaacatgaagtggaaattccttctccaactcagaaggaaaaggagaaaaagaaaagaccaatgtctcagatcagtggagtcaagaaattgatgcacagctctagtctgactaattcaagtatcccaaggtttggagttaaaactgaacaagaagatgtccttgccaaggaactagaagatgtgaacaaatggggtcttcatgttttcagaatagcagagttgtctggtaaccggcccttgactgttatcatgcacaccatttttcaggaacgggatttattaaaaacatttaaaattccagtagatactttaattacatatcttatgactctcgaagaccattaccatgctgatgtggcctatcacaacaatatccatgctgcagatgttgtccagtctactcatgtgctattatctacacctgctttggaggctgtgtttacagatttggagattcttgcagcaatttttgccagtgcaatacatgatgtagatcatcctggtgtgtccaatcaatttctgatcaatacaaactctgaacttgccttgatgtacaatgattcctcagtcttagagaaccatcatttggctgtgggctttaaattgcttcaggaagaaaactgtgacattttccagaatttgaccaaaaaacaaagacaatctttaaggaaaatggtcattgacatcgtacttgcaacagatatgtcaaaacacatgaatctactggctgatttgaagactatggttgaaactaagaaagtgacaagctctggagttcttcttcttgataattattccgataggattcaggttcttcagaatatggtgcactgtgcagatctgagcaacccaacaaagcctctccagctgtaccgccagtggacggaccggataatggaggagttcttccgccaaggagaccgagagagggaacgtggcatggagataagccccatgtgtgacaagcacaatgcttccgtggaaaaatcacaggtgggcttcatagactatattgttcatcccctctgggagacatgggcagacctcgtccaccctgacgcccaggatattttggacactttggaggacaatcgtgaatggtaccagagcacaatccctcagagcccctctcctgcacctgatgacccagaggagggccggcagggtcaaactgagaaattccagtttgaactaactttagaggaagatggtgagtcagacacggaaaaggacagtggcagtcaagtggaagaagacactagctgcagtgactccaagactctttgtactcaagactcagagtctactgaaattccccttgatgaacaggttgaagaggaggcagtaggggaagaagaggaaagccagcctgaagcctgtgtcatagatgatcgttctcctgacacgtaacagtgcaaaaactttcatgccttttttttttttaagtagaaaaattgtttccaaagtgcatgtcacatgccacaaccacggtcacacctcactgtcatctgccaggacgtttgttgaacaaaactgaccttgactactcagtccagcgctcaggaatatcgtaaccagttttttcacctccatgtcatccgagcaaggtggacatcttcacgaacagcgtttttaacaagatttcagcttggtagagctgacaaagcagataaaatctactccaaattattttcaagagagtgtgactcatcaggcagcccaaaagtttattggacttggggtttctattcctttttatttgtttgcaatattttcagaagaaaggcattgcacagagtgaacttaatggacgaagcaacaaatatgtcaagaacaggacatagcacgaatctgttaccagtaggaggaggatgagccacagaaattgcataattttctaatttcaagtcttcctgatacatgactgaatagtgtggttcagtgagctgcactgacctctacattttgtatgatatgtaaaacagattttttgtagagcttacttttattattaaatgtattgaggtattatatttaaaaaaaactatgttcagaacttcatctgccactggttatttttttctaaggagtaacttgcaagttttcagtacaaatctgtgctacactggataaaaatctaatttatgaattttacttgcaccttatagttcatagcaattaactgatttgtagtgattcattgtttgttttatataccaatgacttccatattttaaaagagaaaaacaactttatgttgcaggaaaccctttttgtaagtctttattatttactttgcattttgtttcactctttccagataagcagagttgctcttcaccagtgtttttcttcatgtgcaaagtgactatttgttctataatacttttatgtgtgttatatcaaatgtgtcttaagcttcatgcaaactcagtcatcagttcgtgttgtctgaagcaagtgggagatatataaatacccagtagctaaaatggtcagtcttttttagatgttttcctacttagtatctcctaataacgttttgctgtgtcactagatgttcatttcacaagtgcatgtctttctaataatccacacatttcatgctctaataatccacacatttcatgctcatttttattgtttttacagccagttatagtaagaaaaaggtttttccccttgtgctgctttataatttagcgtgtgtctgaaccttatccatgtttgctagatgaggtcttgtcaaatatatcactaccattgtcaccggtgaaaagaaacaggtagttaagttagggttaacattcatttcaaccacgaggttgtatatcatgactagcttttactcttggtttacagagaaaagttaaacagccaactaggcagtttttaagaatattaacaatatattaacaaacaccaatacaactaatcctatttggttttaatgatttcaccatgggattaagaactatatcaggaacatccctgagaaacggttttaagtgtagcaactactcttccttaatggacagccacataacgtgtaggaagtcctttatcacttatcctcgatccataagcatatcttgcagaggggaactacttctttaaacacatggagggaaagaagatgatgccactggcaccagagggttagtactgtgatgcatcctaaaatatttattatattggtaaaaattctggttaaataaaaaattagagatcactcttggctgatttcagcaccaggaactgtattacagttttagagattaattcctagtgtttacctgattatagcagttggcatcatggggcatttaattctgactttatccccacgtcagccttaataaagtcttctttaccttctctatgaagactttaaagcccaaataatcatttttcacattgatattcaagaattgagatagatagaagccaaagtgggtatctgacaagtggaaaatcaaacgtttaagaagaattacaactctgaaaagcatttatatgtggaacttctcaaggagcctcctggggactggaaagtaagtcatcagccaggcaaatgactcatgctgaagagagtccccatttcagtcccctgagatctagctgatgcttagatcctttgaaataaaaattatgtctttataactctgatcttttacataaagcagaagaggaatcaactagttaattgcaaggtttctactctgtttcctctgtaaagatcagatggtaatctttcaaataagaaaaaaataaagacgtatgtttgaccaagtagtttcacaagaatatttgggaacttgtttcttttaattttatttgtccctgagtgaagtctagaaagaaaggtaaagagtctagagtttattcctctttccaaaacattctcattcctctcctccctacacttagtatttcccccacagagtgcctagaatcttaataatgaataaaataaaaagcagcaatatgtcattaacaaatccagacctgaaagggtaaagggtttataactgcactaataaagagaggctctttttttttcttccagtttgttggtttttaatggtaccgtgttgtaaagatacccactaatggacaatcaaattgcagaaaaggctcaatatccaagagacagggactaatgcactgtacaatctgcttatccttgcccttctctcttgccaaagtgtgcttcagaaatatatactgctttaaaaaagaataaaagaatatccttttacaagtggctttacatttcctaaaatgccataagaaaatgcaatatctgggtactgtatggggaaaaaaatgtccaagtttgtgtaaaaccagtgcatttcagcttgcaagttactgaacacaataatgctgttttaattttgttttatatcagttaaaattcacaataatgtagatagaacaaattacagacaaggaaagaaaaaacttgaatgaaatggattttacagaaagctttatgataatttttgaatgcattatttattttttgtgccatgcattttttttctcaccaaatgaccttacctgtaatacagtcttgtttgtctgtttacaaccatgtatttattgcaatgtacatactgtaatgttaattgtaaattatctgttcttattaaaacatcatcccatgatgggatggtgttgatatatttggaaactcttggtgagagaatgaatggtgtgtatacatactctgtacatttttcttttctcctgtaatatagtcttgtcaccttagagcttgtttatggaagattcaagaaaactataaaatacttaaagatatataaatttaaaaaaacatagctgcaggtctttggtcccagggctgtgccttaactttaaccaatattttcttctgttttgctgcatttgaaaggtaacagtggagctagggctgggcattttacatccaggcttttaattgattagaattctgccaataggtggattttacaaaaccacagacaacctctgaaagattctgagacccttttgagacagaagctcttaagtacttcttgccagggagcagcactgcatgtgtgatggttgtttgccatctgttgatcaggaactacttcagctacttgcatttgattatttcctttttttttttttttaactcggaaacacaactggggaaatatattctttcccagtgattataaacaatctttttcttttttttaagtccttttggcttctagagctcataggaaaatggacttgatttgaaattggagccagagtttactcgtgttggttatctattcatcagcttcctgacatgttaagagaatacattaaagagaaaatactgttttttaatcctaaaatttttcttccactaagataaaccaaatgtccttacatatatgtaaacccatctatttaaacgcaaaggtgggttgatgtcagtttacatagcagaaagcattcactatcctctaagatttgtttctgcaaaactttcattgctttagaattttaaaatttcaccttgtacaatggccagcccctaaagcaggaaacatttataatggattatatggaaacatcctcccagtacttgcccagcccttgaatcatgtggcttttcagtgaaaggaaagattctttttctaggaaaaatgagcctattttattttattttattttattttttgacacaaactgtagattttagcagccctggcccaaaggaatttgattacttttgttttaaacagtacaaaggggacactataattacaaaaacatccttaactgatttgagttgtttttatttctttggatatattttcagagtggtaaattgtgtgtgagaattacaaatgattattcttttagtggtttcttagcctctcttacagcccacggggatagtactgtacatcaataccttcatatgaaatttttatatgcaatgaaaataaaagcatgggttgattctgcct

SEQ ID NO: 10843 - protein, 507 aa, Homo sapiens; identical to SEQ ID NO: 10817

SEQ ID NO: 10844 - DNA, 6738 bp, Homo sapiens
caatacttgttgcaataattgcccacgatagctgctcaaacaagagagttggaattcatctgtaaaaatcactacatgtaacgtaggagacaagaaaaatattaatgacagaagatctgcgaacatgatgcacgtgaataattttccctttagaaggcattcctggatatgttttgatgtggacaatggcacatctgcgggacggagtcccttggatcccatgaccagcccaggatccgggctaattctccaagcaaattttgtccacagtcaacgacgggagtccttcctgtatcgatccgacagcgattatgacctctctccaaagtctatgtcccggaactcctccattgccagtgatatacacggagatgacttgattgtgactccatttgctcaggtcttggccagtctgcgaactgtacgaaacaactttgctgcattaactaatttgcaagatcgagcacctagcaaaagatcacccatgtgcaaccaaccatccatcaacaaagccaccataacagaggaggcctaccagaaactggccagcgagaccctggaggagctggactggtgtctggaccagctagagaccctacagaccaggcactccgtcagtgagatggcctccaacaagtttaaaaggatgcttaatcgggagctcacccatctctctgaaatgagtcggtctggaaatcaagtgtcagagtttatatcaaacacattcttagataagcaacatgaagtggaaattccttctccaactcagaaggaaaaggagaaaaagaaaagaccaatgtctcagatcagtggagtcaagaaattgatgcacagctctagtctgactaattcaagtatcccaaggtttggagttaaaactgaacaagaagatgtccttgccaaggaactagaagatgtgaacaaatggggtcttcatgttttcagaatagcagagttgtctggtaaccggcccttgactgttatcatgcacaccatttttcaggaacgggatttattaaaaacatttaaaattccagtagatactttaattacatatcttatgactctcgaagaccattaccatgctgatgtggcctatcacaacaatatccatgctgcagatgttgtccagtctactcatgtgctattatctacacctgctttggaggctgtgtttacagatttggagattcttgcagcaatttttgccagtgcaatacatgatgtagatcatcctggtgtgtccaatcaatttctgatcaatacaaactctgaacttgccttgatgtacaatgattcctcagtcttagagaaccatcatttggctgtgggctttaaattgcttcaggaagaaaactgtgacattttccagaatttgaccaaaaaacaaagacaatctttaaggaaaatggtcattgacatcgtacttgcaacagatatgtcaaaacacatgaatctactggctgatttgaagactatggttgaaactaagaaagtgacaagctctggagttcttcttcttgataattattccgataggattcaggttcttcagaatatggtgcactgtgcagatctgagcaacccaacaaagcctctccagctgtaccgccagtggacggaccggataatggaggagttcttccgccaaggagaccgagagagggaacgtggcatggagataagccccatgtgtgacaagcacaatgcttccgtggaaaaatcacaggtgggcttcatagactatattgttcatcccctctgggagacatgggcagacctcgtccaccctgacgcccaggatattttggacactttggaggacaatcgtgaatggtaccagagcacaatccctcagagcccctctcctgcacctgatgacccagaggagggccggcagggtcaaactgagaaattccagtttgaactaactttagaggaagatggtgagtcagacacggaaaaggacagtggcagtcaagtggaagaagacactagctgcagtgactccaagactctttgtactcaagactcagagtctactgaaattccccttgatgaacaggttgaagaggaggcagtaggggaagaagaggaaagccagcctgaagcctgtgtcatagatgatcgttctcctgacacgtaacagtgcaaaaactttcatgccttttttttttttaagtagaaaaattgtttccaaagtgcatgtcacatgccacaaccacggtcacacctcactgtcatctgccaggacgtttgttgaacaaaactgaccttgactactcagtccagcgctcaggaatatcgtaaccagttttttcacctccatgtcatccgagcaaggtggacatcttcacgaacagcgtttttaacaagatttcagcttggtagagctgacaaagcagataaaatctactccaaattattttcaagagagtgtgactcatcaggcagcccaaaagtttattggacttggggtttctattcctttttatttgtttgcaatattttcagaagaaaggcattgcacagagtgaacttaatggacgaagcaacaaatatgtcaagaacaggacatagcacgaatctgttaccagtaggaggaggatgagccacagaaattgcataattttctaatttcaagtcttcctgatacatgactgaatagtgtggttcagtgagctgcactgacctctacattttgtatgatatgtaaaacagattttttgtagagcttacttttattattaaatgtattgaggtattatatttaaaaaaaactatgttcagaacttcatctgccactggttatttttttctaaggagtaacttgcaagttttcagtacaaatctgtgctacactggataaaaatctaatttatgaattttacttgcaccttatagttcatagcaattaactgatttgtagtgattcattgtttgttttatataccaatgacttccatattttaaaagagaaaaacaactttatgttgcaggaaaccctttttgtaagtctttattatttactttgcattttgtttcactctttccagataagcagagttgctcttcaccagtgtttttcttcatgtgcaaagtgactatttgttctataatacttttatgtgtgttatatcaaatgtgtcttaagcttcatgcaaactcagtcatcagttcgtgttgtctgaagcaagtgggagatatataaatacccagtagctaaaatggtcagtcttttttagatgttttcctacttagtatctcctaataacgttttgctgtgtcactagatgttcatttcacaagtgcatgtctttctaataatccacacatttcatgctctaataatccacacatttcatgctcatttttattgtttttacagccagttatagtaagaaaaaggtttttccccttgtgctgctttataatttagcgtgtgtctgaaccttatccatgtttgctagatgaggtcttgtcaaatatatcactaccattgtcaccggtgaaaagaaacaggtagttaagttagggttaacattcatttcaaccacgaggttgtatatcatgactagcttttactcttggtttacagagaaaagttaaacagccaactaggcagtttttaagaatattaacaatatattaacaaacaccaatacaactaatcctatttggttttaatgatttcaccatgggattaagaactatatcaggaacatccctgagaaacggttttaagtgtagcaactactcttccttaatggacagccacataacgtgtaggaagtcctttatcacttatcctcgatccataagcatatcttgcagaggggaactacttctttaaacacatggagggaaagaagatgatgccactggcaccagagggttagtactgtgatgcatcctaaaatatttattatattggtaaaaattctggttaaataaaaaattagagatcactcttggctgatttcagcaccaggaactgtattacagttttagagattaattcctagtgtttacctgattatagcagttggcatcatggggcatttaattctgactttatccccacgtcagccttaataaagtcttctttaccttctctatgaagactttaaagcccaaataatcatttttcacattgatattcaagaattgagatagatagaagccaaagtgggtatctgacaagtggaaaatcaaacgtttaagaagaattacaactctgaaaagcatttatatgtggaacttctcaaggagcctcctggggactggaaagtaagtcatcagccaggcaaatgactcatgctgaagagagtccccatttcagtcccctgagatctagctgatgcttagatcctttgaaataaaaattatgtctttataactctgatcttttacataaagcagaagaggaatcaactagttaattgcaaggtttctactctgtttcctctgtaaagatcagatggtaatctttcaaataagaaaaaaataaagacgtatgtttgaccaagtagtttcacaagaatatttgggaacttgtttcttttaattttatttgtccctgagtgaagtctagaaagaaaggtaaagagtctagagtttattcctctttccaaaacattctcattcctctcctccctacacttagtatttcccccacagagtgcctagaatcttaataatgaataaaataaaaagcagcaatatgtcattaacaaatccagacctgaaagggtaaagggtttataactgcactaataaagagaggctctttttttttcttccagtttgttggtttttaatggtaccgtgttgtaaagatacccactaatggacaatcaaattgcagaaaaggctcaatatccaagagacagggactaatgcactgtacaatctgcttatccttgcccttctctcttgccaaagtgtgcttcagaaatatatactgctttaaaaaagaataaaagaatatccttttacaagtggctttacatttcctaaaatgccataagaaaatgcaatatctgggtactgtatggggaaaaaaatgtccaagtttgtgtaaaaccagtgcatttcagcttgcaagttactgaacacaataatgctgttttaattttgttttatatcagttaaaattcacaataatgtagatagaacaaattacagacaaggaaagaaaaaacttgaatgaaatggattttacagaaagctttatgataatttttgaatgcattatttattttttgtgccatgcattttttttctcaccaaatgaccttacctgtaatacagtcttgtttgtctgtttacaaccatgtatttattgcaatgtacatactgtaatgttaattgtaaattatctgttcttattaaaacatcatcccatgatgggatggtgttgatatatttggaaactcttggtgagagaatgaatggtgtgtatacatactctgtacatttttcttttctcctgtaatatagtcttgtcaccttagagcttgtttatggaagattcaagaaaactataaaatacttaaagatatataaatttaaaaaaacatagctgcaggtctttggtcccagggctgtgccttaactttaaccaatattttcttctgttttgctgcatttgaaaggtaacagtggagctagggctgggcattttacatccaggcttttaattgattagaattctgccaataggtggattttacaaaaccacagacaacctctgaaagattctgagacccttttgagacagaagctcttaagtacttcttgccagggagcagcactgcatgtgtgatggttgtttgccatctgttgatcaggaactacttcagctacttgcatttgattatttcctttttttttttttttaactcggaaacacaactggggaaatatattctttcccagtgattataaacaatctttttcttttttttaagtccttttggcttctagagctcataggaaaatggacttgatttgaaattggagccagagtttactcgtgttggttatctattcatcagcttcctgacatgttaagagaatacattaaagagaaaatactgttttttaatcctaaaatttttcttccactaagataaaccaaatgtccttacatatatgtaaacccatctatttaaacgcaaaggtgggttgatgtcagtttacatagcagaaagcattcactatcctctaagatttgtttctgcaaaactttcattgctttagaattttaaaatttcaccttgtacaatggccagcccctaaagcaggaaacatttataatggattatatggaaacatcctcccagtacttgcccagcccttgaatcatgtggcttttcagtgaaaggaaagattctttttctaggaaaaatgagcctattttattttattttattttattttttgacacaaactgtagattttagcagccctggcccaaaggaatttgattacttttgttttaaacagtacaaaggggacactataattacaaaaacatccttaactgatttgagttgtttttatttctttggatatattttcagagtggtaaattgtgtgtgagaattacaaatgattattcttttagtggtttcttagcctctcttacagcccacggggatagtactgtacatcaataccttcatatgaaatttttatatgcaatgaaaataaaagcatgggttgattctgcct

SEQ ID NO: 10845 - protein, 673 aa, Homo sapiens; identical to SEQ ID NO: 976

SEQ ID NO: 10846 - DNA, 7170 bp, Homo sapiens
tgcggcgcattagttccaatagtttaacaggctgctttgtagcacggacaaagccgtgcgagcgcggtgctttccctccttgttcatttgctatgcgagcttgtcagtgatctttggcaggggcttgggagaggaggggtgacgtttaatacgcttccgcggaggagtgcgctcgcctcctctgcacccagccccaggctctacagagagactgaggcaggcgactgaatgcactaacagcagcaggctcagacctgcttccctggacatttccgggaccgtgagcgagggaaccacgttgccctggattcttgccagctgtacaaagttgaccaggaaaatggctcagcagacaagcccggacactttaacagtacctgaagtggataatccgcattgtccaaacccgtggctgaacgaagaccttgtgaaatccttgcgagaaaacctgttgcagcatgagaagtccaagacagcgaggaaatcggtttctcccaagctctctccagtgatctctccgagaaattcccccaggcttctgcgcagaatgcttctcagcagcaacatccccaaacagcggcgtttcacggtggcacatacatgttttgatgtggacaatggcacatctgcgggacggagtcccttggatcccatgaccagcccaggatccgggctaattctccaagcaaattttgtccacagtcaacgacgggagtccttcctgtatcgatccgacagcgattatgacctctctccaaagtctatgtcccggaactcctccattgccagtgatatacacggagatgacttgattgtgactccatttgctcaggtcttggccagtctgcgaactgtacgaaacaactttgctgcattaactaatttgcaagatcgagcacctagcaaaagatcacccatgtgcaaccaaccatccatcaacaaagccaccataacagaggaggcctaccagaaactggccagcgagaccctggaggagctggactggtgtctggaccagctagagaccctacagaccaggcactccgtcagtgagatggcctccaacaagtttaaaaggatgcttaatcgggagctcacccatctctctgaaatgagtcggtctggaaatcaagtgtcagagtttatatcaaacacattcttagataagcaacatgaagtggaaattccttctccaactcagaaggaaaaggagaaaaagaaaagaccaatgtctcagatcagtggagtcaagaaattgatgcacagctctagtctgactaattcaagtatcccaaggtttggagttaaaactgaacaagaagatgtccttgccaaggaactagaagatgtgaacaaatggggtcttcatgttttcagaatagcagagttgtctggtaaccggcccttgactgttatcatgcacaccatttttcaggaacgggatttattaaaaacatttaaaattccagtagatactttaattacatatcttatgactctcgaagaccattaccatgctgatgtggcctatcacaacaatatccatgctgcagatgttgtccagtctactcatgtgctattatctacacctgctttggaggctgtgtttacagatttggagattcttgcagcaatttttgccagtgcaatacatgatgtagatcatcctggtgtgtccaatcaatttctgatcaatacaaactctgaacttgccttgatgtacaatgattcctcagtcttagagaaccatcatttggctgtgggctttaaattgcttcaggaagaaaactgtgacattttccagaatttgaccaaaaaacaaagacaatctttaaggaaaatggtcattgacatcgtacttgcaacagatatgtcaaaacacatgaatctactggctgatttgaagactatggttgaaactaagaaagtgacaagctctggagttcttcttcttgataattattccgataggattcaggttcttcagaatatggtgcactgtgcagatctgagcaacccaacaaagcctctccagctgtaccgccagtggacggaccggataatggaggagttcttccgccaaggagaccgagagagggaacgtggcatggagataagccccatgtgtgacaagcacaatgcttccgtggaaaaatcacaggtgggcttcatagactatattgttcatcccctctgggagacatgggcagacctcgtccaccctgacgcccaggatattttggacactttggaggacaatcgtgaatggtaccagagcacaatccctcagagcccctctcctgcacctgatgacccagaggagggccggcagggtcaaactgagaaattccagtttgaactaactttagaggaagatggtgagtcagacacggaaaaggacagtggcagtcaagtggaagaagacactagctgcagtgactccaagactctttgtactcaagactcagagtctactgaaattccccttgatgaacaggttgaagaggaggcagtaggggaagaagaggaaagccagcctgaagcctgtgtcatagatgatcgttctcctgacacgtaacagtgcaaaaactttcatgccttttttttttttaagtagaaaaattgtttccaaagtgcatgtcacatgccacaaccacggtcacacctcactgtcatctgccaggacgtttgttgaacaaaactgaccttgactactcagtccagcgctcaggaatatcgtaaccagttttttcacctccatgtcatccgagcaaggtggacatcttcacgaacagcgtttttaacaagatttcagcttggtagagctgacaaagcagataaaatctactccaaattattttcaagagagtgtgactcatcaggcagcccaaaagtttattggacttggggtttctattcctttttatttgtttgcaatattttcagaagaaaggcattgcacagagtgaacttaatggacgaagcaacaaatatgtcaagaacaggacatagcacgaatctgttaccagtaggaggaggatgagccacagaaattgcataattttctaatttcaagtcttcctgatacatgactgaatagtgtggttcagtgagctgcactgacctctacattttgtatgatatgtaaaacagattttttgtagagcttacttttattattaaatgtattgaggtattatatttaaaaaaaactatgttcagaacttcatctgccactggttatttttttctaaggagtaacttgcaagttttcagtacaaatctgtgctacactggataaaaatctaatttatgaattttacttgcaccttatagttcatagcaattaactgatttgtagtgattcattgtttgttttatataccaatgacttccatattttaaaagagaaaaacaactttatgttgcaggaaaccctttttgtaagtctttattatttactttgcattttgtttcactctttccagataagcagagttgctcttcaccagtgtttttcttcatgtgcaaagtgactatttgttctataatacttttatgtgtgttatatcaaatgtgtcttaagcttcatgcaaactcagtcatcagttcgtgttgtctgaagcaagtgggagatatataaatacccagtagctaaaatggtcagtcttttttagatgttttcctacttagtatctcctaataacgttttgctgtgtcactagatgttcatttcacaagtgcatgtctttctaataatccacacatttcatgctctaataatccacacatttcatgctcatttttattgtttttacagccagttatagtaagaaaaaggtttttccccttgtgctgctttataatttagcgtgtgtctgaaccttatccatgtttgctagatgaggtcttgtcaaatatatcactaccattgtcaccggtgaaaagaaacaggtagttaagttagggttaacattcatttcaaccacgaggttgtatatcatgactagcttttactcttggtttacagagaaaagttaaacagccaactaggcagtttttaagaatattaacaatatattaacaaacaccaatacaactaatcctatttggttttaatgatttcaccatgggattaagaactatatcaggaacatccctgagaaacggttttaagtgtagcaactactcttccttaatggacagccacataacgtgtaggaagtcctttatcacttatcctcgatccataagcatatcttgcagaggggaactacttctttaaacacatggagggaaagaagatgatgccactggcaccagagggttagtactgtgatgcatcctaaaatatttattatattggtaaaaattctggttaaataaaaaattagagatcactcttggctgatttcagcaccaggaactgtattacagttttagagattaattcctagtgtttacctgattatagcagttggcatcatggggcatttaattctgactttatccccacgtcagccttaataaagtcttctttaccttctctatgaagactttaaagcccaaataatcatttttcacattgatattcaagaattgagatagatagaagccaaagtgggtatctgacaagtggaaaatcaaacgtttaagaagaattacaactctgaaaagcatttatatgtggaacttctcaaggagcctcctggggactggaaagtaagtcatcagccaggcaaatgactcatgctgaagagagtccccatttcagtcccctgagatctagctgatgcttagatcctttgaaataaaaattatgtctttataactctgatcttttacataaagcagaagaggaatcaactagttaattgcaaggtttctactctgtttcctctgtaaagatcagatggtaatctttcaaataagaaaaaaataaagacgtatgtttgaccaagtagtttcacaagaatatttgggaacttgtttcttttaattttatttgtccctgagtgaagtctagaaagaaaggtaaagagtctagagtttattcctctttccaaaacattctcattcctctcctccctacacttagtatttcccccacagagtgcctagaatcttaataatgaataaaataaaaagcagcaatatgtcattaacaaatccagacctgaaagggtaaagggtttataactgcactaataaagagaggctctttttttttcttccagtttgttggtttttaatggtaccgtgttgtaaagatacccactaatggacaatcaaattgcagaaaaggctcaatatccaagagacagggactaatgcactgtacaatctgcttatccttgcccttctctcttgccaaagtgtgcttcagaaatatatactgctttaaaaaagaataaaagaatatccttttacaagtggctttacatttcctaaaatgccataagaaaatgcaatatctgggtactgtatggggaaaaaaatgtccaagtttgtgtaaaaccagtgcatttcagcttgcaagttactgaacacaataatgctgttttaattttgttttatatcagttaaaattcacaataatgtagatagaacaaattacagacaaggaaagaaaaaacttgaatgaaatggattttacagaaagctttatgataatttttgaatgcattatttattttttgtgccatgcattttttttctcaccaaatgaccttacctgtaatacagtcttgtttgtctgtttacaaccatgtatttattgcaatgtacatactgtaatgttaattgtaaattatctgttcttattaaaacatcatcccatgatgggatggtgttgatatatttggaaactcttggtgagagaatgaatggtgtgtatacatactctgtacatttttcttttctcctgtaatatagtcttgtcaccttagagcttgtttatggaagattcaagaaaactataaaatacttaaagatatataaatttaaaaaaacatagctgcaggtctttggtcccagggctgtgccttaactttaaccaatattttcttctgttttgctgcatttgaaaggtaacagtggagctagggctgggcattttacatccaggcttttaattgattagaattctgccaataggtggattttacaaaaccacagacaacctctgaaagattctgagacccttttgagacagaagctcttaagtacttcttgccagggagcagcactgcatgtgtgatggttgtttgccatctgttgatcaggaactacttcagctacttgcatttgattatttcctttttttttttttttaactcggaaacacaactggggaaatatattctttcccagtgattataaacaatctttttcttttttttaagtccttttggcttctagagctcataggaaaatggacttgatttgaaattggagccagagtttactcgtgttggttatctattcatcagcttcctgacatgttaagagaatacattaaagagaaaatactgttttttaatcctaaaatttttcttccactaagataaaccaaatgtccttacatatatgtaaacccatctatttaaacgcaaaggtgggttgatgtcagtttacatagcagaaagcattcactatcctctaagatttgtttctgcaaaactttcattgctttagaattttaaaatttcaccttgtacaatggccagcccctaaagcaggaaacatttataatggattatatggaaacatcctcccagtacttgcccagcccttgaatcatgtggcttttcagtgaaaggaaagattctttttctaggaaaaatgagcctattttattttattttattttattttttgacacaaactgtagattttagcagccctggcccaaaggaatttgattacttttgttttaaacagtacaaaggggacactataattacaaaaacatccttaactgatttgagttgtttttatttctttggatatattttcagagtggtaaattgtgtgtgagaattacaaatgattattcttttagtggtttcttagcctctcttacagcccacggggatagtactgtacatcaataccttcatatgaaatttttatatgcaatgaaaataaaagcatgggttgattctgcct

SEQ ID NO: 10847 - protein, 745 aa, Homo sapiens; identical to SEQ ID NO: 10827

SEQ ID NO: 10848 - DNA, 7214 bp, Homo sapiens
tgcggcgcattagttccaatagtttaacaggctgctttgtagcacggacaaagccgtgcgagcgcggtgctttccctccttgttcatttgctatgcgagcttgtcagtgatctttggcaggggcttgggagaggaggggtgacgtttaatacgcttccgcggaggagtgcgctcgcctcctctgcacccagccccaggctctacagagagactgaggcaggcgactgaatgcactaacagcagcaggctcagacctgcttccctggacatttccgggaccgtgagcgagggaaccacgttgccctggattcttgccagctgtacaaagttgaccaggaaaatggctcagcagacaagcccggacactttaacagtacctgaagtggataatccgcattgtccaaacccgtggctgaacgaagaccttgtgaaatccttgcgagaaaacctgttgcagcatgagaagtccaagacagcgaggaaatcggtttctcccaagctctctccagtgatctctccgagaaattcccccaggcttctgcgcagaatgcttctcagcagcaacatccccaaacagcggcgtttcacggtggcacatacatgttttgatgtggacaatggcacatctgcgggacggagtcccttggatcccatgaccagcccaggatccgggctaattctccaagcaaattttgtccacagtcaacgacgggagtccttcctgtatcgatccgacagcgattatgacctctctccaaagtctatgtcccggaactcctccattgccagtgatatacacggagatgacttgattgtgactccatttgctcaggtcttggccagtctgcgaactgtacgaaacaactttgctgcattaactaatttgcaagatcgagcacctagcaaaagatcacccatgtgcaaccaaccatccatcaacaaagccaccataacagggctctataatgggatcattgcatttctctgattactaatgagaaggaggcctaccagaaactggccagcgagaccctggaggagctggactggtgtctggaccagctagagaccctacagaccaggcactccgtcagtgagatggcctccaacaagtttaaaaggatgcttaatcgggagctcacccatctctctgaaatgagtcggtctggaaatcaagtgtcagagtttatatcaaacacattcttagataagcaacatgaagtggaaattccttctccaactcagaaggaaaaggagaaaaagaaaagaccaatgtctcagatcagtggagtcaagaaattgatgcacagctctagtctgactaattcaagtatcccaaggtttggagttaaaactgaacaagaagatgtccttgccaaggaactagaagatgtgaacaaatggggtcttcatgttttcagaatagcagagttgtctggtaaccggcccttgactgttatcatgcacaccatttttcaggaacgggatttattaaaaacatttaaaattccagtagatactttaattacatatcttatgactctcgaagaccattaccatgctgatgtggcctatcacaacaatatccatgctgcagatgttgtccagtctactcatgtgctattatctacacctgctttggaggctgtgtttacagatttggagattcttgcagcaatttttgccagtgcaatacatgatgtagatcatcctggtgtgtccaatcaatttctgatcaatacaaactctgaacttgccttgatgtacaatgattcctcagtcttagagaaccatcatttggctgtgggctttaaattgcttcaggaagaaaactgtgacattttccagaatttgaccaaaaaacaaagacaatctttaaggaaaatggtcattgacatcgtacttgcaacagatatgtcaaaacacatgaatctactggctgatttgaagactatggttgaaactaagaaagtgacaagctctggagttcttcttcttgataattattccgataggattcaggttcttcagaatatggtgcactgtgcagatctgagcaacccaacaaagcctctccagctgtaccgccagtggacggaccggataatggaggagttcttccgccaaggagaccgagagagggaacgtggcatggagataagccccatgtgtgacaagcacaatgcttccgtggaaaaatcacaggtgggcttcatagactatattgttcatcccctctgggagacatgggcagacctcgtccaccctgacgcccaggatattttggacactttggaggacaatcgtgaatggtaccagagcacaatccctcagagcccctctcctgcacctgatgacccagaggagggccggcagggtcaaactgagaaattccagtttgaactaactttagaggaagatggtgagtcagacacggaaaaggacagtggcagtcaagtggaagaagacactagctgcagtgactccaagactctttgtactcaagactcagagtctactgaaattccccttgatgaacaggttgaagaggaggcagtaggggaagaagaggaaagccagcctgaagcctgtgtcatagatgatcgttctcctgacacgtaacagtgcaaaaactttcatgccttttttttttttaagtagaaaaattgtttccaaagtgcatgtcacatgccacaaccacggtcacacctcactgtcatctgccaggacgtttgttgaacaaaactgaccttgactactcagtccagcgctcaggaatatcgtaaccagttttttcacctccatgtcatccgagcaaggtggacatcttcacgaacagcgtttttaacaagatttcagcttggtagagctgacaaagcagataaaatctactccaaattattttcaagagagtgtgactcatcaggcagcccaaaagtttattggacttggggtttctattcctttttatttgtttgcaatattttcagaagaaaggcattgcacagagtgaacttaatggacgaagcaacaaatatgtcaagaacaggacatagcacgaatctgttaccagtaggaggaggatgagccacagaaattgcataattttctaatttcaagtcttcctgatacatgactgaatagtgtggttcagtgagctgcactgacctctacattttgtatgatatgtaaaacagattttttgtagagcttacttttattattaaatgtattgaggtattatatttaaaaaaaactatgttcagaacttcatctgccactggttatttttttctaaggagtaacttgcaagttttcagtacaaatctgtgctacactggataaaaatctaatttatgaattttacttgcaccttatagttcatagcaattaactgatttgtagtgattcattgtttgttttatataccaatgacttccatattttaaaagagaaaaacaactttatgttgcaggaaaccctttttgtaagtctttattatttactttgcattttgtttcactctttccagataagcagagttgctcttcaccagtgtttttcttcatgtgcaaagtgactatttgttctataatacttttatgtgtgttatatcaaatgtgtcttaagcttcatgcaaactcagtcatcagttcgtgttgtctgaagcaagtgggagatatataaatacccagtagctaaaatggtcagtcttttttagatgttttcctacttagtatctcctaataacgttttgctgtgtcactagatgttcatttcacaagtgcatgtctttctaataatccacacatttcatgctctaataatccacacatttcatgctcatttttattgtttttacagccagttatagtaagaaaaaggtttttccccttgtgctgctttataatttagcgtgtgtctgaaccttatccatgtttgctagatgaggtcttgtcaaatatatcactaccattgtcaccggtgaaaagaaacaggtagttaagttagggttaacattcatttcaaccacgaggttgtatatcatgactagcttttactcttggtttacagagaaaagttaaacagccaactaggcagtttttaagaatattaacaatatattaacaaacaccaatacaactaatcctatttggttttaatgatttcaccatgggattaagaactatatcaggaacatccctgagaaacggttttaagtgtagcaactactcttccttaatggacagccacataacgtgtaggaagtcctttatcacttatcctcgatccataagcatatcttgcagaggggaactacttctttaaacacatggagggaaagaagatgatgccactggcaccagagggttagtactgtgatgcatcctaaaatatttattatattggtaaaaattctggttaaataaaaaattagagatcactcttggctgatttcagcaccaggaactgtattacagttttagagattaattcctagtgtttacctgattatagcagttggcatcatggggcatttaattctgactttatccccacgtcagccttaataaagtcttctttaccttctctatgaagactttaaagcccaaataatcatttttcacattgatattcaagaattgagatagatagaagccaaagtgggtatctgacaagtggaaaatcaaacgtttaagaagaattacaactctgaaaagcatttatatgtggaacttctcaaggagcctcctggggactggaaagtaagtcatcagccaggcaaatgactcatgctgaagagagtccccatttcagtcccctgagatctagctgatgcttagatcctttgaaataaaaattatgtctttataactctgatcttttacataaagcagaagaggaatcaactagttaattgcaaggtttctactctgtttcctctgtaaagatcagatggtaatctttcaaataagaaaaaaataaagacgtatgtttgaccaagtagtttcacaagaatatttgggaacttgtttcttttaattttatttgtccctgagtgaagtctagaaagaaaggtaaagagtctagagtttattcctctttccaaaacattctcattcctctcctccctacacttagtatttcccccacagagtgcctagaatcttaataatgaataaaataaaaagcagcaatatgtcattaacaaatccagacctgaaagggtaaagggtttataactgcactaataaagagaggctctttttttttcttccagtttgttggtttttaatggtaccgtgttgtaaagatacccactaatggacaatcaaattgcagaaaaggctcaatatccaagagacagggactaatgcactgtacaatctgcttatccttgcccttctctcttgccaaagtgtgcttcagaaatatatactgctttaaaaaagaataaaagaatatccttttacaagtggctttacatttcctaaaatgccataagaaaatgcaatatctgggtactgtatggggaaaaaaatgtccaagtttgtgtaaaaccagtgcatttcagcttgcaagttactgaacacaataatgctgttttaattttgttttatatcagttaaaattcacaataatgtagatagaacaaattacagacaaggaaagaaaaaacttgaatgaaatggattttacagaaagctttatgataatttttgaatgcattatttattttttgtgccatgcattttttttctcaccaaatgaccttacctgtaatacagtcttgtttgtctgtttacaaccatgtatttattgcaatgtacatactgtaatgttaattgtaaattatctgttcttattaaaacatcatcccatgatgggatggtgttgatatatttggaaactcttggtgagagaatgaatggtgtgtatacatactctgtacatttttcttttctcctgtaatatagtcttgtcaccttagagcttgtttatggaagattcaagaaaactataaaatacttaaagatatataaatttaaaaaaacatagctgcaggtctttggtcccagggctgtgccttaactttaaccaatattttcttctgttttgctgcatttgaaaggtaacagtggagctagggctgggcattttacatccaggcttttaattgattagaattctgccaataggtggattttacaaaaccacagacaacctctgaaagattctgagacccttttgagacagaagctcttaagtacttcttgccagggagcagcactgcatgtgtgatggttgtttgccatctgttgatcaggaactacttcagctacttgcatttgattatttcctttttttttttttttaactcggaaacacaactggggaaatatattctttcccagtgattataaacaatctttttcttttttttaagtccttttggcttctagagctcataggaaaatggacttgatttgaaattggagccagagtttactcgtgttggttatctattcatcagcttcctgacatgttaagagaatacattaaagagaaaatactgttttttaatcctaaaatttttcttccactaagataaaccaaatgtccttacatatatgtaaacccatctatttaaacgcaaaggtgggttgatgtcagtttacatagcagaaagcattcactatcctctaagatttgtttctgcaaaactttcattgctttagaattttaaaatttcaccttgtacaatggccagcccctaaagcaggaaacatttataatggattatatggaaacatcctcccagtacttgcccagcccttgaatcatgtggcttttcagtgaaaggaaagattctttttctaggaaaaatgagcctattttattttattttattttattttttgacacaaactgtagattttagcagccctggcccaaaggaatttgattacttttgttttaaacagtacaaaggggacactataattacaaaaacatccttaactgatttgagttgtttttatttctttggatatattttcagagtggtaaattgtgtgtgagaattacaaatgattattcttttagtggtttcttagcctctcttacagcccacggggatagtactgtacatcaataccttcatatgaaatttttatatgcaatgaaaataaaagcatgggttgattctgcct

SEQ ID NO: 10849 - protein, 507 aa, Homo sapiens; identical to SEQ ID NO: 10817

SEQ ID NO: 10850 - DNA, 7194 bp, Homo sapiens
cccctctcggtagccctgaggctctggcgccttcaagtgagaagctaagcaccagcctctgctgggctgcagaagcggcggcggcggcagcagcagcagcagcatcaggaaggcgctcgggccagcgcggtgaacccgggctgggcagcaggtcgcggagccgcgagccaggatggaggcagagggcagcagcgcgccggcccgggcgggcagcggagagggcagcgacagcgccggcggggccacgctcaaagcccccaagcatctctggaggcacgagcagcaccaccagtacccgctccggcagccccagttccgcctcctgcatccccatcaccacctgcccccgccgccgccaccctcgccccagccccagccccagtgtccgctacagccgccgccgccgccccccctgccgccgcccccgccgccgcccggggctgcccgcggccgctacgcctcgagcggggccaccggccgcgtccggcatcgcggctactcggacaccgagcgctacctgtactgtcgcgccatggaccgcacctcctacgcggtggagaccggccaccggcccggcctgaagaaatccaggatgtcctggccctcctcgttccagggactcaggcgttttgatgtggacaatggcacatctgcgggacggagtcccttggatcccatgaccagcccaggatccgggctaattctccaagcaaattttgtccacagtcaacgacgggagtccttcctgtatcgatccgacagcgattatgacctctctccaaagtctatgtcccggaactcctccattgccagtgatatacacggagatgacttgattgtgactccatttgctcaggtcttggccagtctgcgaactgtacgaaacaactttgctgcattaactaatttgcaagatcgagcacctagcaaaagatcacccatgtgcaaccaaccatccatcaacaaagccaccataacagaggaggcctaccagaaactggccagcgagaccctggaggagctggactggtgtctggaccagctagagaccctacagaccaggcactccgtcagtgagatggcctccaacaagtttaaaaggatgcttaatcgggagctcacccatctctctgaaatgagtcggtctggaaatcaagtgtcagagtttatatcaaacacattcttagataagcaacatgaagtggaaattccttctccaactcagaaggaaaaggagaaaaagaaaagaccaatgtctcagatcagtggagtcaagaaattgatgcacagctctagtctgactaattcaagtatcccaaggtttggagttaaaactgaacaagaagatgtccttgccaaggaactagaagatgtgaacaaatggggtcttcatgttttcagaatagcagagttgtctggtaaccggcccttgactgttatcatgcacaccatttttcaggaacgggatttattaaaaacatttaaaattccagtagatactttaattacatatcttatgactctcgaagaccattaccatgctgatgtggcctatcacaacaatatccatgctgcagatgttgtccagtctactcatgtgctattatctacacctgctttggaggctgtgtttacagatttggagattcttgcagcaatttttgccagtgcaatacatgatgtagatcatcctggtgtgtccaatcaatttctgatcaatacaaactctgaacttgccttgatgtacaatgattcctcagtcttagagaaccatcatttggctgtgggctttaaattgcttcaggaagaaaactgtgacattttccagaatttgaccaaaaaacaaagacaatctttaaggaaaatggtcattgacatcgtacttgcaacagatatgtcaaaacacatgaatctactggctgatttgaagactatggttgaaactaagaaagtgacaagctctggagttcttcttcttgataattattccgataggattcaggttcttcagaatatggtgcactgtgcagatctgagcaacccaacaaagcctctccagctgtaccgccagtggacggaccggataatggaggagttcttccgccaaggagaccgagagagggaacgtggcatggagataagccccatgtgtgacaagcacaatgcttccgtggaaaaatcacaggtgggcttcatagactatattgttcatcccctctgggagacatgggcagacctcgtccaccctgacgcccaggatattttggacactttggaggacaatcgtgaatggtaccagagcacaatccctcagagcccctctcctgcacctgatgacccagaggagggccggcagggtcaaactgagaaattccagtttgaactaactttagaggaagatggtgagtcagacacggaaaaggacagtggcagtcaagtggaagaagacactagctgcagtgactccaagactctttgtactcaagactcagagtctactgaaattccccttgatgaacaggttgaagaggaggcagtaggggaagaagaggaaagccagcctgaagcctgtgtcatagatgatcgttctcctgacacgtaacagtgcaaaaactttcatgccttttttttttttaagtagaaaaattgtttccaaagtgcatgtcacatgccacaaccacggtcacacctcactgtcatctgccaggacgtttgttgaacaaaactgaccttgactactcagtccagcgctcaggaatatcgtaaccagttttttcacctccatgtcatccgagcaaggtggacatcttcacgaacagcgtttttaacaagatttcagcttggtagagctgacaaagcagataaaatctactccaaattattttcaagagagtgtgactcatcaggcagcccaaaagtttattggacttggggtttctattcctttttatttgtttgcaatattttcagaagaaaggcattgcacagagtgaacttaatggacgaagcaacaaatatgtcaagaacaggacatagcacgaatctgttaccagtaggaggaggatgagccacagaaattgcataattttctaatttcaagtcttcctgatacatgactgaatagtgtggttcagtgagctgcactgacctctacattttgtatgatatgtaaaacagattttttgtagagcttacttttattattaaatgtattgaggtattatatttaaaaaaaactatgttcagaacttcatctgccactggttatttttttctaaggagtaacttgcaagttttcagtacaaatctgtgctacactggataaaaatctaatttatgaattttacttgcaccttatagttcatagcaattaactgatttgtagtgattcattgtttgttttatataccaatgacttccatattttaaaagagaaaaacaactttatgttgcaggaaaccctttttgtaagtctttattatttactttgcattttgtttcactctttccagataagcagagttgctcttcaccagtgtttttcttcatgtgcaaagtgactatttgttctataatacttttatgtgtgttatatcaaatgtgtcttaagcttcatgcaaactcagtcatcagttcgtgttgtctgaagcaagtgggagatatataaatacccagtagctaaaatggtcagtcttttttagatgttttcctacttagtatctcctaataacgttttgctgtgtcactagatgttcatttcacaagtgcatgtctttctaataatccacacatttcatgctctaataatccacacatttcatgctcatttttattgtttttacagccagttatagtaagaaaaaggtttttccccttgtgctgctttataatttagcgtgtgtctgaaccttatccatgtttgctagatgaggtcttgtcaaatatatcactaccattgtcaccggtgaaaagaaacaggtagttaagttagggttaacattcatttcaaccacgaggttgtatatcatgactagcttttactcttggtttacagagaaaagttaaacagccaactaggcagtttttaagaatattaacaatatattaacaaacaccaatacaactaatcctatttggttttaatgatttcaccatgggattaagaactatatcaggaacatccctgagaaacggttttaagtgtagcaactactcttccttaatggacagccacataacgtgtaggaagtcctttatcacttatcctcgatccataagcatatcttgcagaggggaactacttctttaaacacatggagggaaagaagatgatgccactggcaccagagggttagtactgtgatgcatcctaaaatatttattatattggtaaaaattctggttaaataaaaaattagagatcactcttggctgatttcagcaccaggaactgtattacagttttagagattaattcctagtgtttacctgattatagcagttggcatcatggggcatttaattctgactttatccccacgtcagccttaataaagtcttctttaccttctctatgaagactttaaagcccaaataatcatttttcacattgatattcaagaattgagatagatagaagccaaagtgggtatctgacaagtggaaaatcaaacgtttaagaagaattacaactctgaaaagcatttatatgtggaacttctcaaggagcctcctggggactggaaagtaagtcatcagccaggcaaatgactcatgctgaagagagtccccatttcagtcccctgagatctagctgatgcttagatcctttgaaataaaaattatgtctttataactctgatcttttacataaagcagaagaggaatcaactagttaattgcaaggtttctactctgtttcctctgtaaagatcagatggtaatctttcaaataagaaaaaaataaagacgtatgtttgaccaagtagtttcacaagaatatttgggaacttgtttcttttaattttatttgtccctgagtgaagtctagaaagaaaggtaaagagtctagagtttattcctctttccaaaacattctcattcctctcctccctacacttagtatttcccccacagagtgcctagaatcttaataatgaataaaataaaaagcagcaatatgtcattaacaaatccagacctgaaagggtaaagggtttataactgcactaataaagagaggctctttttttttcttccagtttgttggtttttaatggtaccgtgttgtaaagatacccactaatggacaatcaaattgcagaaaaggctcaatatccaagagacagggactaatgcactgtacaatctgcttatccttgcccttctctcttgccaaagtgtgcttcagaaatatatactgctttaaaaaagaataaaagaatatccttttacaagtggctttacatttcctaaaatgccataagaaaatgcaatatctgggtactgtatggggaaaaaaatgtccaagtttgtgtaaaaccagtgcatttcagcttgcaagttactgaacacaataatgctgttttaattttgttttatatcagttaaaattcacaataatgtagatagaacaaattacagacaaggaaagaaaaaacttgaatgaaatggattttacagaaagctttatgataatttttgaatgcattatttattttttgtgccatgcattttttttctcaccaaatgaccttacctgtaatacagtcttgtttgtctgtttacaaccatgtatttattgcaatgtacatactgtaatgttaattgtaaattatctgttcttattaaaacatcatcccatgatgggatggtgttgatatatttggaaactcttggtgagagaatgaatggtgtgtatacatactctgtacatttttcttttctcctgtaatatagtcttgtcaccttagagcttgtttatggaagattcaagaaaactataaaatacttaaagatatataaatttaaaaaaacatagctgcaggtctttggtcccagggctgtgccttaactttaaccaatattttcttctgttttgctgcatttgaaaggtaacagtggagctagggctgggcattttacatccaggcttttaattgattagaattctgccaataggtggattttacaaaaccacagacaacctctgaaagattctgagacccttttgagacagaagctcttaagtacttcttgccagggagcagcactgcatgtgtgatggttgtttgccatctgttgatcaggaactacttcagctacttgcatttgattatttcctttttttttttttttaactcggaaacacaactggggaaatatattctttcccagtgattataaacaatctttttcttttttttaagtccttttggcttctagagctcataggaaaatggacttgatttgaaattggagccagagtttactcgtgttggttatctattcatcagcttcctgacatgttaagagaatacattaaagagaaaatactgttttttaatcctaaaatttttcttccactaagataaaccaaatgtccttacatatatgtaaacccatctatttaaacgcaaaggtgggttgatgtcagtttacatagcagaaagcattcactatcctctaagatttgtttctgcaaaactttcattgctttagaattttaaaatttcaccttgtacaatggccagcccctaaagcaggaaacatttataatggattatatggaaacatcctcccagtacttgcccagcccttgaatcatgtggcttttcagtgaaaggaaagattctttttctaggaaaaatgagcctattttattttattttattttattttttgacacaaactgtagattttagcagccctggcccaaaggaatttgattacttttgttttaaacagtacaaaggggacactataattacaaaaacatccttaactgatttgagttgtttttatttctttggatatattttcagagtggtaaattgtgtgtgagaattacaaatgattattcttttagtggtttcttagcctctcttacagcccacggggatagtactgtacatcaataccttcatatgaaatttttatatgcaatgaaaataaaagcatgggttgattctgcct

SEQ ID NO: 10851 - protein, 809 aa, Homo sapiens; identical to SEQ ID NO: 10831

SEQ ID NO: 10852 - DNA, 2597 bp, Homo sapiens
agttccttatttggtagcttttgacaggactagcctttcttgcaactaagcatcttgacatacattattcattaagccctggagctcgggagagaaagatgcagacccttagatctttagatattcctttatcacgtggattttctttattcagaatagttgctgaattttgtgccattctggagtcttacaaatggcatgtattcgatgggaagacggctggatgggatttaatgcgaggctttcttatgtatacttaattaccaaaaatctttaaaaactcatactctgcgtggcttgtggaggttgttaaagtgtcgagattttgaagctaaatacattttagagcttactatatatatacatatatatatatatacatataatcaatcaaaaatgcctgaagcaaactatttactgtcagtgtcttggggctacataaagtttaaaaggatgcttaatcgggagctcacccatctctctgaaatgagtcggtctggaaatcaagtgtcagagtttatatcaaacacattcttagataagcaacatgaagtggaaattccttctccaactcagaaggaaaaggagaaaaagaaaagaccaatgtctcagatcagtggagtcaagaaattgatgcacagctctagtctgactaattcaagtatcccaaggtttggagttaaaactgaacaagaagatgtccttgccaaggaactagaagatgtgaacaaatggggtcttcatgttttcagaatagcagagttgtctggtaaccggcccttgactgttatcatgcacaccatttttcaggaacgggatttattaaaaacatttaaaattccagtagatactttaattacatatcttatgactctcgaagaccattaccatgctgatgtggcctatcacaacaatatccatgctgcagatgttgtccagtctactcatgtgctattatctacacctgctttggaggctgtgtttacagatttggagattcttgcagcaatttttgccagtgcaatacatgatgtagatcatcctggtgtgtccaatcaatttctgatcaatacaaactctgaacttgccttgatgtacaatgattcctcagtcttagagaaccatcatttggctgtgggctttaaattgcttcaggaagaaaactgtgacattttccagaatttgaccaaaaaacaaagacaatctttaaggaaaatggtcattgacatcgtacttgcaacagatatgtcaaaacacatgaatctactggctgatttgaagactatggttgaaactaagaaagtgacaagctctggagttcttcttcttgataattattccgataggattcaggttcttcagaatatggtgcactgtgcagatctgagcaacccaacaaagcctctccagctgtaccgccagtggacggaccggataatggaggagttcttccgccaaggagaccgagagagggaacgtggcatggagataagccccatgtgtgacaagcacaatgcttccgtggaaaaatcacaggtgggcttcatagactatattgttcatcccctctgggagacatgggcagacctcgtccaccctgacgcccaggatattttggacactttggaggacaatcgtgaatggtaccagagcacaatccctcagagcccctctcctgcacctgatgacccagaggagggccggcagggtcaaactgagaaattccagtttgaactaactttagaggaagatggtgagtcagacacggaaaaggacagtggcagtcaagtggaagaagacactagctgcagtgactccaagactctttgtactcaagactcagagtctactgaaattccccttgatgaacaggttgaagaggaggcagtaggggaagaagaggaaagccagcctgaagcctgtgtcatagatgatcgttctcctgacacgtaacagtgcaaaaactttcatgccttttttttttttaagtagaaaaattgtttccaaagtgcatgtcacatgccacaaccacggtcacacctcactgtcatctgccaggacgtttgttgaacaaaactgaccttgactactcagtccagcgctcaggaatatcgtaaccagttttttcacctccatgtcatccgagcaaggtggacatcttcacgaacagcgtttttaacaagatttcagcttggtagagctgacaaagcagataaaatctactccaaattattttcaagagagtgtgactcatcaggcagcccaaaagtttattggacttggggtttctattcctttttatttgtttgcaatattttcagaagaaaggcattgcacagagtgaacttaatggacgaagcaacaaatatgtcaagaacaggacatagcacgaatctgttaccagtaggaggaggatgagccacagaaattgcataattttctaatttcaagtcttcctgatacatgactgaatagtgtggttcagtgagctgcactgacctctacattttgtatgatatgtaaaacagattttttgtagagcttacttttattattaaatgtattgaggtattatatttaaaaaaaactatgttcag

SEQ ID NO: 10853 - protein, 518 aa, Homo sapiens; identical to SEQ ID NO: 10813

SEQ ID NO: 10854 - DNA, 3047 bp, Homo sapiens
ggggggatggcactgcgaggtggcggggcccccggggcagagctcgaggggaaggacgcggcgggtggcacggacagggacaggcttttgcaattcggaatcttttcgtaagggggttgaggaggagccaggcagcgccgagggccgagaggggcgtgagggggagtgttcccggaaagctgcggcgttggagccgcgctgcgcctgccgcccgaggagttgagaaagaaaacaggaaacgtggtggccgcgcacccggccgcggctgattcattcacttcaagtgccgtgcagaaggctcggcaggcggggcgggcgtggggccgcggctccgggttggggaccgaggagatccggctgtggaccagacgctcctctgcggggcgggcacccaagcgcgctcgccaccccctcgccatccgctagagccgggctcctggactgggactcgggcccgccgcacagttgaaaagtcgcatagtggtttttccgctcgcgtcgctgtgtgaaagttggctcgccgctctttgcacgccctccctggaggccgacccgagacgccaagctggagagaccgtgcctccccgaggccggccgccccgcgagcacagcctccgcccccgttgcactgccgggctgggcaatatgaaggagcagccctcatgtgccggcaccgggcatccgagcatggcggggtatggcaggatggccccctttgaactcgctagcggacccgtgaagcgcttgagaactgagtccccctttccctgtctcttcgcagaggaggcctaccagaaactggccagcgagaccctggaggagctggactggtgtctggaccagctagagaccctacagaccaggcactccgtcagtgagatggcctccaacaagtttaaaaggatgcttaatcgggagctcacccatctctctgaaatgagtcggtctggaaatcaagtgtcagagtttatatcaaacacattcttagataagcaacatgaagtggaaattccttctccaactcagaaggaaaaggagaaaaagaaaagaccaatgtctcagatcagtggagtcaagaaattgatgcacagctctagtctgactaattcaagtatcccaaggtttggagttaaaactgaacaagaagatgtccttgccaaggaactagaagatgtgaacaaatggggtcttcatgttttcagaatagcagagttgtctggtaaccggcccttgactgttatcatgcacaccatttttcaggaacgggatttattaaaaacatttaaaattccagtagatactttaattacatatcttatgactctcgaagaccattaccatgctgatgtggcctatcacaacaatatccatgctgcagatgttgtccagtctactcatgtgctattatctacacctgctttggaggctgtgtttacagatttggagattcttgcagcaatttttgccagtgcaatacatgatgtagatcatcctggtgtgtccaatcaatttctgatcaatacaaactctgaacttgccttgatgtacaatgattcctcagtcttagagaaccatcatttggctgtgggctttaaattgcttcaggaagaaaactgtgacattttccagaatttgaccaaaaaacaaagacaatctttaaggaaaatggtcattgacatcgtacttgcaacagatatgtcaaaacacatgaatctactggctgatttgaagactatggttgaaactaagaaagtgacaagctctggagttcttcttcttgataattattccgataggattcaggttcttcagaatatggtgcactgtgcagatctgagcaacccaacaaagcctctccagctgtaccgccagtggacggaccggataatggaggagttcttccgccaaggagaccgagagagggaacgtggcatggagataagccccatgtgtgacaagcacaatgcttccgtggaaaaatcacaggtgggcttcatagactatattgttcatcccctctgggagacatgggcagacctcgtccaccctgacgcccaggatattttggacactttggaggacaatcgtgaatggtaccagagcacaatccctcagagcccctctcctgcacctgatgacccagaggagggccggcagggtcaaactgagaaattccagtttgaactaactttagaggaagatggtgagtcagacacggaaaaggacagtggcagtcaagtggaagaagacactagctgcagtgactccaagactctttgtactcaagactcagagtctactgaaattccccttgatgaacaggttgaagaggaggcagtaggggaagaagaggaaagccagcctgaagcctgtgtcatagatgatcgttctcctgacacgtaacagtgcaaaaactttcatgccttttttttttttaagtagaaaaattgtttccaaagtgcatgtcacatgccacaaccacggtcacacctcactgtcatctgccaggacgtttgttgaacaaaactgaccttgactactcagtccagcgctcaggaatatcgtaaccagttttttcacctccatgtcatccgagcaaggtggacatcttcacgaacagcgtttttaacaagatttcagcttggtagagctgacaaagcagataaaatctactccaaattattttcaagagagtgtgactcatcaggcagcccaaaagtttattggacttggggtttctattcctttttatttgtttgcaatattttcagaagaaaggcattgcacagagtgaacttaatggacgaagcaacaaatatgtcaagaacaggacatagcacgaatctgttaccagtaggaggaggatgagccacagaaattgcataattttctaatttcaagtcttcctgatacatgactgaatagtgtggttcagtgagctgcactgacctctacattttgtatgatatgtaaaacagattttttgtagagcttacttttattattaaatgtattgaggtattatatttaaaaaaaactatgttcag

SEQ ID NO: 10855 - protein, 585 aa, Homo sapiens; identical to SEQ ID NO: 10815

SEQ ID NO: 10856 - DNA, 2961 bp, Homo sapiens
ggggggatggcactgcgaggtggcggggcccccggggcagagctcgaggggaaggacgcggcgggtggcacggacagggacaggcttttgcaattcggaatcttttcgtaagggggttgaggaggagccaggcagcgccgagggccgagaggggcgtgagggggagtgttcccggaaagctgcggcgttggagccgcgctgcgcctgccgcccgaggagttgagaaagaaaacaggaaacgtggtggccgcgcacccggccgcggctgattcattcacttcaagtgccgtgcagaaggctcggcaggcggggcgggcgtggggccgcggctccgggttggggaccgaggagatccggctgtggaccagacgctcctctgcggggcgggcacccaagcgcgctcgccaccccctcgccatccgctagagccgggctcctggactgggactcgggcccgccgcacagttgaaaagtcgcatagtggtttttccgctcgcgtcgctgtgtgaaagttggctcgccgctctttgcacgccctccctggaggccgacccgagacgccaagctggagagaccgtgcctccccgaggccggccgccccgcgagcacagcctccgcccccgttgcactgccgggctgggcaatatgaaggagcagccctcatgtgccggcaccgggcatccgagcatggcgggaggaggcctaccagaaactggccagcgagaccctggaggagctggactggtgtctggaccagctagagaccctacagaccaggcactccgtcagtgagatggcctccaacaagtttaaaaggatgcttaatcgggagctcacccatctctctgaaatgagtcggtctggaaatcaagtgtcagagtttatatcaaacacattcttagataagcaacatgaagtggaaattccttctccaactcagaaggaaaaggagaaaaagaaaagaccaatgtctcagatcagtggagtcaagaaattgatgcacagctctagtctgactaattcaagtatcccaaggtttggagttaaaactgaacaagaagatgtccttgccaaggaactagaagatgtgaacaaatggggtcttcatgttttcagaatagcagagttgtctggtaaccggcccttgactgttatcatgcacaccatttttcaggaacgggatttattaaaaacatttaaaattccagtagatactttaattacatatcttatgactctcgaagaccattaccatgctgatgtggcctatcacaacaatatccatgctgcagatgttgtccagtctactcatgtgctattatctacacctgctttggaggctgtgtttacagatttggagattcttgcagcaatttttgccagtgcaatacatgatgtagatcatcctggtgtgtccaatcaatttctgatcaatacaaactctgaacttgccttgatgtacaatgattcctcagtcttagagaaccatcatttggctgtgggctttaaattgcttcaggaagaaaactgtgacattttccagaatttgaccaaaaaacaaagacaatctttaaggaaaatggtcattgacatcgtacttgcaacagatatgtcaaaacacatgaatctactggctgatttgaagactatggttgaaactaagaaagtgacaagctctggagttcttcttcttgataattattccgataggattcaggttcttcagaatatggtgcactgtgcagatctgagcaacccaacaaagcctctccagctgtaccgccagtggacggaccggataatggaggagttcttccgccaaggagaccgagagagggaacgtggcatggagataagccccatgtgtgacaagcacaatgcttccgtggaaaaatcacaggtgggcttcatagactatattgttcatcccctctgggagacatgggcagacctcgtccaccctgacgcccaggatattttggacactttggaggacaatcgtgaatggtaccagagcacaatccctcagagcccctctcctgcacctgatgacccagaggagggccggcagggtcaaactgagaaattccagtttgaactaactttagaggaagatggtgagtcagacacggaaaaggacagtggcagtcaagtggaagaagacactagctgcagtgactccaagactctttgtactcaagactcagagtctactgaaattccccttgatgaacaggttgaagaggaggcagtaggggaagaagaggaaagccagcctgaagcctgtgtcatagatgatcgttctcctgacacgtaacagtgcaaaaactttcatgccttttttttttttaagtagaaaaattgtttccaaagtgcatgtcacatgccacaaccacggtcacacctcactgtcatctgccaggacgtttgttgaacaaaactgaccttgactactcagtccagcgctcaggaatatcgtaaccagttttttcacctccatgtcatccgagcaaggtggacatcttcacgaacagcgtttttaacaagatttcagcttggtagagctgacaaagcagataaaatctactccaaattattttcaagagagtgtgactcatcaggcagcccaaaagtttattggacttggggtttctattcctttttatttgtttgcaatattttcagaagaaaggcattgcacagagtgaacttaatggacgaagcaacaaatatgtcaagaacaggacatagcacgaatctgttaccagtaggaggaggatgagccacagaaattgcataattttctaatttcaagtcttcctgatacatgactgaatagtgtggttcagtgagctgcactgacctctacattttgtatgatatgtaaaacagattttttgtagagcttacttttattattaaatgtattgaggtattatatttaaaaaaaactatgttcag

SEQ ID NO: 10857 - protein, 507 aa, Homo sapiens; identical to SEQ ID NO: 10817

SEQ ID NO: 10858 - DNA, 3401 bp, Homo sapiens
ttctcactgccctgcggtgttttgaactgccttcttacagacgtcatacagcccttgaggaatagtttctgcctggtgagattgaatgatagttctcattcacaaaaccctggattctaagcagggacacacagaaattactttcgcaggtaaatcagcccacccagccaaagtgtggagagatttgttccttggctgacttctttgctccacggagaggagtgttttcctgtgcttgccctgaaatggaacttccttgacagctctcccgtgttacagtacctcccggtcattttctttttctctctctctacctgcgctcttcgagtgtcagaaacctttaaagctgttactatggaattgcaaaaaagagatcaagtgactctttcactatgctggtttcccttgtgacccagatgaagaatcaattcagaattcagttcctcccttggcattgcaagacacagaagaaactgtcacttcctaacagcctagtactggagtaaattcagtatgaaggaagaaagcgctcctgcgtgttagaaccttgcccatgagctggaccgaggacaggagatggactccaggaaaattggatttcttcaagcagcctcccttggaaatggaatatctttaaaatcttctttgcagaaagacagttagaatgtattaatcagaatagttgaagacttattttcctttttattttttttcaaaatgagcattattatgaagccaagatcccgatctacaagttccctaaggactgcagaggcagtttgttttgatgtggacaatggcacatctgcgggacggagtcccttggatcccatgaccagcccaggatccgggctaattctccaagcaaattttgtccacagtcaacgacgggagtccttcctgtatcgatccgacagcgattatgacctctctccaaagtctatgtcccggaactcctccattgccagtgatatacacggagatgacttgattgtgactccatttgctcaggtcttggccagtctgcgaactgtacgaaacaactttgctgcattaactaatttgcaagatcgagcacctagcaaaagatcacccatgtgcaaccaaccatccatcaacaaagccaccataacagaggaggcctaccagaaactggccagcgagaccctggaggagctggactggtgtctggaccagctagagaccctacagaccaggcactccgtcagtgagatggcctccaacaagtttaaaaggatgcttaatcgggagctcacccatctctctgaaatgagtcggtctggaaatcaagtgtcagagtttatatcaaacacattcttagataagcaacatgaagtggaaattccttctccaactcagaaggaaaaggagaaaaagaaaagaccaatgtctcagatcagtggagtcaagaaattgatgcacagctctagtctgactaattcaagtatcccaaggtttggagttaaaactgaacaagaagatgtccttgccaaggaactagaagatgtgaacaaatggggtcttcatgttttcagaatagcagagttgtctggtaaccggcccttgactgttatcatgcacaccatttttcaggaacgggatttattaaaaacatttaaaattccagtagatactttaattacatatcttatgactctcgaagaccattaccatgctgatgtggcctatcacaacaatatccatgctgcagatgttgtccagtctactcatgtgctattatctacacctgctttggaggctgtgtttacagatttggagattcttgcagcaatttttgccagtgcaatacatgatgtagatcatcctggtgtgtccaatcaatttctgatcaatacaaactctgaacttgccttgatgtacaatgattcctcagtcttagagaaccatcatttggctgtgggctttaaattgcttcaggaagaaaactgtgacattttccagaatttgaccaaaaaacaaagacaatctttaaggaaaatggtcattgacatcgtacttgcaacagatatgtcaaaacacatgaatctactggctgatttgaagactatggttgaaactaagaaagtgacaagctctggagttcttcttcttgataattattccgataggattcaggttcttcagaatatggtgcactgtgcagatctgagcaacccaacaaagcctctccagctgtaccgccagtggacggaccggataatggaggagttcttccgccaaggagaccgagagagggaacgtggcatggagataagccccatgtgtgacaagcacaatgcttccgtggaaaaatcacaggtgggcttcatagactatattgttcatcccctctgggagacatgggcagacctcgtccaccctgacgcccaggatattttggacactttggaggacaatcgtgaatggtaccagagcacaatccctcagagcccctctcctgcacctgatgacccagaggagggccggcagggtcaaactgagaaattccagtttgaactaactttagaggaagatggtgagtcagacacggaaaaggacagtggcagtcaagtggaagaagacactagctgcagtgactccaagactctttgtactcaagactcagagtctactgaaattccccttgatgaacaggttgaagaggaggcagtaggggaagaagaggaaagccagcctgaagcctgtgtcatagatgatcgttctcctgacacgtaacagtgcaaaaactttcatgccttttttttttttaagtagaaaaattgtttccaaagtgcatgtcacatgccacaaccacggtcacacctcactgtcatctgccaggacgtttgttgaacaaaactgaccttgactactcagtccagcgctcaggaatatcgtaaccagttttttcacctccatgtcatccgagcaaggtggacatcttcacgaacagcgtttttaacaagatttcagcttggtagagctgacaaagcagataaaatctactccaaattattttcaagagagtgtgactcatcaggcagcccaaaagtttattggacttggggtttctattcctttttatttgtttgcaatattttcagaagaaaggcattgcacagagtgaacttaatggacgaagcaacaaatatgtcaagaacaggacatagcacgaatctgttaccagtaggaggaggatgagccacagaaattgcataattttctaatttcaagtcttcctgatacatgactgaatagtgtggttcagtgagctgcactgacctctacattttgtatgatatgtaaaacagattttttgtagagcttacttttattattaaatgtattgaggtattatatttaaaaaaaactatgttcag

SEQ ID NO: 10859 - protein, 679 aa, Homo sapiens; identical to SEQ ID NO: 10819

SEQ ID NO: 10860 - DNA, 2837 bp, Homo sapiens
actgcacaaaggaaatgccctcactcagctacaagtgcctcctgctccgtgcggggcctcagggccccagagccccgcaccagctctgacttctcgtggttcctggggatcttggcatcgtccttaaaaatggcttttgtttgggatcctctgggagccacggtgccaggaccatctacaagagccaaatcaagattgcgtttctcaaagtcctacagttttgatgtggacaatggcacatctgcgggacggagtcccttggatcccatgaccagcccaggatccgggctaattctccaagcaaattttgtccacagtcaacgacgggagtccttcctgtatcgatccgacagcgattatgacctctctccaaagtctatgtcccggaactcctccattgccagtgatatacacggagatgacttgattgtgactccatttgctcaggtcttggccagtctgcgaactgtacgaaacaactttgctgcattaactaatttgcaagatcgagcacctagcaaaagatcacccatgtgcaaccaaccatccatcaacaaagccaccataacagaggaggcctaccagaaactggccagcgagaccctggaggagctggactggtgtctggaccagctagagaccctacagaccaggcactccgtcagtgagatggcctccaacaagtttaaaaggatgcttaatcgggagctcacccatctctctgaaatgagtcggtctggaaatcaagtgtcagagtttatatcaaacacattcttagataagcaacatgaagtggaaattccttctccaactcagaaggaaaaggagaaaaagaaaagaccaatgtctcagatcagtggagtcaagaaattgatgcacagctctagtctgactaattcaagtatcccaaggtttggagttaaaactgaacaagaagatgtccttgccaaggaactagaagatgtgaacaaatggggtcttcatgttttcagaatagcagagttgtctggtaaccggcccttgactgttatcatgcacaccatttttcaggaacgggatttattaaaaacatttaaaattccagtagatactttaattacatatcttatgactctcgaagaccattaccatgctgatgtggcctatcacaacaatatccatgctgcagatgttgtccagtctactcatgtgctattatctacacctgctttggaggctgtgtttacagatttggagattcttgcagcaatttttgccagtgcaatacatgatgtagatcatcctggtgtgtccaatcaatttctgatcaatacaaactctgaacttgccttgatgtacaatgattcctcagtcttagagaaccatcatttggctgtgggctttaaattgcttcaggaagaaaactgtgacattttccagaatttgaccaaaaaacaaagacaatctttaaggaaaatggtcattgacatcgtacttgcaacagatatgtcaaaacacatgaatctactggctgatttgaagactatggttgaaactaagaaagtgacaagctctggagttcttcttcttgataattattccgataggattcaggttcttcagaatatggtgcactgtgcagatctgagcaacccaacaaagcctctccagctgtaccgccagtggacggaccggataatggaggagttcttccgccaaggagaccgagagagggaacgtggcatggagataagccccatgtgtgacaagcacaatgcttccgtggaaaaatcacaggtgggcttcatagactatattgttcatcccctctgggagacatgggcagacctcgtccaccctgacgcccaggatattttggacactttggaggacaatcgtgaatggtaccagagcacaatccctcagagcccctctcctgcacctgatgacccagaggagggccggcagggtcaaactgagaaattccagtttgaactaactttagaggaagatggtgagtcagacacggaaaaggacagtggcagtcaagtggaagaagacactagctgcagtgactccaagactctttgtactcaagactcagagtctactgaaattccccttgatgaacaggttgaagaggaggcagtaggggaagaagaggaaagccagcctgaagcctgtgtcatagatgatcgttctcctgacacgtaacagtgcaaaaactttcatgccttttttttttttaagtagaaaaattgtttccaaagtgcatgtcacatgccacaaccacggtcacacctcactgtcatctgccaggacgtttgttgaacaaaactgaccttgactactcagtccagcgctcaggaatatcgtaaccagttttttcacctccatgtcatccgagcaaggtggacatcttcacgaacagcgtttttaacaagatttcagcttggtagagctgacaaagcagataaaatctactccaaattattttcaagagagtgtgactcatcaggcagcccaaaagtttattggacttggggtttctattcctttttatttgtttgcaatattttcagaagaaaggcattgcacagagtgaacttaatggacgaagcaacaaatatgtcaagaacaggacatagcacgaatctgttaccagtaggaggaggatgagccacagaaattgcataattttctaatttcaagtcttcctgatacatgactgaatagtgtggttcagtgagctgcactgacctctacattttgtatgatatgtaaaacagattttttgtagagcttacttttattattaaatgtattgaggtattatatttaaaaaaaactatgttcag

SEQ ID NO: 10861 - protein, 687 aa, Homo sapiens; identical to SEQ ID NO: 10821

SEQ ID NO: 10862 - DNA, 2331 bp, Homo sapiens
gacagaagatctgcgaacatgatgcacgtgaataattttccctttagaaggcattcctggatatgaggaggcctaccagaaactggccagcgagaccctggaggagctggactggtgtctggaccagctagagaccctacagaccaggcactccgtcagtgagatggcctccaacaagtttaaaaggatgcttaatcgggagctcacccatctctctgaaatgagtcggtctggaaatcaagtgtcagagtttatatcaaacacattcttagataagcaacatgaagtggaaattccttctccaactcagaaggaaaaggagaaaaagaaaagaccaatgtctcagatcagtggagtcaagaaattgatgcacagctctagtctgactaattcaagtatcccaaggtttggagttaaaactgaacaagaagatgtccttgccaaggaactagaagatgtgaacaaatggggtcttcatgttttcagaatagcagagttgtctggtaaccggcccttgactgttatcatgcacaccatttttcaggaacgggatttattaaaaacatttaaaattccagtagatactttaattacatatcttatgactctcgaagaccattaccatgctgatgtggcctatcacaacaatatccatgctgcagatgttgtccagtctactcatgtgctattatctacacctgctttggaggctgtgtttacagatttggagattcttgcagcaatttttgccagtgcaatacatgatgtagatcatcctggtgtgtccaatcaatttctgatcaatacaaactctgaacttgccttgatgtacaatgattcctcagtcttagagaaccatcatttggctgtgggctttaaattgcttcaggaagaaaactgtgacattttccagaatttgaccaaaaaacaaagacaatctttaaggaaaatggtcattgacatcgtacttgcaacagatatgtcaaaacacatgaatctactggctgatttgaagactatggttgaaactaagaaagtgacaagctctggagttcttcttcttgataattattccgataggattcaggttcttcagaatatggtgcactgtgcagatctgagcaacccaacaaagcctctccagctgtaccgccagtggacggaccggataatggaggagttcttccgccaaggagaccgagagagggaacgtggcatggagataagccccatgtgtgacaagcacaatgcttccgtggaaaaatcacaggtgggcttcatagactatattgttcatcccctctgggagacatgggcagacctcgtccaccctgacgcccaggatattttggacactttggaggacaatcgtgaatggtaccagagcacaatccctcagagcccctctcctgcacctgatgacccagaggagggccggcagggtcaaactgagaaattccagtttgaactaactttagaggaagatggtgagtcagacacggaaaaggacagtggcagtcaagtggaagaagacactagctgcagtgactccaagactctttgtactcaagactcagagtctactgaaattccccttgatgaacaggttgaagaggaggcagtaggggaagaagaggaaagccagcctgaagcctgtgtcatagatgatcgttctcctgacacgtaacagtgcaaaaactttcatgccttttttttttttaagtagaaaaattgtttccaaagtgcatgtcacatgccacaaccacggtcacacctcactgtcatctgccaggacgtttgttgaacaaaactgaccttgactactcagtccagcgctcaggaatatcgtaaccagttttttcacctccatgtcatccgagcaaggtggacatcttcacgaacagcgtttttaacaagatttcagcttggtagagctgacaaagcagataaaatctactccaaattattttcaagagagtgtgactcatcaggcagcccaaaagtttattggacttggggtttctattcctttttatttgtttgcaatattttcagaagaaaggcattgcacagagtgaacttaatggacgaagcaacaaatatgtcaagaacaggacatagcacgaatctgttaccagtaggaggaggatgagccacagaaattgcataattttctaatttcaagtcttcctgatacatgactgaatagtgtggttcagtgagctgcactgacctctacattttgtatgatatgtaaaacagattttttgtagagcttacttttattattaaatgtattgaggtattatatttaaaaaaaactatgttcag

SEQ ID NO: 10863 - protein, 507 aa, Homo sapiens; identical to SEQ ID NO: 10817

SEQ ID NO: 10864 - DNA, 2740 bp, Homo sapiens
ggaattcatctgtaaaaatcactacatgtaacgtaggagacaagaaaaatattaatgacagaagatctgcgaacatgatgcacgtgaataattttccctttagaaggcattcctggatatgttttgatgtggacaatggcacatctgcgggacggagtcccttggatcccatgaccagcccaggatccgggctaattctccaagcaaattttgtccacagtcaacgacgggagtccttcctgtatcgatccgacagcgattatgacctctctccaaagtctatgtcccggaactcctccattgccagtgatatacacggagatgacttgattgtgactccatttgctcaggtcttggccagtctgcgaactgtacgaaacaactttgctgcattaactaatttgcaagatcgagcacctagcaaaagatcacccatgtgcaaccaaccatccatcaacaaagccaccataacagaggaggcctaccagaaactggccagcgagaccctggaggagctggactggtgtctggaccagctagagaccctacagaccaggcactccgtcagtgagatggcctccaacaagtttaaaaggatgcttaatcgggagctcacccatctctctgaaatgagtcggtctggaaatcaagtgtcagagtttatatcaaacacattcttagataagcaacatgaagtggaaattccttctccaactcagaaggaaaaggagaaaaagaaaagaccaatgtctcagatcagtggagtcaagaaattgatgcacagctctagtctgactaattcaagtatcccaaggtttggagttaaaactgaacaagaagatgtccttgccaaggaactagaagatgtgaacaaatggggtcttcatgttttcagaatagcagagttgtctggtaaccggcccttgactgttatcatgcacaccatttttcaggaacgggatttattaaaaacatttaaaattccagtagatactttaattacatatcttatgactctcgaagaccattaccatgctgatgtggcctatcacaacaatatccatgctgcagatgttgtccagtctactcatgtgctattatctacacctgctttggaggctgtgtttacagatttggagattcttgcagcaatttttgccagtgcaatacatgatgtagatcatcctggtgtgtccaatcaatttctgatcaatacaaactctgaacttgccttgatgtacaatgattcctcagtcttagagaaccatcatttggctgtgggctttaaattgcttcaggaagaaaactgtgacattttccagaatttgaccaaaaaacaaagacaatctttaaggaaaatggtcattgacatcgtacttgcaacagatatgtcaaaacacatgaatctactggctgatttgaagactatggttgaaactaagaaagtgacaagctctggagttcttcttcttgataattattccgataggattcaggttcttcagaatatggtgcactgtgcagatctgagcaacccaacaaagcctctccagctgtaccgccagtggacggaccggataatggaggagttcttccgccaaggagaccgagagagggaacgtggcatggagataagccccatgtgtgacaagcacaatgcttccgtggaaaaatcacaggtgggcttcatagactatattgttcatcccctctgggagacatgggcagacctcgtccaccctgacgcccaggatattttggacactttggaggacaatcgtgaatggtaccagagcacaatccctcagagcccctctcctgcacctgatgacccagaggagggccggcagggtcaaactgagaaattccagtttgaactaactttagaggaagatggtgagtcagacacggaaaaggacagtggcagtcaagtggaagaagacactagctgcagtgactccaagactctttgtactcaagactcagagtctactgaaattccccttgatgaacaggttgaagaggaggcagtaggggaagaagaggaaagccagcctgaagcctgtgtcatagatgatcgttctcctgacacgtaacagtgcaaaaactttcatgccttttttttttttaagtagaaaaattgtttccaaagtgcatgtcacatgccacaaccacggtcacacctcactgtcatctgccaggacgtttgttgaacaaaactgaccttgactactcagtccagcgctcaggaatatcgtaaccagttttttcacctccatgtcatccgagcaaggtggacatcttcacgaacagcgtttttaacaagatttcagcttggtagagctgacaaagcagataaaatctactccaaattattttcaagagagtgtgactcatcaggcagcccaaaagtttattggacttggggtttctattcctttttatttgtttgcaatattttcagaagaaaggcattgcacagagtgaacttaatggacgaagcaacaaatatgtcaagaacaggacatagcacgaatctgttaccagtaggaggaggatgagccacagaaattgcataattttctaatttcaagtcttcctgatacatgactgaatagtgtggttcagtgagctgcactgacctctacattttgtatgatatgtaaaacagattttttgtagagcttacttttattattaaatgtattgaggtattatatttaaaaaaaactatgttcag

SEQ ID NO: 10865 - protein, 673 aa, Homo sapiens; identical to SEQ ID NO: 976

SEQ ID NO: 10866 - DNA, 3266 bp, Homo sapiens
tgcggcgcattagttccaatagtttaacaggctgctttgtagcacggacaaagccgtgcgagcgcggtgctttccctccttgttcatttgctatgcgagcttgtcagtgatctttggcaggggcttgggagaggaggggtgacgtttaatacgcttccgcggaggagtgcgctcgcctcctctgcacccagccccaggctctacagagagactgaggcaggcgactgaatgcactaacagcagcaggctcagacctgcttccctggacatttccgggaccgtgagcgagggaaccacgttgccctggattcttgccagctgtacaaagttgaccaggaaaatggctcagcagacaagcccggacactttaacagtacctgaagtggataatccgcattgtccaaacccgtggctgaacgaagaccttgtgaaatccttgcgagaaaacctgttgcagcatgagaagtccaagacagcgaggaaatcggtttctcccaagctctctccagtgatctctccgagaaattcccccaggcttctgcgcagaatgcttctcagcagcaacatccccaaacagcggcgtttcacggtggcacatacatgttttgatgtggacaatggcacatctgcgggacggagtcccttggatcccatgaccagcccaggatccgggctaattctccaagcaaattttgtccacagtcaacgacgggagtccttcctgtatcgatccgacagcgattatgacctctctccaaagtctatgtcccggaactcctccattgccagtgatatacacggagatgacttgattgtgactccatttgctcaggtcttggccagtctgcgaactgtacgaaacaactttgctgcattaactaatttgcaagatcgagcacctagcaaaagatcacccatgtgcaaccaaccatccatcaacaaagccaccataacagggctctataatgggatcattgcatttctctgattactaatgagaaggaggcctaccagaaactggccagcgagaccctggaggagctggactggtgtctggaccagctagagaccctacagaccaggcactccgtcagtgagatggcctccaacaagtttaaaaggatgcttaatcgggagctcacccatctctctgaaatgagtcggtctggaaatcaagtgtcagagtttatatcaaacacattcttagataagcaacatgaagtggaaattccttctccaactcagaaggaaaaggagaaaaagaaaagaccaatgtctcagatcagtggagtcaagaaattgatgcacagctctagtctgactaattcaagtatcccaaggtttggagttaaaactgaacaagaagatgtccttgccaaggaactagaagatgtgaacaaatggggtcttcatgttttcagaatagcagagttgtctggtaaccggcccttgactgttatcatgcacaccatttttcaggaacgggatttattaaaaacatttaaaattccagtagatactttaattacatatcttatgactctcgaagaccattaccatgctgatgtggcctatcacaacaatatccatgctgcagatgttgtccagtctactcatgtgctattatctacacctgctttggaggctgtgtttacagatttggagattcttgcagcaatttttgccagtgcaatacatgatgtagatcatcctggtgtgtccaatcaatttctgatcaatacaaactctgaacttgccttgatgtacaatgattcctcagtcttagagaaccatcatttggctgtgggctttaaattgcttcaggaagaaaactgtgacattttccagaatttgaccaaaaaacaaagacaatctttaaggaaaatggtcattgacatcgtacttgcaacagatatgtcaaaacacatgaatctactggctgatttgaagactatggttgaaactaagaaagtgacaagctctggagttcttcttcttgataattattccgataggattcaggttcttcagaatatggtgcactgtgcagatctgagcaacccaacaaagcctctccagctgtaccgccagtggacggaccggataatggaggagttcttccgccaaggagaccgagagagggaacgtggcatggagataagccccatgtgtgacaagcacaatgcttccgtggaaaaatcacaggtgggcttcatagactatattgttcatcccctctgggagacatgggcagacctcgtccaccctgacgcccaggatattttggacactttggaggacaatcgtgaatggtaccagagcacaatccctcagagcccctctcctgcacctgatgacccagaggagggccggcagggtcaaactgagaaattccagtttgaactaactttagaggaagatggtgagtcagacacggaaaaggacagtggcagtcaagtggaagaagacactagctgcagtgactccaagactctttgtactcaagactcagagtctactgaaattccccttgatgaacaggttgaagaggaggcagtaggggaagaagaggaaagccagcctgaagcctgtgtcatagatgatcgttctcctgacacgtaacagtgcaaaaactttcatgccttttttttttttaagtagaaaaattgtttccaaagtgcatgtcacatgccacaaccacggtcacacctcactgtcatctgccaggacgtttgttgaacaaaactgaccttgactactcagtccagcgctcaggaatatcgtaaccagttttttcacctccatgtcatccgagcaaggtggacatcttcacgaacagcgtttttaacaagatttcagcttggtagagctgacaaagcagataaaatctactccaaattattttcaagagagtgtgactcatcaggcagcccaaaagtttattggacttggggtttctattcctttttatttgtttgcaatattttcagaagaaaggcattgcacagagtgaacttaatggacgaagcaacaaatatgtcaagaacaggacatagcacgaatctgttaccagtaggaggaggatgagccacagaaattgcataattttctaatttcaagtcttcctgatacatgactgaatagtgtggttcagtgagctgcactgacctctacattttgtatgatatgtaaaacagattttttgtagagcttacttttattattaaatgtattgaggtattatatttaaaaaaaactatgttcag

SEQ ID NO: 10867 - protein, 507 aa, Homo sapiens; identical to SEQ ID NO: 10817

SEQ ID NO: 10868 - DNA, 574 bp, Homo sapiens
cggccgctacgcctcgagcggggccaccggccgcgtccggcatcgcggctactcggacaccgagcgctacctgtactgtcgcgccatggaccgcacctcctacgcggtggagaccggccaccggcccggcctgaagaaatccaggatgtcctggccctcctcgttccagggactcaggcgttttgatgtggacaatggcacatctgcgggacggagtcccttggatcccatgaccagcccaggatccgggctaattctccaagcaaattttgtccacagtcaacgacgggagtccttcctgtatcgatccgacagcgattatgacctctctccaaagtctatgtcccggaactcctccattgccagtgatatacacggagatgacttgattgtgactccatttgctcaggtcttggccagtctgcgaactgtacgaaacaactttgctgcattaactaatttgcaagatcgagcacctagcaaaagatcacccatgtgcaaccaaccatccatcaacaaagccaccataacagtttaaaaggatgcttaatcgggagctcacccatctctctga

SEQ ID NO: 10869 - protein, 150 aa, Homo sapiens
MDRTSYAVETGHRPGLKKSRMSWPSSFQGLRRFDVDNGTSAGRSPLDPMTSPGSGLILQANFVHSQRRESFLYRSDSDYDLSPKSMSRNSSIASDIHGDDLIVTPFAQVLASLRTVRNNFAALTNLQDRAPSKRSPMCNQPSINKATITV

SEQ ID NO: 10870 - DNA, 1291 bp, Homo sapiens
tccagggagggcgtgcaaagagcggcgagccaactttcacacagcgacgcgagcggaaaaaccactatgcgacttttcaactgtgcggcgggcccgagtcccagtccaggagcccggctctagcggatggcgagggggtggcgagcgcgcttgggtgcccgccccgcagaggagcgtctggtccacagccggatctcctcggtccccaacccggagccgcggccccacgcccgccccgcctgccgagccttctgcacggcacttgaagtgaatgaatcagccgcggccgggtgcgcggccaccacgtttcctgttttctttctcaactcctcgggcggcaggcgcagcgcggctccaacgccgcagctttccgggaacactccccctcacgcccctctcggccctcggcgctgcctggctcctcctcaacccccttacgaaaagattccgaattgcaaaagcctgtccctgtccgtgccacccgccgcgtccttcccctcgagctctgccccgggggccccgccacctcgcagtgccatccccccggcgcagccgggcgccactcgctttgaagtgcagacgaggaggcgcgggcgcgagcgtgtgtgtctgtggggctgctgtgggactgtctgtgctaggagagcggcggaaaacccggcgtggagcgcctgcagtccgccgtccggggtcgcgcccgccgcggggctcaggagggaccggcacgcaggcgcgcacggccgcgcacctgtctcgctagaaccccgcgcgccccgccgagccactgccctccaggttgcccagaccgctggagcctctgcgactccacgaccggctgcttcctgcgaagtttcacaaacaagatttgattgaaaatggcccatggagtacaaccacctgggaacatatcctcgagaaagacagttgaggcttattgcctaaaccacaggctactgaaaacttggccaaaggcgactactctagactggtgacttcaaaagtgctgatgaatacagtgaaccatgaaagatgcattatttgttttgaacattttactatgattgatgacccagatttggcaagttagttcactcccagtggagatgaaagtttcactgccttctttctttcaacattcttgttgagacagatttcacttttattggccaatgtactaacaaatcacttgcatttgcagcataatgaattcattagcaacactgtggatcaatgctatacataatattcctgagtcaacattaactcttaattaaacttccttattataatg

SEQ ID NO: 10871 - protein, 248 aa, Homo sapiens [sequence omitted]

SEQ ID NO: 10872 - DNA, 3512 bp, Homo sapiens
tgagctggagtccgggctccggtccccgccacggaccttgagagggtacccggggtcagacctggcagacagcccattttttcttatgataaagacggcatttggctcatgagcaaggtggcaagatcatcaagtgagtcagacgtgcagctctgggaaacagaagaggatgacatgacagaaggtgatttagggtatggcctcggaaggaaacctggtgggatttatgaaatagaattttcacataggtctagaaaaagatcagatggaaagaactttagccctcctccatttccgagaaagggagaagaaagaaatgaagcgagttttcagtattccaagcataagagccagcaagatacattccctcaagtgtccagaatttccaattacagacgacaaagtagcactgtagattcgaattcagaattgtcaaatgaagaattaaggcaatgtcttaatgaaactttagaggaggtagaaatgttaaaaactgaacttgaggcatctcaaagacaactcagaggtaaagaggaagcattgaaaattcttcaaagcatggcaatactgggcaaagccacaagtcatacgcaggcagtgcttcaaaaaactatggaacaaaacagatccttggagaaggaaataaatgccttgcagtgggaaatagaatttgatcataatagatttaaaaatatagaggaatcttggatccaaaaatatgacaggctaaactgtgaaaatgcagtcctcaaagagaatttgaaagtgaaaacagaagaaattaaaatgctgaagtctgacaatgcagttttgaatcaacggtatttggaggccctcgccatgcttgatatcaaacagcagaagatggctcaggaaaacatgtgctgtgataaaagtggctttgcagaggcttcaggtcttgagcttgcggtcctcggagcctgcctttgtcatgggcccggagggaacccctgttcttgtgccagaatggcagcatccactcggaaactgcttcttcagctcaaacaagagttggaaattttgcagaagagtaaagaagaagcttacgtgatggcagatgctttcagaattgcatttgagcaacaattaatgagaaaaaatgaccaggcactacaattgacacaaatggataaaatgcataaaaaagcaacaaaatggatgaattggaagcaccttaaagaggatggatttccatcaccaaggagtaagaagaccttcgggcagagactgttgggtatgctcccttcagaaaacagttctaagaggatggaagaccaggacagtcctcaagaggtccttaagatgctcatagatttgcttaatgataaagaagaagctttggctcatcaaagaaaagttagctacatgcttgctcgggcattggaagacaaagacactgcttcaaacgagaataaagaaaaaaatcctataaaagagaatttccctttcaacaacccctggcgtaagacttcagaattctctgttttgggtgatcctatacattcaagtgtctgcattttaaattctgtgggctgcatttgttcaatccagcactctcaaatagatccaaactatagaactcttaaaagatcccattctttgccatcaagtatcatattttaaagacaagccagttgaaattggaactgagagttgtttatatcgagatactttgaaaaatgattttgtaaattttgctgcatcttgagaagttgtatgtttcctaggtatttctaaattttaggaggtcacttaaatcaaatattttctacattttctttttcttcttttgagatggagtcttgctctgtcacccaggttggagtgcagtggtgtgatctcggttcactgcaacctccgcctcccggttcaagcaattctcctgcctcagcctcccgagtaactcggattacaggcataaaccccatctctactaaaaatacaaaaaattagctaggcctagtggcgcatgcctgtaatcccagctacttgggaggctgaggtaggagaatcgcttgaacctgggaggcgggggttgtggtaagccgagactgtgtcattgcactccagcctgggcgacaagagcgaaactctgtctcaaaaaaaaaaaaaaacacattacagtgtttgccaacatcctaaaacaaaaaataatgatttttgggaaaaacaaaaaattatttaactattttgattgactatagggatcttagcttggctaaatcaacaatatagcaatgtatcttaatgctctaaaaagtaacaatacctaggactgactgaatgttaatttctggaattcatttatcttgttttatttgccttgttcagtatttttcatttaccatatgaagtttagaaataacaatttccttaagttaacttcaataagacagttttgatggtgggaccttggcagaagtatattgagtcagtgccggctgcgttcatggcttcttgtcagggtagtaacattttgcaaccaaatctgcacagatttgtagccaagtctacaaagtgcttaacagctcttttcattgcatcctgtgagatggttgtgatgatccaggaaatggggtctcaggaatctgaagaagctgcctgagccaaggtgatttctaggagtttttttgtttgtggtatgtgaattggggtgtgtgggggtggggtgtgtgtgtagacagggtcccactgtgttgctcaggctggtgccaaactcctggcctcaagggatcctcctgcctcagcctctcaaagtgctgggattacaggcataaaccacaactcaataaaaaagtttttaaaaatttacaaagctcatatttgatccagctaggattttaccctgtacatttgtatttcttgtaggctggcgcacagatatcttaaatggctactaattgctgctgtgtatgaaaacaaatggctatcaaggccgggtgcagtggcttacagatctggtctgaatctcaagtccagaccagtccagagttcaagaccagcctgggcaacatggtgaaaccccatctatacaaaaactcggcaaggcatggtggcatgcacctgttgtcccagctactcaggggctgaggcaggaggatggcatgagcccaggagcttgaggctgcagtgagctgtgattgtgccactgcactccagcctgagtgacagagtgagacccccatctccaaaagaaaaggctatcaatacaaaagtttatctaaattactgtacagctatacaatggaatactctacaaaatggagagatccataagataaagcaaatgaataaagcaaaatgcatgtgttgacagctgttgtgatacctcagttcttgtcttcttggtttaaaagaatttaaatgagacagcaaaggagatgcagcataatttattgcaaaagaaaaggagtattttgaaagttaggtgcagaacagacagtacacctgagagagagaattcagggccggctgctcgtaagggtgagaca

SEQ ID NO: 10873 - protein, 511 aa, Homo sapiens; identical to SEQ ID NO: 978

SEQ ID NO: 10874 - DNA, 3335 bp, Homo sapiens
tgagctggagtccgggctccggtccccgccacggaccttgagagggtacccggggtcagacctggcagacagcccattttttcttatgataaagacggcatttggctcatgagcaaggtggcaagatcatcaagtgagtcagacgtgcagctctgggaaacagaagaggatgacatgacagaaggtgatttagggtatggcctcggaaggaaacctggtgggatttatgaaatagaattttcacataggtctagaaaaagatcagatggaaagaactttagccctcctccatttccgagaaagggagaagaaagaaatgaagcgagttttcagtattccaagcataagagccagcaagatacattccctcaagtgtccagaatttccaattacagacgacaaagtagcactgtagattcgaattcagaattgtcaaatgaagaattaaggcaatgtcttaatgaaactttagaggaggtagaaatgttaaaaactgaacttgaggcatctcaaagacaactcagaggtaaagaggaagcattgaaaattcttcaaagcatggcaatactgggcaaagccacaagtcatacgcaggcagtgcttcaaaaaactatggaacaaaacagatccttggagaaggaaataaatgccttgcagtgggaaatagaatttgatcataatagatttaaaaatatagaggaatcttggatccaaaaatatgacaggctaaactgtgaaaatgcagtcctcaaagagaatttgaaagtgaaaacagaagaaattaaaatgctgaagtctgacaatgcagttttgaatcaacggtatttggaggccctcgccatgcttgatatcaaacagcagaagatggctcaggaaaacatgtgctgtgataaaagtggctttgcagaggcttcaggtcttgagcttgcggtcctcggagcctgcctttgtcatgggcccggagggaacccctgttcttgtgccagaatggcagcatccactcggaaactgcttcttcagctcaaacaagagttggaaattttgcagaagagtaaagaagaagcttacgtgatggcagatgctttcagaattgcatttgagcaacaattaatgagaaaaaatgaccaggcactacaattgacacaaatggataaaatgcataaaaaagcaacaaaatggatgaattggaagcaccttaaagaggatggatttccatcaccaaggagtaagaagaccttcgggcagagactgttgggtatgctcccttcagaaaacagttctaagaggatggaagaccaggacagtcctcaagaggtccttaagatgctcatagatttgcttaatgataaagaagaagctttggctcatcaaagaaaagttagctacatgcttgctcgggcattggaagacaaagacactgcttcaaacgagaataaagaaaaaaatcctataaaagagaatttccctttcaacaacccctggcgtaagacttcagaattctctgttttgggtgatcctatacattcaagtgtctgcattttaaattctgtgggctgcatttgttcaatccagcactctcaaatagatccaaactatagaactcttaaaagatcccattctttgccatcaagtatcatattttaaagacaagccagttgaaattggaactgagagttgtttatatcgagatactttgaaaaatgattttgtaaattttgctgcatcttgagaagttgtatgtttcctaggtatttctaaattttaggaggtcacttaaatcaaatattttctacattttctttttcttcttttgagatggagtcttgctctgtcacccaggttggagtgcagtggtgtgatctcggttcactgcaacctccgcctcccggttcaagcaattctcctgcctcagcctcccgagtaactcggattacaggcataaaccccatctctactaaaaatacaaaaaattagctaggcctagtggcgcatgcctgtaatcccagctacttgggaggctgaggtaggagaatcgcttgaacctgggaggcgggggttgtggtaagccgagactgtgtcattgcactccagcctgggcgacaagagcgaaactctgtctcaaaaaaaaaaaaaaacacattacagtgtttgccaacatcctaaaacaaaaaataatgatttttgggaaaaacaaaaaattatttaactattttgattgactatagggatcttagcttggctaaatcaacaatatagcaatgtatcttaatgctctaaaaagtaacaatacctaggactgactgaatgttaatttctggaattcatttatcttgttttatttgccttgttcagtatttttcatttaccatatgaagtttagaaataacaatttccttaagttaacttcaataagacagttttgatggtgggaccttggcagaagtatattgagtcagtgccggctgcgttcatggcttcttgtcagggtagtaacattttgcaaccaaatctgcacagatttgtagccaagtctacaaagtgcttaacagctcttttcattgcatcctgtgagatggttgtgatgatccaggaaatggggtctcaggaatctgaagaagctgcctgagccaaggtgatttctaggagtttttttgtttgtggtatgtgaattggggtgtgtgggggtggggtgtgtgtgtagacagggtcccactgtgttgctcaggctggtgccaaactcctggcctcaagggatcctcctgcctcagcctctcaaagtgctgggattacaggcataaaccacaactcaataaaaaagtttttaaaaatttacaaagctcatatttgatccagctaggattttaccctgtacatttgtatttcttgtaggctggcgcacagatatcttaaatggctactaattgctgctgtgtatgaaaacaaatggctatcaaggccgggtgcagtggcttacagatctggtctgaatctcaagtccagaccagtccagagttcaagaccagcctgggcaacatggtgaaaccccatctatacaaaaactcggcaaggcatggtggcatgcacctgttgtcccagctactcaggggctgaggcaggaggatggcatgagcccaggagcttgaggctgcagtgagctgtgattgtgccactgcactccagcctgagtgacagagtgagacccccatctccaaaagaaaaggctatcaatacaaaagtttatctaaattactgtacagctatacaatggaatactctacaaaatggagagatccataagataaagcaaatgaataaagcaaaatgcatgtgttgac

SEQ ID NO: 10875 - protein, 511 aa, Homo sapiens; identical to SEQ ID NO: 978

SEQ ID NO: 10876 - DNA, 569 bp, Homo sapiens
tcacacgtccggaggccgagccgtcgcgtacctaggatgccgcgtggaagccgaagccgcacctcccgcatggcccctccggccagccaggccccctcagatgagagctgcacccaggccagtaccagtcgttcagccaccagcagcggcacccccatctgtagttggctcttctgctgctgcgccccggcagccaggtctgatggcccagaaccagggtgacatcaagctctgtgagggtttcaatgaggtgctgaaacagtgccgacttgcaaacggattggcctaatcaagaagttcaacctggagagatggaaaatcagctctcataactaagttaatttagtataaaaatagaattgatagtgagggtataaagtgtaaccatgagttaaacctctcctgtcattcctagcttccttgcttcagaattgaaatggaaggggggtgttcctactctgtagaatctgtgacagggcaaatgtttgtgtggcctccttaaactagctgttatgattttattctttgtgagttaattagaataaagtcattttcttccaaaaaaaaaa

SEQ ID NO: 10877 - protein, 62 aa, Homo sapiens
MRAAPRPVPVVQPPAAAPPSVVGSSAAAPRQPGLMAQNQGDIKLCEGFNEVLKQCRLANGLA

SEQ ID NO: 10878 - DNA, 641 bp, Homo sapiens
cacacgtccggaggccgagccgtcgcgtacctaggatgccgcgtggaagccgaagccgcacctcccgcatggcccctccggccagccaggccccctcagatgagagctgcacccaggccagtaccagtcgttcagccaccagcagcggcacccccattttcaggggaggaagtaatgctgagcctgcgaggcctgacatcacttaccaggagcctcagggaacccagccggcacagcagcagcagccttgcttctatgagatcagtttctggagtgtgcccagaaccagggtgacatcaagctctgtgagggtttcaatgaggtgctgaaacagtgccgacttgcaaacggattggcctaatcaagaagttcaacctggagagatggaaaatcagctctcataactaagttaatttagtataaaaatagaattgatagtgagggtataaagtgtaaccatgagttaaacctctcctgtcattcctagcttccttgcttcagaattgaaatggaaggggggtgttcctactctgtagaatctgtgacagggcaaatgtttgtgtggcctccttaaactagctgttatgattttattctttgtgagttaattagaataaagtcattttcttccaaaaaaaaaa

SEQ ID NO: 10879 - protein, 97 aa, Homo sapiens
MPRGSRSRTSRMAPPASQAPSDESCTQASTSRSATSSGTPIFRGGSNAEPARPDITYQEPQGTQPAQQQQPCFYEISFWSVPRTRVTSSSVRVSMRC

SEQ ID NO: 10880 - DNA, 1516 bp, Homo sapiens
ggtacaccaggggttggaaaaaccacactaggcaaagaacttgccaattgtatgatggctatgatgaagagtatgactgtcccattttagatgaagacagagtagttgatgagttagataaccaaatgagagaaggtggagttattgttgattaccatggttgtgatttcttccctgaacgctggtttcatatagtttttgtgctgagaacagataccaatgtattgtacgaaagacttgaaacaaggggttataatgagaagaaactaacagacaatattcagtgtgagatttttcaagttctttatgaagaagccacagcatcctacaaggaagaaatcgtgcatcagctgcccagtaataaaccagaagagctagaaaataatgtagatcagatcttgaaatggattgagcagtggatcaaagatcataactcttgacttataaggctagctacttaataatcactcttgttgatatctctgccgacatcatagaaattgttcaagtgtcagtaacactttattaaaatcatgttgcagaaccagcaggtggatagtatataggtttatgcctgtgtttctttttctccatgagaaagctaaacatgaaatataatgaatatagtattattaaggattgagacaaaaactgtgattttaatacttaaattgctaaagaataaataaatctgacaaaatgggtggatatcttttaagtttattacagaaaaaaatgcagatgatctcttaaaataaaactaaagataaagcaacagagtattccttttttctttctttaaattagaaaaaaagttaagtgttgtactcgatacaaagttcaaaaggtacaaaagagcatgttgaaaagttaggtctcccttccagaccaccctatccccaggcaccccaggttccttccctttaggaaataatgttactggtttcctatatgtctttttagaggttttatgcctgcacagtgtatatgtacatgtgtacattttttaaagaatataacagtatattatgcacactattctgtacctttcttttttcacttactatatttgaagattatatcatctcagtacagacctccctgttcttttttttagttgagatagatatacatatcatacaataaaatttaccattttgaagtgtataatcagaaccgggtatggtggcttatgcctgtaatcccagcaaatggggaggctgaggtggagaatcgcttgaggcaggagttcaagaccagcctgggcaacatagtgagaccttagactctaaaaataaacataaataaaatttataatccgttggtttttagcttattaacaaggttatgtaactgtcaccactgtggaggaagcagtgatgataaagggaactcctataccctttagcagtcactctctattctttcctcctcatccccttgcagtcactagtctactttctgtctctatggatttgcatattctggatatttcatataaatgggattatacagt

SEQ ID NO: 10881 - protein, 104 aa, Homo sapiens
MREGGVIVDYHGCDFFPERWFHIVFVLRTDTNVLYERLETRGYNEKKLTDNIQCEIFQVLYEEATASYKEEIVHQLPSNKPEELENNVDQILKWIEQWIKDHNS

SEQ ID NO: 10882 - DNA, 1568 bp, Homo sapiens
ggtacaccaggggttggaaaaaccacactaggcaaagaacttgcgtcaaaatcaggactgaaatacattaatgtgggtgatttagctcgagaagagcaattgtatgatggctatgatgaagagtatgactgtcccattttagatgaagacagagtagttgatgagttagataaccaaatgagagaaggtggagttattgttgattaccatggttgtgatttcttccctgaacgctggtttcatatagtttttgtgctgagaacagataccaatgtattgtacgaaagacttgaaacaaggggttataatgagaagaaactaacagacaatattcagtgtgagatttttcaagttctttatgaagaagccacagcatcctacaaggaagaaatcgtgcatcagctgcccagtaataaaccagaagagctagaaaataatgtagatcagatcttgaaatggattgagcagtggatcaaagatcataactcttgacttataaggctagctacttaataatcactcttgttgatatctctgccgacatcatagaaattgttcaagtgtcagtaacactttattaaaatcatgttgcagaaccagcaggtggatagtatataggtttatgcctgtgtttctttttctccatgagaaagctaaacatgaaatataatgaatatagtattattaaggattgagacaaaaactgtgattttaatacttaaattgctaaagaataaataaatctgacaaaatgggtggatatcttttaagtttattacagaaaaaaatgcagatgatctcttaaaataaaactaaagataaagcaacagagtattccttttttctttctttaaattagaaaaaaagttaagtgttgtactcgatacaaagttcaaaaggtacaaaagagcatgttgaaaagttaggtctcccttccagaccaccctatccccaggcaccccaggttccttccctttaggaaataatgttactggtttcctatatgtctttttagaggttttatgcctgcacagtgtatatgtacatgtgtacattttttaaagaatataacagtatattatgcacactattctgtacctttcttttttcacttactatatttgaagattatatcatctcagtacagacctccctgttcttttttttagttgagatagatatacatatcatacaataaaatttaccattttgaagtgtataatcagaaccgggtatggtggcttatgcctgtaatcccagcaaatggggaggctgaggtggagaatcgcttgaggcaggagttcaagaccagcctgggcaacatagtgagaccttagactctaaaaataaacataaataaaatttataatccgttggtttttagcttattaacaaggttatgtaactgtcaccactgtggaggaagcagtgatgataaagggaactcctataccctttagcagtcactctctattctttcctcctcatccccttgcagtcactagtctactttctgtctctatggatttgcatattctggatatttcatataaatgggattatacagt

SEQ ID NO: 10883 - protein, 104 aa, Homo sapiens; identical to SEQ ID NO: 10881

SEQ ID NO: 10884 - DNA, 1612 bp, Homo sapiens
ccgtcgcggcggggaccatgttgcttccgaacatcctgctcaccggtacaccaggggttggaaaaaccacactaggcaaagaacttgcgtcaaaatcaggactgaaatacattaatgtgggtgatttagctcgagaagagcaattgtatgatggctatgatgaagagtatgactgtcccattttagatgaagacagagtagttgatgagttagataaccaaatgagagaaggtggagttattgttgattaccatggttgtgatttcttccctgaacgctggtttcatatagtttttgtgctgagaacagataccaatgtattgtacgaaagacttgaaacaaggggttataatgagaagaaactaacagacaatattcagtgtgagatttttcaagttctttatgaagaagccacagcatcctacaaggaagaaatcgtgcatcagctgcccagtaataaaccagaagagctagaaaataatgtagatcagatcttgaaatggattgagcagtggatcaaagatcataactcttgacttataaggctagctacttaataatcactcttgttgatatctctgccgacatcatagaaattgttcaagtgtcagtaacactttattaaaatcatgttgcagaaccagcaggtggatagtatataggtttatgcctgtgtttctttttctccatgagaaagctaaacatgaaatataatgaatatagtattattaaggattgagacaaaaactgtgattttaatacttaaattgctaaagaataaataaatctgacaaaatgggtggatatcttttaagtttattacagaaaaaaatgcagatgatctcttaaaataaaactaaagataaagcaacagagtattccttttttctttctttaaattagaaaaaaagttaagtgttgtactcgatacaaagttcaaaaggtacaaaagagcatgttgaaaagttaggtctcccttccagaccaccctatccccaggcaccccaggttccttccctttaggaaataatgttactggtttcctatatgtctttttagaggttttatgcctgcacagtgtatatgtacatgtgtacattttttaaagaatataacagtatattatgcacactattctgtacctttcttttttcacttactatatttgaagattatatcatctcagtacagacctccctgttcttttttttagttgagatagatatacatatcatacaataaaatttaccattttgaagtgtataatcagaaccgggtatggtggcttatgcctgtaatcccagcaaatggggaggctgaggtggagaatcgcttgaggcaggagttcaagaccagcctgggcaacatagtgagaccttagactctaaaaataaacataaataaaatttataatccgttggtttttagcttattaacaaggttatgtaactgtcaccactgtggaggaagcagtgatgataaagggaactcctataccctttagcagtcactctctattctttcctcctcatccccttgcagtcactagtctactttctgtctctatggatttgcatattctggatatttcatataaatgggattatacagt

SEQ ID NO: 10885 - protein, 172 aa, Homo sapiens; identical to SEQ ID NO: 986

SEQ ID NO: 10886 - DNA, 1647 bp, Homo sapiens
gtagagcaaagggcacgtgagcgaggcgcccgaagccgtcgcggcggggaccatgttgcttccgaacatcctgctcaccggtacaccaggggttggaaaaaccacactaggcaaagaacttgcgtcaaaatcaggactgaaatacattaatgtgggtgatttagctcgagaagagcaattgtatgatggctatgatgaagagtatgactgtcccattttagatgaagacagagtagttgatgagttagataaccaaatgagagaaggtggagttattgttgattaccatggttgtgatttcttccctgaacgctggtttcatatagtttttgtgctgagaacagataccaatgtattgtacgaaagacttgaaacaaggggttataatgagaagaaactaacagacaatattcagtgtgagatttttcaagttctttatgaagaagccacagcatcctacaaggaagaaatcgtgcatcagctgcccagtaataaaccagaagagctagaaaataatgtagatcagatcttgaaatggattgagcagtggatcaaagatcataactcttgacttataaggctagctacttaataatcactcttgttgatatctctgccgacatcatagaaattgttcaagtgtcagtaacactttattaaaatcatgttgcagaaccagcaggtggatagtatataggtttatgcctgtgtttctttttctccatgagaaagctaaacatgaaatataatgaatatagtattattaaggattgagacaaaaactgtgattttaatacttaaattgctaaagaataaataaatctgacaaaatgggtggatatcttttaagtttattacagaaaaaaatgcagatgatctcttaaaataaaactaaagataaagcaacagagtattccttttttctttctttaaattagaaaaaaagttaagtgttgtactcgatacaaagttcaaaaggtacaaaagagcatgttgaaaagttaggtctcccttccagaccaccctatccccaggcaccccaggttccttccctttaggaaataatgttactggtttcctatatgtctttttagaggttttatgcctgcacagtgtatatgtacatgtgtacattttttaaagaatataacagtatattatgcacactattctgtacctttcttttttcacttactatatttgaagattatatcatctcagtacagacctccctgttcttttttttagttgagatagatatacatatcatacaataaaatttaccattttgaagtgtataatcagaaccgggtatggtggcttatgcctgtaatcccagcaaatggggaggctgaggtggagaatcgcttgaggcaggagttcaagaccagcctgggcaacatagtgagaccttagactctaaaaataaacataaataaaatttataatccgttggtttttagcttattaacaaggttatgtaactgtcaccactgtggaggaagcagtgatgataaagggaactcctataccctttagcagtcactctctattctttcctcctcatccccttgcagtcactagtctactttctgtctctatggatttgcatattctggatatttcatataaatgggattatacagt

SEQ ID NO: 10887 - protein, 172 aa, Homo sapiens; identical to SEQ ID NO: 986

SEQ ID NO: 10888 - DNA, 2010 bp, Homo sapiens
aatccccgctgcaggacagggctctgcaccctcaatcttctcatccccagatgggatgggcgggtcgggaggaggagcgacgagagcccaggaaagcttgaaggcagagatagactcacgtctctaagacatatacataatatagccgcaaccgcggcggccttactttcccggagctgcatccccttttaggcgaagagcggaggcgaccagggactaccctaggtgaaagggcagccacctggccctacccgggctcaacgccgagcctctcggaggtacggcctcccggggaccttccagactggtcggcgcaagcgaagggcggggaccaccgaaggagtgtgtgacttaggcatccagcgcactgcctgacccgaagtaccgacccgagttatgcccaccctccaactttgcgacggaaatgtgtcatcgaaagccaggtacaccaggggttggaaaaaccacactaggcaaagaacttgcgtcaaaatcaggactgaaatacattaatgtgggtgatttagctcgagaagagcaattgtatgatggctatgatgaagagtatgactgtcccattttagatgaagacagagtagttgatgagttagataaccaaatgagagaaggtggagttattgttgattaccatggttgtgatttcttccctgaacgctggtttcatatagtttttgtgctgagaacagataccaatgtattgtacgaaagacttgaaacaaggggttataatgagaagaaactaacagacaatattcagtgtgagatttttcaagttctttatgaagaagccacagcatcctacaaggaagaaatcgtgcatcagctgcccagtaataaaccagaagagctagaaaataatgtagatcagatcttgaaatggattgagcagtggatcaaagatcataactcttgacttataaggctagctacttaataatcactcttgttgatatctctgccgacatcatagaaattgttcaagtgtcagtaacactttattaaaatcatgttgcagaaccagcaggtggatagtatataggtttatgcctgtgtttctttttctccatgagaaagctaaacatgaaatataatgaatatagtattattaaggattgagacaaaaactgtgattttaatacttaaattgctaaagaataaataaatctgacaaaatgggtggatatcttttaagtttattacagaaaaaaatgcagatgatctcttaaaataaaactaaagataaagcaacagagtattccttttttctttctttaaattagaaaaaaagttaagtgttgtactcgatacaaagttcaaaaggtacaaaagagcatgttgaaaagttaggtctcccttccagaccaccctatccccaggcaccccaggttccttccctttaggaaataatgttactggtttcctatatgtctttttagaggttttatgcctgcacagtgtatatgtacatgtgtacattttttaaagaatataacagtatattatgcacactattctgtacctttcttttttcacttactatatttgaagattatatcatctcagtacagacctccctgttcttttttttagttgagatagatatacatatcatacaataaaatttaccattttgaagtgtataatcagaaccgggtatggtggcttatgcctgtaatcccagcaaatggggaggctgaggtggagaatcgcttgaggcaggagttcaagaccagcctgggcaacatagtgagaccttagactctaaaaataaacataaataaaatttataatccgttggtttttagcttattaacaaggttatgtaactgtcaccactgtggaggaagcagtgatgataaagggaactcctataccctttagcagtcactctctattctttcctcctcatccccttgcagtcactagtctactttctgtctctatggatttgcatattctggatatttcatataaatgggattatacagt

SEQ ID NO: 10889 - protein, 169 aa, Homo sapiens; identical to SEQ ID NO: 980

SEQ ID NO: 10890 - DNA, 778 bp, Homo sapiens
ggtacaccaggggttggaaaaaccacactaggcaaagaacttgccaattgtatgatggctatgatgaagagtatgactgtcccattttagatgaagacagagtagttgatgagttagataaccaaatgagagaaggtggagttattgttgattaccatggttgtgatttcttccctgaacgctggtttcatatagtttttgtgctgagaacagataccaatgtattgtacgaaagacttgaaacaaggggttataatgagaagaaactaacagacaatattcagtgtgagatttttcaagttctttatgaagaagccacagcatcctacaaggaagaaatcgtgcatcagctgcccagtaataaaccagaagagctagaaaataatgtagatcagatcttgaaatggattgagcagtggatcaaagatcataactcttgacttataaggctagctacttaataatcactcttgttgatatctctgccgacatcatagaaattgttcaagtgtcagtaacactttattaaaatcatgttgcagaaccagcaggtggatagtatataggtttatgcctgtgtttctttttctccatgagaaagctaaacatgaaatataatgaatatagtattattaaggattgagacaaaaactgtgattttaatacttaaattgctaaagaataaataaatctgacaaaatgggtggatatcttttaagtttattacagaaaaaaatgcagatgatctcttaaaataaaactaaagataaagcaacag

SEQ ID NO: 10891 - protein, 104 aa, Homo sapiens; identical to SEQ ID NO: 10881

SEQ ID NO: 10892 - DNA, 830 bp, Homo sapiens
ggtacaccaggggttggaaaaaccacactaggcaaagaacttgcgtcaaaatcaggactgaaatacattaatgtgggtgatttagctcgagaagagcaattgtatgatggctatgatgaagagtatgactgtcccattttagatgaagacagagtagttgatgagttagataaccaaatgagagaaggtggagttattgttgattaccatggttgtgatttcttccctgaacgctggtttcatatagtttttgtgctgagaacagataccaatgtattgtacgaaagacttgaaacaaggggttataatgagaagaaactaacagacaatattcagtgtgagatttttcaagttctttatgaagaagccacagcatcctacaaggaagaaatcgtgcatcagctgcccagtaataaaccagaagagctagaaaataatgtagatcagatcttgaaatggattgagcagtggatcaaagatcataactcttgacttataaggctagctacttaataatcactcttgttgatatctctgccgacatcatagaaattgttcaagtgtcagtaacactttattaaaatcatgttgcagaaccagcaggtggatagtatataggtttatgcctgtgtttctttttctccatgagaaagctaaacatgaaatataatgaatatagtattattaaggattgagacaaaaactgtgattttaatacttaaattgctaaagaataaataaatctgacaaaatgggtggatatcttttaagtttattacagaaaaaaatgcagatgatctcttaaaataaaactaaagataaagcaacag

SEQ ID NO: 10893 - protein, 104 aa, Homo sapiens; identical to SEQ ID NO: 10881

SEQ ID NO: 10894 - DNA, 909 bp, Homo sapiens
gtagagcaaagggcacgtgagcgaggcgcccgaagccgtcgcggcggggaccatgttgcttccgaacatcctgctcaccggtacaccaggggttggaaaaaccacactaggcaaagaacttgcgtcaaaatcaggactgaaatacattaatgtgggtgatttagctcgagaagagcaattgtatgatggctatgatgaagagtatgactgtcccattttagatgaagacagagtagttgatgagttagataaccaaatgagagaaggtggagttattgttgattaccatggttgtgatttcttccctgaacgctggtttcatatagtttttgtgctgagaacagataccaatgtattgtacgaaagacttgaaacaaggggttataatgagaagaaactaacagacaatattcagtgtgagatttttcaagttctttatgaagaagccacagcatcctacaaggaagaaatcgtgcatcagctgcccagtaataaaccagaagagctagaaaataatgtagatcagatcttgaaatggattgagcagtggatcaaagatcataactcttgacttataaggctagctacttaataatcactcttgttgatatctctgccgacatcatagaaattgttcaagtgtcagtaacactttattaaaatcatgttgcagaaccagcaggtggatagtatataggtttatgcctgtgtttctttttctccatgagaaagctaaacatgaaatataatgaatatagtattattaaggattgagacaaaaactgtgattttaatacttaaattgctaaagaataaataaatctgacaaaatgggtggatatcttttaagtttattacagaaaaaaatgcagatgatctcttaaaataaaactaaagataaagcaacag

SEQ ID NO: 10895 - protein, 172 aa, Homo sapiens; identical to SEQ ID NO: 986

SEQ ID NO: 10896 - DNA, 1203 bp, Homo sapiens
cccaggaaagcttgaaggcagagatagactcacgtctctaagacatatacataatatagccgcaaccgcggcggccttactttcccggagctgcatccccttttaggcgaagagcggaggcgaccagggactaccctaggtgaaagggcagccacctggccctacccgggctcaacgccgagcctctcggaggtacggcctcccggggaccttccagactggtcggcgcaagcgaagggcggggaccaccgaaggagtgtgtgacttaggcatccagcgcactgcctgacccgaagtaccgacccgagttatgcccaccctccaactttccgtcgcggcggggaccatgttgcttccgaacatcctgctcaccggtacaccaggggttggaaaaaccacactaggcaaagaacttgcgtcaaaatcaggactgaaatacattaatgtgggtgatttagctcgagaagagcaattgtatgatggctatgatgaagagtatgactgtcccattttagatgaagacagagtagttgatgagttagataaccaaatgagagaaggtggagttattgttgattaccatggttgtgatttcttccctgaacgctggtttcatatagtttttgtgctgagaacagataccaatgtattgtacgaaagacttgaaacaaggggttataatgagaagaaactaacagacaatattcagtgtgagatttttcaagttctttatgaagaagccacagcatcctacaaggaagaaatcgtgcatcagctgcccagtaataaaccagaagagctagaaaataatgtagatcagatcttgaaatggattgagcagtggatcaaagatcataactcttgacttataaggctagctacttaataatcactcttgttgatatctctgccgacatcatagaaattgttcaagtgtcagtaacactttattaaaatcatgttgcagaaccagcaggtggatagtatataggtttatgcctgtgtttctttttctccatgagaaagctaaacatgaaatataatgaatatagtattattaaggattgagacaaaaactgtgattttaatacttaaattgctaaagaataaataaatctgacaaaatgggtggatatcttttaagtttattacagaaaaaaatgcagatgatctcttaaaataaaactaaagataaagcaacag

SEQ ID NO: 10897 - protein, 184 aa, Homo sapiens
MPTLQLSVAAGTMLLPNILLTGTPGVGKTTLGKELASKSGLKYINVGDLAREEQLYDGYDEEYDCPILDEDRVVDELDNQMREGGVIVDYHGCDFFPERWFHIVFVLRTDTNVLYERLETRGYNEKKLTDNIQCEIFQVLYEEATASYKEEIVHQLPSNKPEELENNVDQILKWIEQWIKDHNS

SEQ ID NO: 10898 - DNA, 1272 bp, Homo sapiens
aatccccgctgcaggacagggctctgcaccctcaatcttctcatccccagatgggatgggcgggtcgggaggaggagcgacgagagcccaggaaagcttgaaggcagagatagactcacgtctctaagacatatacataatatagccgcaaccgcggcggccttactttcccggagctgcatccccttttaggcgaagagcggaggcgaccagggactaccctaggtgaaagggcagccacctggccctacccgggctcaacgccgagcctctcggaggtacggcctcccggggaccttccagactggtcggcgcaagcgaagggcggggaccaccgaaggagtgtgtgacttaggcatccagcgcactgcctgacccgaagtaccgacccgagttatgcccaccctccaactttgcgacggaaatgtgtcatcgaaagccaggtacaccaggggttggaaaaaccacactaggcaaagaacttgcgtcaaaatcaggactgaaatacattaatgtgggtgatttagctcgagaagagcaattgtatgatggctatgatgaagagtatgactgtcccattttagatgaagacagagtagttgatgagttagataaccaaatgagagaaggtggagttattgttgattaccatggttgtgatttcttccctgaacgctggtttcatatagtttttgtgctgagaacagataccaatgtattgtacgaaagacttgaaacaaggggttataatgagaagaaactaacagacaatattcagtgtgagatttttcaagttctttatgaagaagccacagcatcctacaaggaagaaatcgtgcatcagctgcccagtaataaaccagaagagctagaaaataatgtagatcagatcttgaaatggattgagcagtggatcaaagatcataactcttgacttataaggctagctacttaataatcactcttgttgatatctctgccgacatcatagaaattgttcaagtgtcagtaacactttattaaaatcatgttgcagaaccagcaggtggatagtatataggtttatgcctgtgtttctttttctccatgagaaagctaaacatgaaatataatgaatatagtattattaaggattgagacaaaaactgtgattttaatacttaaattgctaaagaataaataaatctgacaaaatgggtggatatcttttaagtttattacagaaaaaaatgcagatgatctcttaaaataaaactaaagataaagcaacag

SEQ ID NO: 10899 - protein, 169 aa, Homo sapiens; identical to SEQ ID NO: 980

SEQ ID NO: 10900 - DNA, 1107 bp, Homo sapiens
ggtacaccaggggttggaaaaaccacactaggcaaagaacttgcgtcaaaatcaggactgaaatacattaatgtgggtgatttagctcgagaagtctgatcatcggatatcatggagtctggcaagacggcttctcccaagagcatgccgaaagatgcacagatgatggcacaaatcctgaaggatatggggattacagaatatgagccaagagttataaatcagatgttggagtttgccttccgatatgtgaccacaattctagatgatgcaaaaatttattcaagccatgctaagaaagctactgttgatgcagatgatgtgcgattggcaatccagtgccgcgctgatcagtcttttacctctcctcccccaagagattttttattagatattgcaaggcaaagaaatcaaacccctttgccattgatcaagccatattcaggtcctaggttgccacctgatagatactgcttaacagctccaaactataggctgaaatctttacagaaaaaggcatcaacttctgcgggaagaataacagtcccgcggttaagtgttggttcagttactagcagaccaagtactcccacactaggcacaccaaccccacagaccatgtctgtttcaactaaagtagggactcccatgtccctcacaggtcaaaggtttacagtacagatgcctacttctcagtctccagctgtaaaagcttcaattcctgcaacctcagcagttcagaatgttctgattaatccatcattaatcgggtccaaaaacattcttattaccactaatatgatgtcatcacaaaatactgccaatgaatcatcaaatgcattgaaaagaaaacgtgaagatgatgatgatgacgatgatgatgatgatgactatgataatctgtaatctagccttgctgaatgtaacatgtatacttggtcttgaattcattgtactgatattaaacatgcatgctggatgttttcaagttgtgttttagaaaactaataataatgagtaaacacagttaccatacttttcaattgaaatgaaggtttttcatcagccttaaaagtgtaagaaaaataaagttgtcattcattcgat

SEQ ID NO: 10901 - protein, 264 aa, Homo sapiens; identical to SEQ ID NO: 982

SEQ ID NO: 10902 - DNA, 2014 bp, Homo sapiens
acaaagagtatgtacatatatgtacatttacatgcaaacataaatagggtttctttgggaaaggaaactggtttacagtggttatctctagggaagggcgcaaggggtcagtagaggtaattttcagactgcttaattttaacatgaacagttttgtttttgttcttgtttttgtttttgtttgagacagagtctcattatgttggccaggctggtctcgaactcctgcgcttaagcgatcctcccgccttctcctcccaaattgctgggattacacgcgcgagccaccacacgtggccatgaacagtttttaaatctttataagttaaagcaaataggccaggtgggtggctcatgcctgtaaatcccagcactttgggaggtggaggtggggagatcgcttgagctcaggagtttgagcttagcctaagcaacatagccaaaccccgtctctacaaaaattaaccagggcatggtggtgcatacctgtggtcctagctaccggacaggctgagatgggaggattgcttgagcccaggaggtaaaggctctagtgagccaagttccactgcactccagcctaggtaacaaagagatatcttgtctttaaaaaaagaaaaaggtaaataaattattgtaattgattcgaggtggctaatttttttttttttttttttgagatggagtcttgcactccagcctgggcgacaagagtgaaactctgtctcaaaaaaaaaattttacatatgattgctaattaggaaatttttcatttcagtcgtcaagaacttttaagggcagaggccaggtgagactctgtctcaaaaataaaaggaaaggcagaaggtggaccgcagtgtgataagtagtatttcacaaacagtatttttctgtggcttgtcttacaggtacaccaggggttggaaaaaccacactaggcaaagaacttgcgtcaaaatcaggactgaaatacattaatgtgggtgatttagctcgagaagtctgatcatcggatatcatggagtctggcaagacggcttctcccaagagcatgccgaaagatgcacagatgatggcacaaatcctgaaggatatggggattacagaatatgagccaagagttataaatcagatgttggagtttgccttccgatatgtgaccacaattctagatgatgcaaaaatttattcaagccatgctaagaaagctactgttgatgcagatgatgtgcgattggcaatccagtgccgcgctgatcagtcttttacctctcctcccccaagagattttttattagatattgcaaggcaaagaaatcaaacccctttgccattgatcaagccatattcaggtcctaggttgccacctgatagatactgcttaacagctccaaactataggctgaaatctttacagaaaaaggcatcaacttctgcgggaagaataacagtcccgcggttaagtgttggttcagttactagcagaccaagtactcccacactaggcacaccaaccccacagaccatgtctgtttcaactaaagtagggactcccatgtccctcacaggtcaaaggtttacagtacagatgcctacttctcagtctccagctgtaaaagcttcaattcctgcaacctcagcagttcagaatgttctgattaatccatcattaatcgggtccaaaaacattcttattaccactaatatgatgtcatcacaaaatactgccaatgaatcatcaaatgcattgaaaagaaaacgtgaagatgatgatgatgacgatgatgatgatgatgactatgataatctgtaatctagccttgctgaatgtaacatgtatacttggtcttgaattcattgtactgatattaaacatgcatgctggatgttttcaagttgtgttttagaaaactaataataatgagtaaacacagttaccatacttttcaattgaaatgaaggtttttcatcagccttaaaagtgtaagaaaaataaagttgtcattcattcgat

SEQ ID NO: 10903 - protein, 264 aa, Homo sapiens; identical to SEQ ID NO: 982

SEQ ID NO: 10904 - DNA, 1258 bp, Homo sapiens
ccgaccctcgcgggcgttgcgggaggcgagggaggggacgcggaacgttaattccgttggcctgaggctccgggggggggcgggggggggtggagagaggtcggcagatccagctctccagcttggcaacctgcttagtctttctgaatctggtacaccaggggttggaaaaaccacactaggcaaagaacttgcgtcaaaatcaggactgaaatacattaatgtgggtgatttagctcgagaagtctgatcatcggatatcatggagtctggcaagacggcttctcccaagagcatgccgaaagatgcacagatgatggcacaaatcctgaaggatatggggattacagaatatgagccaagagttataaatcagatgttggagtttgccttccgatatgtgaccacaattctagatgatgcaaaaatttattcaagccatgctaagaaagctactgttgatgcagatgatgtgcgattggcaatccagtgccgcgctgatcagtcttttacctctcctcccccaagagattttttattagatattgcaaggcaaagaaatcaaacccctttgccattgatcaagccatattcaggtcctaggttgccacctgatagatactgcttaacagctccaaactataggctgaaatctttacagaaaaaggcatcaacttctgcgggaagaataacagtcccgcggttaagtgttggttcagttactagcagaccaagtactcccacactaggcacaccaaccccacagaccatgtctgtttcaactaaagtagggactcccatgtccctcacaggtcaaaggtttacagtacagatgcctacttctcagtctccagctgtaaaagcttcaattcctgcaacctcagcagttcagaatgttctgattaatccatcattaatcgggtccaaaaacattcttattaccactaatatgatgtcatcacaaaatactgccaatgaatcatcaaatgcattgaaaagaaaacgtgaagatgatgatgatgacgatgatgatgatgatgactatgataatctgtaatctagccttgctgaatgtaacatgtatacttggtcttgaattcattgtactgatattaaacatgcatgctggatgttttcaagttgtgttttagaaaactaataataatgagtaaacacagttaccatacttttcaattgaaatgaaggtttttcatcagccttaaaagtgtaagaaaaataaagttgtcattcattcgat

SEQ ID NO: 10905 - protein, 264 aa, Homo sapiens; identical to SEQ ID NO: 982

SEQ ID NO: 10906 - DNA, 1745 bp, Homo sapiens
ggtcagggcgcgcggccgggagggactgggctggggcaggctgggggcgcagagtgctctgggcatcgggcgcccaggtgggggcccctcactgccctcttcagaggccggccgagggccacgaggcggttgtcagcgccccgggagccgaccctcgcgggcgttgcgggaggcgagggaggggacgcggaacgttaattccgttggcctgaggctccgggggggggcgggggggggtggagagaggtcggcagatccagctctccagcttggcaacctgcttagtctttctgaatctggtatttcgtttgtaaaatgggttgttgattctttggcagggttggccttgggatttttagcgaaataacgtaaggccatatctgcttcccggtagagtcattaatggtggatgcctcactccttaggcctccgtgggccgtattttattttttctttgcttctgataaacgcctcagattagatttcggtaaacgagttcagatgtttgtgacgtgacgaaattgctgtatgcttttgttgagttacatcaaaggatccccccgccccttaaaaggaaggcatatagagcatttcgggtcgtttctcgcgtaggagtgggtctttgaagccatactcagggtacaccaggggttggaaaaaccacactaggcaaagaacttgcgtcaaaatcaggactgaaatacattaatgtgggtgatttagctcgagaagtctgatcatcggatatcatggagtctggcaagacggcttctcccaagagcatgccgaaagatgcacagatgatggcacaaatcctgaaggatatggggattacagaatatgagccaagagttataaatcagatgttggagtttgccttccgatatgtgaccacaattctagatgatgcaaaaatttattcaagccatgctaagaaagctactgttgatgcagatgatgtgcgattggcaatccagtgccgcgctgatcagtcttttacctctcctcccccaagagattttttattagatattgcaaggcaaagaaatcaaacccctttgccattgatcaagccatattcaggtcctaggttgccacctgatagatactgcttaacagctccaaactataggctgaaatctttacagaaaaaggcatcaacttctgcgggaagaataacagtcccgcggttaagtgttggttcagttactagcagaccaagtactcccacactaggcacaccaaccccacagaccatgtctgtttcaactaaagtagggactcccatgtccctcacaggtcaaaggtttacagtacagatgcctacttctcagtctccagctgtaaaagcttcaattcctgcaacctcagcagttcagaatgttctgattaatccatcattaatcgggtccaaaaacattcttattaccactaatatgatgtcatcacaaaatactgccaatgaatcatcaaatgcattgaaaagaaaacgtgaagatgatgatgatgacgatgatgatgatgatgactatgataatctgtaatctagccttgctgaatgtaacatgtatacttggtcttgaattcattgtactgatattaaacatgcatgctggatgttttcaagttgtgttttagaaaactaataataatgagtaaacacagttaccatacttttcaattgaaatgaaggtttttcatcagccttaaaagtgtaagaaaaataaagttgtcattcattcgat

SEQ ID NO: 10907 - protein, 264 aa, Homo sapiens; identical to SEQ ID NO: 982

SEQ ID NO: 10908 - DNA, 1133 bp, Homo sapiens
cgtgagcgaggcgcccgaagccgtcgcggcggggaccatgttgcttccgaacatcctgctcaccggtacaccaggggttggaaaaaccacactaggcaaagaacttgcgtcaaaatcaggactgaaatacattaatgtgggtgatttagctcgagaagtctgatcatcggatatcatggagtctggcaagacggcttctcccaagagcatgccgaaagatgcacagatgatggcacaaatcctgaaggatatggggattacagaatatgagccaagagttataaatcagatgttggagtttgccttccgatatgtgaccacaattctagatgatgcaaaaatttattcaagccatgctaagaaagctactgttgatgcagatgatgtgcgattggcaatccagtgccgcgctgatcagtcttttacctctcctcccccaagagattttttattagatattgcaaggcaaagaaatcaaacccctttgccattgatcaagccatattcaggtcctaggttgccacctgatagatactgcttaacagctccaaactataggctgaaatctttacagaaaaaggcatcaacttctgcgggaagaataacagtcccgcggttaagtgttggttcagttactagcagaccaagtactcccacataaagtagggactcccatgtccctcacaggtcaaaggtttacagtacagatgcctacttctcagtctccagctgtaaaagcttcaattcctgcaacctcagcagttcagaatgttctgattaatccatcattaatcgggtccaaaaacattcttattaccactaatatgatgtcatcacaaaatactgccaatgaatcatcaaatgcattgaaaagaaaacgtgaagatgatgatgatgacgatgatgatgatgatgactatgataatctgtaatctagccttgctgaatgtaacatgtatacttggtcttgaattcattgtactgatattaaacatgcatgctggatgttttcaagttgtgttttagaaaactaataataatgagtaaacacagttaccatacttttcaattgaaatgaaggtttttcatcagccttaaaagtgtaagaaaaataaagttgtcattcattcgat

SEQ ID NO: 10909 - protein, 161 aa, Homo sapiens
MESGKTASPKSMPKDAQMMAQILKDMGITEYEPRVINQMLEFAFRYVTTILDDAKIYSSHAKKATVDADDVRLAIQCRADQSFTSPPPRDFLLDIARQRNQTPLPLIKPYSGPRLPPDRYCLTAPNYRLKSLQKKASTSAGRITVPRLSVGSVTSRPSTPT

SEQ ID NO: 10910 - DNA, 1286 bp, Homo sapiens
gcggctgggccgccggggcaggctaggggcgccgcggtgggcttcggggcctttggggccgtgggcttttgctgccgcccgccccttccggctcctccctgtagagcaaagggcacgtgagcgaggcgcccgaagccgtcgcggcggggaccatgttgcttccgaacatcctgctcaccggtacaccaggggttggaaaaaccacactaggcaaagaacttgcgtcaaaatcaggactgaaatacattaatgtgggtgatttagctcgagaagtctgatcatcggatatcatggagtctggcaagacggcttctcccaagagcatgccgaaagatgcacagatgatggcacaaatcctgaaggatatggggattacagaatatgagccaagagttataaatcagatgttggagtttgccttccgatatgtgaccacaattctagatgatgcaaaaatttattcaagccatgctaagaaagctactgttgatgcagatgatgtgcgattggcaatccagtgccgcgctgatcagtcttttacctctcctcccccaagagattttttattagatattgcaaggcaaagaaatcaaacccctttgccattgatcaagccatattcaggtcctaggttgccacctgatagatactgcttaacagctccaaactataggctgaaatctttacagaaaaaggcatcaacttctgcgggaagaataacagtcccgcggttaagtgttggttcagttactagcagaccaagtactcccacactaggcacaccaaccccacagaccatgtctgtttcaactaaagtagggactcccatgtccctcacaggtcaaaggtttacagtacagatgcctacttctcagtctccagctgtaaaagcttcaattcctgcaacctcagcagttcagaatgttctgattaatccatcattaatcgggtccaaaaacattcttattaccactaatatgatgtcatcacaaaatactgccaatgaatcatcaaatgcattgaaaagaaaacgtgaagatgatgatgatgacgatgatgatgatgatgactatgataatctgtaatctagccttgctgaatgtaacatgtatacttggtcttgaattcattgtactgatattaaacatgcatgctggatgttttcaagttgtgttttagaaaactaataataatgagtaaacacagttaccatacttttcaattgaaatgaaggtttttcatcagccttaaaagtgtaagaaaaataaagttgtcattcattcgat

SEQ ID NO: 10911 - protein, 41 aa, Homo sapiens
MLLPNILLTGTPGVGKTTLGKELASKSGLKYINVGDLAREV

SEQ ID NO: 10912 - DNA, 1464 bp, Homo sapiens
gcccaggaaagcttgaaggcagagatagactcacgtctctaagacatatacataatatagccgcaaccgcggcggccttactttcccggagctgcatccccttttaggcgaagagcggaggcgaccagggactaccctaggtgaaagggcagccacctggccctacccgggctcaacgccgagcctctcggaggtacggcctcccggggaccttccagactggtcggcgcaagcgaagggcggggaccaccgaaggagtgtgtgacttaggcatccagcgcactgcctgacccgaagtaccgacccgagttatgcccaccctccaactttgcgacggaaatgtgtcatcgaaagccaggtacaccaggggttggaaaaaccacactaggcaaagaacttgcgtcaaaatcaggactgaaatacattaatgtgggtgatttagctcgagaagtctgatcatcggatatcatggagtctggcaagacggcttctcccaagagcatgccgaaagatgcacagatgatggcacaaatcctgaaggatatggggattacagaatatgagccaagagttataaatcagatgttggagtttgccttccgatatgtgaccacaattctagatgatgcaaaaatttattcaagccatgctaagaaagctactgttgatgcagatgatgtgcgattggcaatccagtgccgcgctgatcagtcttttacctctcctcccccaagagattttttattagatattgcaaggcaaagaaatcaaacccctttgccattgatcaagccatattcaggtcctaggttgccacctgatagatactgcttaacagctccaaactataggctgaaatctttacagaaaaaggcatcaacttctgcgggaagaataacagtcccgcggttaagtgttggttcagttactagcagaccaagtactcccacactaggcacaccaaccccacagaccatgtctgtttcaactaaagtagggactcccatgtccctcacaggtcaaaggtttacagtacagatgcctacttctcagtctccagctgtaaaagcttcaattcctgcaacctcagcagttcagaatgttctgattaatccatcattaatcgggtccaaaaacattcttattaccactaatatgatgtcatcacaaaatactgccaatgaatcatcaaatgcattgaaaagaaaacgtgaagatgatgatgatgacgatgatgatgatgatgactatgataatctgtaatctagccttgctgaatgtaacatgtatacttggtcttgaattcattgtactgatattaaacatgcatgctggatgttttcaagttgtgttttagaaaactaataataatgagtaaacacagttaccatacttttcaattgaaatgaaggtttttcatcagccttaaaagtgtaagaaaaataaagttgtcattcattcgat

SEQ ID NO: 10913 - protein, 38 aa, Homo sapiens
MCHRKPGTPGVGKTTLGKELASKSGLKYINVGDLAREV

SEQ ID NO: 10914 - DNA, 3002 bp, Homo sapiens
gcaacgcccgcgagggtcggctcccggggcgctgacaaccgcctcgtggccctcggccggcctctgaagagggcagtgaggggcccccacctgggcgcccgatgcccagagcactctgcgcccccagcctgccccagcccagtccctcccggccgcgcgccctgaccgcaagtgaattcatggtattttacttttttgggaaatactggaaatgaagacctgcaactgtaatttgaaataaggaaaactttaattttcagtataaaaattgctcaaatagaattgcctgattttaatgacaaaagtatatgggagtccacatttatgtaagaaatgaaactataaaatgtataaataatttgcaaatcagaattgctgtcgaaagttttactataatgaaagatattttcatactctcaaaaatatagaggaaaggggccaagattatagtaccagtcacaatcttttgatgaggacgaaatgaatcaggtaacagactgggttgacccatcatttgatgattttctagagtgtagtggcgtctctactattactgccacatcattaggtgtgaataactcaagtcatagaagaaaaaatgggccttctacattagaaagcagcagatttccagcgagaaaaagaggaaatctatcttccttagaacagatttatggtttagaaaattcaaaagaatatctgtctgaaaatgaaccatgggtggataaatataaaccagaaactcagcatgaacttgctgtgcataaaaagaaaattgaagaagtcgaaacctggttaaaagctcaagttttagaaaggcaaccaaaacagggtggatctattttattaataacaggtcctcctggatgtggaaagacaacgaccttaaaaatactatcaaaggagcatggtattcaagtacaagagtggattaatccagttttaccagacttccaaaaagatgatttcaaggggatgtttaatactgaatcaagcttccatatgtttccctatcagtctcagatagcagttttcaaagagtttctactaagagcgacaaagtataacaagttacaaatgcttggagatgatctgagaactgataagaagataattctggttgaagatttacctaaccagttttatcgggattctcatactttacatgaagttctaaggaagtatgtgaggattggtcgatgtcctcttatatttataatctcggacagtctcagtggagataataatcaaaggttattgtttcccaaagaaattcaggaagagtgttctatctcaaatattagtttcaaccctgtggcaccaacaattatgatgaaatttcttaatcgaatagtgactatagaagctaacaagaatggaggaaaaattactgtccctgacaaaacttctctagagttgctctgtcagggatgttctggtgatatcagaagtgcaataaacagcctccagttttcttcttcaaaaggagaaaacaacttacggccaaggaaaaaaggaatgtctttaaaatcagatgctgtgctgtcaaaatcaaaacgaagaaaaaaacctgatagggtttttgaaaatcaagaggtccaagctattggtggcaaagatgtttctctgtttctcttcagagctttggggaaaattctatattgtaaaagagcatctttaacagaattagactcacctcggttgccctctcatttatcagaatatgaacgggatacattacttgttgaacctgaggaggtagtagaaatgtcacacatgcctggagacttatttaatttatatcttcaccaaaactacatagatttcttcatggaaattgatgatattgtgagagccagtgaatttctgagttttgcagatatcctcagtggtgactggaatacacgctctttactcagggaatatagcacatctatagctacgagaggtgtgatgcattccaacaaagcccgaggatatgctcattgccaaggaggaggatcaagttttcgacccttgcacaaacctcagtggtttctaataaataaaaagtatcgggaaaattgcctggcagcaaaagcactttttcctgacttctgcctaccagctttatgcctccaaactcagctattgccataccttgctctactaaccattccaatgagaaatcaagctcagatttcttttatccaagatattggaaggctccctctgaagcgacactttggaagattgaaaatggaagccctgactgacagggaacatggaatgatagaccctgacagcggagatgaagcccagcttaatggaggacattctgcagaggaatctctgggtgaacccactcaagccactgtgccggaaacctggtctcttcctttgagtcagaatagtgccagtgaactgcctgctagccagccccagcccttttcagcccaaggagacatggaagaaaacataataatagaagactacgagagtgatgggacatagaagccagcctgctaatcagattgctacttcacagcttcatttttgtttcattcagtggtacttcagcagagttaatatgcttttctgatgaattacacaacagtttgttaattcttcattcttgtagtatttcatcacaagaaacctactcttctgtcatcttgaagtaaatagaagatcaagccttcaaatctcttaattttttcggtatttattaaatctgtgagtggtttaaggagcggtcagtgtgtataaagtgtgtttgaacattatgccaaatatcaagatgtgaaggactaattcaggatgcaaaaacgttattggggggttgtaaatatcaactattcaacagtttaggatgcaattacgagtgtaaactgtgtgccttatttacactttattgtctcccgcttctcagatagttttgatgtgttgtacagtggaatatcttagatactttttggaaagtatttacataagttatatcacaattaaaatgttgaatttaa

SEQ ID NO: 10915 - protein, 670 aa, Homo sapiens; identical to SEQ ID NO: 988

SEQ ID NO: 10916 - DNA, 3281 bp, Homo sapiens
tacctggctttcgatgacacatttccgtcgcaaagttggagggtgggcataactcgggtcggtacttcgggtcaggcagtgcgctggatgcctaagtcacacactccttcggtggtccccgcccttcgcttgcgccgaccagtctggaaggtccccgggaggccgtacctccgagaggctcggcgttgagcccgggtagggccaggtggctgccctttcacctagggtagtccctggtcgcctccgctcttcgcctaaaaggggatgcagctccgggaaagtaaggccgccgcggttgcggctatattatgtatatgtcttagagacgtgagtctatctctgccttcaagctttcctgggctctcgtcgctcctcctcccgacccgcccatcccatctggggatgagaagattgagggtgcagagccctgtcctgcagcggggatttgcgagctcaacccggcaccccactgattacaggattacgttggacgaatatttgagcttagtattccctgttcactgtgtggggtggtggtgggtcggctaggaatagtcttgaaggtctacctctgacatctcatttcagtaacctcgcatcttcagggacagttatctgctttttaaaggagcaagtgaattcatggtattttacttttttgggaaatactggaaatgaagacctgcaactgtaatttgaaataaggaaaactttaattttcagtataaaaattgctcaaatagaattgcctgattttaatgacaaaaggtaacagactgggttgacccatcatttgatgattttctagagtgtagtggcgtctctactattactgccacatcattaggtgtgaataactcaagtcatagaagaaaaaatgggccttctacattagaaagcagcagatttccagcgagaaaaagaggaaatctatcttccttagaacagatttatggtttagaaaattcaaaagaatatctgtctgaaaatgaaccatgggtggataaatataaaccagaaactcagcatgaacttgctgtgcataaaaagaaaattgaagaagtcgaaacctggttaaaagctcaagttttagaaaggcaaccaaaacagggtggatctattttattaataacaggtcctcctggatgtggaaagacaacgaccttaaaaatactatcaaaggagcatggtattcaagtacaagagtggattaatccagttttaccagacttccaaaaagatgatttcaaggggatgtttaatactgaatcaagcttccatatgtttccctatcagtctcagatagcagttttcaaagagtttctactaagagcgacaaagtataacaagttacaaatgcttggagatgatctgagaactgataagaagataattctggttgaagatttacctaaccagttttatcgggattctcatactttacatgaagttctaaggaagtatgtgaggattggtcgatgtcctcttatatttataatctcggacagtctcagtggagataataatcaaaggttattgtttcccaaagaaattcaggaagagtgttctatctcaaatattagtttcaaccctgtggcaccaacaattatgatgaaatttcttaatcgaatagtgactatagaagctaacaagaatggaggaaaaattactgtccctgacaaaacttctctagagttgctctgtcagggatgttctggtgatatcagaagtgcaataaacagcctccagttttcttcttcaaaaggagaaaacaacttacggccaaggaaaaaaggaatgtctttaaaatcagatgctgtgctgtcaaaatcaaaacgaagaaaaaaacctgatagggtttttgaaaatcaagaggtccaagctattggtggcaaagatgtttctctgtttctcttcagagctttggggaaaattctatattgtaaaagagcatctttaacagaattagactcacctcggttgccctctcatttatcagaatatgaacgggatacattacttgttgaacctgaggaggtagtagaaatgtcacacatgcctggagacttatttaatttatatcttcaccaaaactacatagatttcttcatggaaattgatgatattgtgagagccagtgaatttctgagttttgcagatatcctcagtggtgactggaatacacgctctttactcagggaatatagcacatctatagctacgagaggtgtgatgcattccaacaaagcccgaggatatgctcattgccaaggaggaggatcaagttttcgacccttgcacaaacctcagtggtttctaataaataaaaagtatcgggaaaattgcctggcagcaaaagcactttttcctgacttctgcctaccagctttatgcctccaaactcagctattgccataccttgctctactaaccattccaatgagaaatcaagctcagatttcttttatccaagatattggaaggctccctctgaagcgacactttggaagattgaaaatggaagccctgactgacagggaacatggaatgatagaccctgacagcggagatgaagcccagcttaatggaggacattctgcagaggaatctctgggtgaacccactcaagccactgtgccggaaacctggtctcttcctttgagtcagaatagtgccagtgaactgcctgctagccagccccagcccttttcagcccaaggagacatggaagaaaacataataatagaagactacgagagtgatgggacatagaagccagcctgctaatcagattgctacttcacagcttcatttttgtttcattcagtggtacttcagcagagttaatatgcttttctgatgaattacacaacagtttgttaattcttcattcttgtagtatttcatcacaagaaacctactcttctgtcatcttgaagtaaatagaagatcaagccttcaaatctcttaattttttcggtatttattaaatctgtgagtggtttaaggagcggtcagtgtgtataaagtgtgtttgaacattatgccaaatatcaagatgtgaaggactaattcaggatgcaaaaacgttattggggggttgtaaatatcaactattcaacagtttaggatgcaattacgagtgtaaactgtgtgccttatttacactttattgtctcccgcttctcagatagttttgatgtgttgtacagtggaatatcttagatactttttggaaagtatttacataagttatatcacaattaaaatgttgaatttaa

SEQ ID NO: 10917 - protein, 505 aa, Homo sapiens; identical to SEQ ID NO: 994

SEQ ID NO: 10918 - DNA, 2930 bp, Homo sapiens
tacctggctttcgatgacacatttccgtcgcaaagttggagggtgggcataactcgggtcggtacttcgggtcaggcagtgcgctggatgcctaagtcacacactccttcggtggtccccgcccttcgcttgcgccgaccagtctggaaggtccccgggaggccgtacctccgagaggctcggcgttgagcccgggtagggccaggtggctgccctttcacctagggtagtccctggtcgcctccgctcttcgcctaaaaggggatgcagctccgggaaacaagtgaattcatggtattttacttttttgggaaatactggaaatgaagacctgcaactgtaatttgaaataaggaaaactttaattttcagtataaaaattgctcaaatagaattgcctgattttaatgacaaaaggtaacagactgggttgacccatcatttgatgattttctagagtgtagtggcgtctctactattactgccacatcattaggtgtgaataactcaagtcatagaagaaaaaatgggccttctacattagaaagcagcagatttccagcgagaaaaagaggaaatctatcttccttagaacagatttatggtttagaaaattcaaaagaatatctgtctgaaaatgaaccatgggtggataaatataaaccagaaactcagcatgaacttgctgtgcataaaaagaaaattgaagaagtcgaaacctggttaaaagctcaagttttagaaaggcaaccaaaacagggtggatctattttattaataacaggtcctcctggatgtggaaagacaacgaccttaaaaatactatcaaaggagcatggtattcaagtacaagagtggattaatccagttttaccagacttccaaaaagatgatttcaaggggatgtttaatactgaatcaagcttccatatgtttccctatcagtctcagatagcagttttcaaagagtttctactaagagcgacaaagtataacaagttacaaatgcttggagatgatctgagaactgataagaagataattctggttgaagatttacctaaccagttttatcgggattctcatactttacatgaagttctaaggaagtatgtgaggattggtcgatgtcctcttatatttataatctcggacagtctcagtggagataataatcaaaggttattgtttcccaaagaaattcaggaagagtgttctatctcaaatattagtttcaaccctgtggcaccaacaattatgatgaaatttcttaatcgaatagtgactatagaagctaacaagaatggaggaaaaattactgtccctgacaaaacttctctagagttgctctgtcagggatgttctggtgatatcagaagtgcaataaacagcctccagttttcttcttcaaaaggagaaaacaacttacggccaaggaaaaaaggaatgtctttaaaatcagatgctgtgctgtcaaaatcaaaacgaagaaaaaaacctgatagggtttttgaaaatcaagaggtccaagctattggtggcaaagatgtttctctgtttctcttcagagctttggggaaaattctatattgtaaaagagcatctttaacagaattagactcacctcggttgccctctcatttatcagaatatgaacgggatacattacttgttgaacctgaggaggtagtagaaatgtcacacatgcctggagacttatttaatttatatcttcaccaaaactacatagatttcttcatggaaattgatgatattgtgagagccagtgaatttctgagttttgcagatatcctcagtggtgactggaatacacgctctttactcagggaatatagcacatctatagctacgagaggtgtgatgcattccaacaaagcccgaggatatgctcattgccaaggaggaggatcaagttttcgacccttgcacaaacctcagtggtttctaataaataaaaagtatcgggaaaattgcctggcagcaaaagcactttttcctgacttctgcctaccagctttatgcctccaaactcagctattgccataccttgctctactaaccattccaatgagaaatcaagctcagatttcttttatccaagatattggaaggctccctctgaagcgacactttggaagattgaaaatggaagccctgactgacagggaacatggaatgatagaccctgacagcggagatgaagcccagcttaatggaggacattctgcagaggaatctctgggtgaacccactcaagccactgtgccggaaacctggtctcttcctttgagtcagaatagtgccagtgaactgcctgctagccagccccagcccttttcagcccaaggagacatggaagaaaacataataatagaagactacgagagtgatgggacatagaagccagcctgctaatcagattgctacttcacagcttcatttttgtttcattcagtggtacttcagcagagttaatatgcttttctgatgaattacacaacagtttgttaattcttcattcttgtagtatttcatcacaagaaacctactcttctgtcatcttgaagtaaatagaagatcaagccttcaaatctcttaattttttcggtatttattaaatctgtgagtggtttaaggagcggtcagtgtgtataaagtgtgtttgaacattatgccaaatatcaagatgtgaaggactaattcaggatgcaaaaacgttattggggggttgtaaatatcaactattcaacagtttaggatgcaattacgagtgtaaactgtgtgccttatttacactttattgtctcccgcttctcagatagttttgatgtgttgtacagtggaatatcttagatactttttggaaagtatttacataagttatatcacaattaaaatgttgaatttaa

SEQ ID NO: 10919 - protein, 505 aa, Homo sapiens; identical to SEQ ID NO: 994

SEQ ID NO: 10920 - DNA, 3218 bp, Homo sapiens
tacctggctttcgatgacacatttccgtcgcaaagttggagggtgggcataactcgggtcggtacttcgggtcaggcagtgcgctggatgcctaagtcacacactccttcggtggtccccgcccttcgcttgcgccgaccagtctggaaggtccccgggaggccgtacctccgagaggctcggcgttgagcccgggtagggccaggtggctgccctttcacctagggtagtccctggtcgcctccgctcttcgcctaaaaggggatgcagctccgggaaacaagtgaattcatggtattttacttttttgggaaatactggaaatgaagacctgcaactgtaatttgaaataaggaaaactttaattttcagtataaaaattgctcaaatagaattgcctgattttaatgacaaaaggtgaattatagtttaatgtactgcaagtcctaaactacggatgggaactattacagtttataatgtcaaaaacttttcttagaccaaaggtatcttccacaaagtatatgggagtccacatttatgtaagaaatgaaactataaaatgtataaataatttgcaaatcagaattgctgtcgaaagttttactataatgaaagatattttcatactctcaaaaatatagaggaaaggggccaagattatagtaccagtcacaatcttttgatgaggacgaaatgaatcaggtaacagactgggttgacccatcatttgatgattttctagagtgtagtggcgtctctactattactgccacatcattaggtgtgaataactcaagtcatagaagaaaaaatgggccttctacattagaaagcagcagatttccagcgagaaaaagaggaaatctatcttccttagaacagatttatggtttagaaaattcaaaagaatatctgtctgaaaatgaaccatgggtggataaatataaaccagaaactcagcatgaacttgctgtgcataaaaagaaaattgaagaagtcgaaacctggttaaaagctcaagttttagaaaggcaaccaaaacagggtggatctattttattaataacaggtcctcctggatgtggaaagacaacgaccttaaaaatactatcaaaggagcatggtattcaagtacaagagtggattaatccagttttaccagacttccaaaaagatgatttcaaggggatgtttaatactgaatcaagcttccatatgtttccctatcagtctcagatagcagttttcaaagagtttctactaagagcgacaaagtataacaagttacaaatgcttggagatgatctgagaactgataagaagataattctggttgaagatttacctaaccagttttatcgggattctcatactttacatgaagttctaaggaagtatgtgaggattggtcgatgtcctcttatatttataatctcggacagtctcagtggagataataatcaaaggttattgtttcccaaagaaattcaggaagagtgttctatctcaaatattagtttcaaccctgtggcaccaacaattatgatgaaatttcttaatcgaatagtgactatagaagctaacaagaatggaggaaaaattactgtccctgacaaaacttctctagagttgctctgtcagggatgttctggtgatatcagaagtgcaataaacagcctccagttttcttcttcaaaaggagaaaacaacttacggccaaggaaaaaaggaatgtctttaaaatcagatgctgtgctgtcaaaatcaaaacgaagaaaaaaacctgatagggtttttgaaaatcaagaggtccaagctattggtggcaaagatgtttctctgtttctcttcagagctttggggaaaattctatattgtaaaagagcatctttaacagaattagactcacctcggttgccctctcatttatcagaatatgaacgggatacattacttgttgaacctgaggaggtagtagaaatgtcacacatgcctggagacttatttaatttatatcttcaccaaaactacatagatttcttcatggaaattgatgatattgtgagagccagtgaatttctgagttttgcagatatcctcagtggtgactggaatacacgctctttactcagggaatatagcacatctatagctacgagaggtgtgatgcattccaacaaagcccgaggatatgctcattgccaaggaggaggatcaagttttcgacccttgcacaaacctcagtggtttctaataaataaaaagtatcgggaaaattgcctggcagcaaaagcactttttcctgacttctgcctaccagctttatgcctccaaactcagctattgccataccttgctctactaaccattccaatgagaaatcaagctcagatttcttttatccaagatattggaaggctccctctgaagcgacactttggaagattgaaaatggaagccctgactgacagggaacatggaatgatagaccctgacagcggagatgaagcccagcttaatggaggacattctgcagaggaatctctgggtgaacccactcaagccactgtgccggaaacctggtctcttcctttgagtcagaatagtgccagtgaactgcctgctagccagccccagcccttttcagcccaaggagacatggaagaaaacataataatagaagactacgagagtgatgggacatagaagccagcctgctaatcagattgctacttcacagcttcatttttgtttcattcagtggtacttcagcagagttaatatgcttttctgatgaattacacaacagtttgttaattcttcattcttgtagtatttcatcacaagaaacctactcttctgtcatcttgaagtaaatagaagatcaagccttcaaatctcttaattttttcggtatttattaaatctgtgagtggtttaaggagcggtcagtgtgtataaagtgtgtttgaacattatgccaaatatcaagatgtgaaggactaattcaggatgcaaaaacgttattggggggttgtaaatatcaactattcaacagtttaggatgcaattacgagtgtaaactgtgtgccttatttacactttattgtctcccgcttctcagatagttttgatgtgttgtacagtggaatatcttagatactttttggaaagtatttacataagttatatcacaattaaaatgttgaatttaa

SEQ ID NO: 10921 - protein, 670 aa, Homo sapiens; identical to SEQ ID NO: 988

SEQ ID NO: 10922 - DNA, 3114 bp, Homo sapiens
tacctggctttcgatgacacatttccgtcgcaaagttggagggtgggcataactcgggtcggtacttcgggtcaggcagtgcgctggatgcctaagtcacacactccttcggtggtccccgcccttcgcttgcgccgaccagtctggaaggtccccgggaggccgtacctccgagaggctcggcgttgagcccgggtagggccaggtggctgccctttcacctagggtagtccctggtcgcctccgctcttcgcctaaaaggggatgcagctccgggaaacaagtgaattcatggtattttacttttttgggaaatactggaaatgaagacctgcaactgtaatttgaaataaggaaaactttaattttcagtataaaaattgctcaaatagaattgcctgattttaatgacaaaagtatatgggagtccacatttatgtaagaaatgaaactataaaatgtataaataatttgcaaatcagaattgctgtcgaaagttttactataatgaaagatattttcatactctcaaaaatatagaggaaaggggccaagattatagtaccagtcacaatcttttgatgaggacgaaatgaatcaggtaacagactgggttgacccatcatttgatgattttctagagtgtagtggcgtctctactattactgccacatcattaggtgtgaataactcaagtcatagaagaaaaaatgggccttctacattagaaagcagcagatttccagcgagaaaaagaggaaatctatcttccttagaacagatttatggtttagaaaattcaaaagaatatctgtctgaaaatgaaccatgggtggataaatataaaccagaaactcagcatgaacttgctgtgcataaaaagaaaattgaagaagtcgaaacctggttaaaagctcaagttttagaaaggcaaccaaaacagggtggatctattttattaataacaggtcctcctggatgtggaaagacaacgaccttaaaaatactatcaaaggagcatggtattcaagtacaagagtggattaatccagttttaccagacttccaaaaagatgatttcaaggggatgtttaatactgaatcaagcttccatatgtttccctatcagtctcagatagcagttttcaaagagtttctactaagagcgacaaagtataacaagttacaaatgcttggagatgatctgagaactgataagaagataattctggttgaagatttacctaaccagttttatcgggattctcatactttacatgaagttctaaggaagtatgtgaggattggtcgatgtcctcttatatttataatctcggacagtctcagtggagataataatcaaaggttattgtttcccaaagaaattcaggaagagtgttctatctcaaatattagtttcaaccctgtggcaccaacaattatgatgaaatttcttaatcgaatagtgactatagaagctaacaagaatggaggaaaaattactgtccctgacaaaacttctctagagttgctctgtcagggatgttctggtgatatcagaagtgcaataaacagcctccagttttcttcttcaaaaggagaaaacaacttacggccaaggaaaaaaggaatgtctttaaaatcagatgctgtgctgtcaaaatcaaaacgaagaaaaaaacctgatagggtttttgaaaatcaagaggtccaagctattggtggcaaagatgtttctctgtttctcttcagagctttggggaaaattctatattgtaaaagagcatctttaacagaattagactcacctcggttgccctctcatttatcagaatatgaacgggatacattacttgttgaacctgaggaggtagtagaaatgtcacacatgcctggagacttatttaatttatatcttcaccaaaactacatagatttcttcatggaaattgatgatattgtgagagccagtgaatttctgagttttgcagatatcctcagtggtgactggaatacacgctctttactcagggaatatagcacatctatagctacgagaggtgtgatgcattccaacaaagcccgaggatatgctcattgccaaggaggaggatcaagttttcgacccttgcacaaacctcagtggtttctaataaataaaaagtatcgggaaaattgcctggcagcaaaagcactttttcctgacttctgcctaccagctttatgcctccaaactcagctattgccataccttgctctactaaccattccaatgagaaatcaagctcagatttcttttatccaagatattggaaggctccctctgaagcgacactttggaagattgaaaatggaagccctgactgacagggaacatggaatgatagaccctgacagcggagatgaagcccagcttaatggaggacattctgcagaggaatctctgggtgaacccactcaagccactgtgccggaaacctggtctcttcctttgagtcagaatagtgccagtgaactgcctgctagccagccccagcccttttcagcccaaggagacatggaagaaaacataataatagaagactacgagagtgatgggacatagaagccagcctgctaatcagattgctacttcacagcttcatttttgtttcattcagtggtacttcagcagagttaatatgcttttctgatgaattacacaacagtttgttaattcttcattcttgtagtatttcatcacaagaaacctactcttctgtcatcttgaagtaaatagaagatcaagccttcaaatctcttaattttttcggtatttattaaatctgtgagtggtttaaggagcggtcagtgtgtataaagtgtgtttgaacattatgccaaatatcaagatgtgaaggactaattcaggatgcaaaaacgttattggggggttgtaaatatcaactattcaacagtttaggatgcaattacgagtgtaaactgtgtgccttatttacactttattgtctcccgcttctcagatagttttgatgtgttgtacagtggaatatcttagatactttttggaaagtatttacataagttatatcacaattaaaatgttgaatttaa

SEQ ID NO: 10923 - protein, 670 aa, Homo sapiens; identical to SEQ ID NO: 988

SEQ ID NO: 10924 - DNA, 2977 bp, Homo sapiens
tacctggctttcgatgacacatttccgtcgcaaagttggagggtgggcataactcgggtcggtacttcgggtcaggcagtgcgctggatgcctaagtcacacactccttcggtggtccccgcccttcgcttgcgccgaccagtctggaaggtccccgggaggccgtacctccgagaggctcggcgttgagcccgggtagggccaggtggctgccctttcacctagggtagtccctggtcgcctccgctcttcgcctaaaaggggatgcagctccgggaaatatatgggagtccacatttatgtaagaaatgaaactataaaatgtataaataatttgcaaatcagaattgctgtcgaaagttttactataatgaaagatattttcatactctcaaaaatatagaggaaaggggccaagattatagtaccagtcacaatcttttgatgaggacgaaatgaatcaggtaacagactgggttgacccatcatttgatgattttctagagtgtagtggcgtctctactattactgccacatcattaggtgtgaataactcaagtcatagaagaaaaaatgggccttctacattagaaagcagcagatttccagcgagaaaaagaggaaatctatcttccttagaacagatttatggtttagaaaattcaaaagaatatctgtctgaaaatgaaccatgggtggataaatataaaccagaaactcagcatgaacttgctgtgcataaaaagaaaattgaagaagtcgaaacctggttaaaagctcaagttttagaaaggcaaccaaaacagggtggatctattttattaataacaggtcctcctggatgtggaaagacaacgaccttaaaaatactatcaaaggagcatggtattcaagtacaagagtggattaatccagttttaccagacttccaaaaagatgatttcaaggggatgtttaatactgaatcaagcttccatatgtttccctatcagtctcagatagcagttttcaaagagtttctactaagagcgacaaagtataacaagttacaaatgcttggagatgatctgagaactgataagaagataattctggttgaagatttacctaaccagttttatcgggattctcatactttacatgaagttctaaggaagtatgtgaggattggtcgatgtcctcttatatttataatctcggacagtctcagtggagataataatcaaaggttattgtttcccaaagaaattcaggaagagtgttctatctcaaatattagtttcaaccctgtggcaccaacaattatgatgaaatttcttaatcgaatagtgactatagaagctaacaagaatggaggaaaaattactgtccctgacaaaacttctctagagttgctctgtcagggatgttctggtgatatcagaagtgcaataaacagcctccagttttcttcttcaaaaggagaaaacaacttacggccaaggaaaaaaggaatgtctttaaaatcagatgctgtgctgtcaaaatcaaaacgaagaaaaaaacctgatagggtttttgaaaatcaagaggtccaagctattggtggcaaagatgtttctctgtttctcttcagagctttggggaaaattctatattgtaaaagagcatctttaacagaattagactcacctcggttgccctctcatttatcagaatatgaacgggatacattacttgttgaacctgaggaggtagtagaaatgtcacacatgcctggagacttatttaatttatatcttcaccaaaactacatagatttcttcatggaaattgatgatattgtgagagccagtgaatttctgagttttgcagatatcctcagtggtgactggaatacacgctctttactcagggaatatagcacatctatagctacgagaggtgtgatgcattccaacaaagcccgaggatatgctcattgccaaggaggaggatcaagttttcgacccttgcacaaacctcagtggtttctaataaataaaaagtatcgggaaaattgcctggcagcaaaagcactttttcctgacttctgcctaccagctttatgcctccaaactcagctattgccataccttgctctactaaccattccaatgagaaatcaagctcagatttcttttatccaagatattggaaggctccctctgaagcgacactttggaagattgaaaatggaagccctgactgacagggaacatggaatgatagaccctgacagcggagatgaagcccagcttaatggaggacattctgcagaggaatctctgggtgaacccactcaagccactgtgccggaaacctggtctcttcctttgagtcagaatagtgccagtgaactgcctgctagccagccccagcccttttcagcccaaggagacatggaagaaaacataataatagaagactacgagagtgatgggacatagaagccagcctgctaatcagattgctacttcacagcttcatttttgtttcattcagtggtacttcagcagagttaatatgcttttctgatgaattacacaacagtttgttaattcttcattcttgtagtatttcatcacaagaaacctactcttctgtcatcttgaagtaaatagaagatcaagccttcaaatctcttaattttttcggtatttattaaatctgtgagtggtttaaggagcggtcagtgtgtataaagtgtgtttgaacattatgccaaatatcaagatgtgaaggactaattcaggatgcaaaaacgttattggggggttgtaaatatcaactattcaacagtttaggatgcaattacgagtgtaaactgtgtgccttatttacactttattgtctcccgcttctcagatagttttgatgtgttgtacagtggaatatcttagatactttttggaaagtatttacataagttatatcacaattaaaatgttgaatttaa

SEQ ID NO: 10925 - protein, 670 aa, Homo sapiens; identical to SEQ ID NO: 988

SEQ ID NO: 10926 - DNA, 2856 bp, Homo sapiens
tacctggctttcgatgacacatttccgtcgcaaagttggagggtgggcataactcgggtcggtacttcgggtcaggcagtgcgctggatgcctaagtcacacactccttcggtggtccccgcccttcgcttgcgccgaccagtctggaaggtccccgggaggccgtacctccgagaggctcggcgttgagcccgggtagggccaggtggctgccctttcacctagggtagtccctggtcgcctccgctcttcgcctaaaaggggatgcagctccgggaaacaagtgaattcatggtattttacttttttgggaaatactggaaatgaagacctgcaactgtaatttgaaataaggaaaactttaattttcagtataaaaattgctcaaatagaattgcctgattttaatgacaaaagtatatgggagtccacatttatgtaagaaatgaaactataaaatgtataaataatttgcaaatcagaattgctgtcgaaagttttactataatgaaagatattttcatactctcaaaaatatagaggaaaggggccaagattatagtaccagtcacaatcttttgatgaggacgaaatgaatcagcatgaacttgctgtgcataaaaagaaaattgaagaagtcgaaacctggttaaaagctcaagttttagaaaggcaaccaaaacagggtggatctattttattaataacaggtcctcctggatgtggaaagacaacgaccttaaaaatactatcaaaggagcatggtattcaagtacaagagtggattaatccagttttaccagacttccaaaaagatgatttcaaggggatgtttaatactgaatcaagcttccatatgtttccctatcagtctcagatagcagttttcaaagagtttctactaagagcgacaaagtataacaagttacaaatgcttggagatgatctgagaactgataagaagataattctggttgaagatttacctaaccagttttatcgggattctcatactttacatgaagttctaaggaagtatgtgaggattggtcgatgtcctcttatatttataatctcggacagtctcagtggagataataatcaaaggttattgtttcccaaagaaattcaggaagagtgttctatctcaaatattagtttcaaccctgtggcaccaacaattatgatgaaatttcttaatcgaatagtgactatagaagctaacaagaatggaggaaaaattactgtccctgacaaaacttctctagagttgctctgtcagggatgttctggtgatatcagaagtgcaataaacagcctccagttttcttcttcaaaaggagaaaacaacttacggccaaggaaaaaaggaatgtctttaaaatcagatgctgtgctgtcaaaatcaaaacgaagaaaaaaacctgatagggtttttgaaaatcaagaggtccaagctattggtggcaaagatgtttctctgtttctcttcagagctttggggaaaattctatattgtaaaagagcatctttaacagaattagactcacctcggttgccctctcatttatcagaatatgaacgggatacattacttgttgaacctgaggaggtagtagaaatgtcacacatgcctggagacttatttaatttatatcttcaccaaaactacatagatttcttcatggaaattgatgatattgtgagagccagtgaatttctgagttttgcagatatcctcagtggtgactggaatacacgctctttactcagggaatatagcacatctatagctacgagaggtgtgatgcattccaacaaagcccgaggatatgctcattgccaaggaggaggatcaagttttcgacccttgcacaaacctcagtggtttctaataaataaaaagtatcgggaaaattgcctggcagcaaaagcactttttcctgacttctgcctaccagctttatgcctccaaactcagctattgccataccttgctctactaaccattccaatgagaaatcaagctcagatttcttttatccaagatattggaaggctccctctgaagcgacactttggaagattgaaaatggaagccctgactgacagggaacatggaatgatagaccctgacagcggagatgaagcccagcttaatggaggacattctgcagaggaatctctgggtgaacccactcaagccactgtgccggaaacctggtctcttcctttgagtcagaatagtgccagtgaactgcctgctagccagccccagcccttttcagcccaaggagacatggaagaaaacataataatagaagactacgagagtgatgggacatagaagccagcctgctaatcagattgctacttcacagcttcatttttgtttcattcagtggtacttcagcagagttaatatgcttttctgatgaattacacaacagtttgttaattcttcattcttgtagtatttcatcacaagaaacctactcttctgtcatcttgaagtaaatagaagatcaagccttcaaatctcttaattttttcggtatttattaaatctgtgagtggtttaaggagcggtcagtgtgtataaagtgtgtttgaacattatgccaaatatcaagatgtgaaggactaattcaggatgcaaaaacgttattggggggttgtaaatatcaactattcaacagtttaggatgcaattacgagtgtaaactgtgtgccttatttacactttattgtctcccgcttctcagatagttttgatgtgttgtacagtggaatatcttagatactttttggaaagtatttacataagttatatcacaattaaaatgttgaatttaa

SEQ ID NO: 10927 - protein, 584 aa, Homo sapiens; identical to SEQ ID NO: 996

SEQ ID NO: 10928 - DNA, 3207 bp, Homo sapiens
tacctggctttcgatgacacatttccgtcgcaaagttggagggtgggcataactcgggtcggtacttcgggtcaggcagtgcgctggatgcctaagtcacacactccttcggtggtccccgcccttcgcttgcgccgaccagtctggaaggtccccgggaggccgtacctccgagaggctcggcgttgagcccgggtagggccaggtggctgccctttcacctagggtagtccctggtcgcctccgctcttcgcctaaaaggggatgcagctccgggaaagtaaggccgccgcggttgcggctatattatgtatatgtcttagagacgtgagtctatctctgccttcaagctttcctgggctctcgtcgctcctcctcccgacccgcccatcccatctggggatgagaagattgagggtgcagagccctgtcctgcagcggggatttgcgagctcaacccggcaccccactgattacaggattacgttggacgaatatttgagcttagtattccctgttcactgtgtggggtggtggtgggtcggctaggaatagtcttgaaggtctacctctgacatctcatttcagtaacctcgcatcttcagggacagttatctgctttttaaaggagcaagtgaattcatggtattttacttttttgggaaatactggaaatgaagacctgcaactgtaatttgaaataaggaaaactttaattttcagtataaaaattgctcaaatagaattgcctgattttaatgacaaaagtatatgggagtccacatttatgtaagaaatgaaactataaaatgtataaataatttgcaaatcagaattgctgtcgaaagttttactataatgaaagatattttcatactctcaaaaatatagaggaaaggggccaagattatagtaccagtcacaatcttttgatgaggacgaaatgaatcagcatgaacttgctgtgcataaaaagaaaattgaagaagtcgaaacctggttaaaagctcaagttttagaaaggcaaccaaaacagggtggatctattttattaataacaggtcctcctggatgtggaaagacaacgaccttaaaaatactatcaaaggagcatggtattcaagtacaagagtggattaatccagttttaccagacttccaaaaagatgatttcaaggggatgtttaatactgaatcaagcttccatatgtttccctatcagtctcagatagcagttttcaaagagtttctactaagagcgacaaagtataacaagttacaaatgcttggagatgatctgagaactgataagaagataattctggttgaagatttacctaaccagttttatcgggattctcatactttacatgaagttctaaggaagtatgtgaggattggtcgatgtcctcttatatttataatctcggacagtctcagtggagataataatcaaaggttattgtttcccaaagaaattcaggaagagtgttctatctcaaatattagtttcaaccctgtggcaccaacaattatgatgaaatttcttaatcgaatagtgactatagaagctaacaagaatggaggaaaaattactgtccctgacaaaacttctctagagttgctctgtcagggatgttctggtgatatcagaagtgcaataaacagcctccagttttcttcttcaaaaggagaaaacaacttacggccaaggaaaaaaggaatgtctttaaaatcagatgctgtgctgtcaaaatcaaaacgaagaaaaaaacctgatagggtttttgaaaatcaagaggtccaagctattggtggcaaagatgtttctctgtttctcttcagagctttggggaaaattctatattgtaaaagagcatctttaacagaattagactcacctcggttgccctctcatttatcagaatatgaacgggatacattacttgttgaacctgaggaggtagtagaaatgtcacacatgcctggagacttatttaatttatatcttcaccaaaactacatagatttcttcatggaaattgatgatattgtgagagccagtgaatttctgagttttgcagatatcctcagtggtgactggaatacacgctctttactcagggaatatagcacatctatagctacgagaggtgtgatgcattccaacaaagcccgaggatatgctcattgccaaggaggaggatcaagttttcgacccttgcacaaacctcagtggtttctaataaataaaaagtatcgggaaaattgcctggcagcaaaagcactttttcctgacttctgcctaccagctttatgcctccaaactcagctattgccataccttgctctactaaccattccaatgagaaatcaagctcagatttcttttatccaagatattggaaggctccctctgaagcgacactttggaagattgaaaatggaagccctgactgacagggaacatggaatgatagaccctgacagcggagatgaagcccagcttaatggaggacattctgcagaggaatctctgggtgaacccactcaagccactgtgccggaaacctggtctcttcctttgagtcagaatagtgccagtgaactgcctgctagccagccccagcccttttcagcccaaggagacatggaagaaaacataataatagaagactacgagagtgatgggacatagaagccagcctgctaatcagattgctacttcacagcttcatttttgtttcattcagtggtacttcagcagagttaatatgcttttctgatgaattacacaacagtttgttaattcttcattcttgtagtatttcatcacaagaaacctactcttctgtcatcttgaagtaaatagaagatcaagccttcaaatctcttaattttttcggtatttattaaatctgtgagtggtttaaggagcggtcagtgtgtataaagtgtgtttgaacattatgccaaatatcaagatgtgaaggactaattcaggatgcaaaaacgttattggggggttgtaaatatcaactattcaacagtttaggatgcaattacgagtgtaaactgtgtgccttatttacactttattgtctcccgcttctcagatagttttgatgtgttgtacagtggaatatcttagatactttttggaaagtatttacataagttatatcacaattaaaatgttgaatttaa

SEQ ID NO: 10929 - protein, 584 aa, Homo sapiens; identical to SEQ ID NO: 996

SEQ ID NO: 10930 - DNA, 3465 bp, Homo sapiens
tacctggctttcgatgacacatttccgtcgcaaagttggagggtgggcataactcgggtcggtacttcgggtcaggcagtgcgctggatgcctaagtcacacactccttcggtggtccccgcccttcgcttgcgccgaccagtctggaaggtccccgggaggccgtacctccgagaggctcggcgttgagcccgggtagggccaggtggctgccctttcacctagggtagtccctggtcgcctccgctcttcgcctaaaaggggatgcagctccgggaaagtaaggccgccgcggttgcggctatattatgtatatgtcttagagacgtgagtctatctctgccttcaagctttcctgggctctcgtcgctcctcctcccgacccgcccatcccatctggggatgagaagattgagggtgcagagccctgtcctgcagcggggatttgcgagctcaacccggcaccccactgattacaggattacgttggacgaatatttgagcttagtattccctgttcactgtgtggggtggtggtgggtcggctaggaatagtcttgaaggtctacctctgacatctcatttcagtaacctcgcatcttcagggacagttatctgctttttaaaggagcaagtgaattcatggtattttacttttttgggaaatactggaaatgaagacctgcaactgtaatttgaaataaggaaaactttaattttcagtataaaaattgctcaaatagaattgcctgattttaatgacaaaagtatatgggagtccacatttatgtaagaaatgaaactataaaatgtataaataatttgcaaatcagaattgctgtcgaaagttttactataatgaaagatattttcatactctcaaaaatatagaggaaaggggccaagattatagtaccagtcacaatcttttgatgaggacgaaatgaatcaggtaacagactgggttgacccatcatttgatgattttctagagtgtagtggcgtctctactattactgccacatcattaggtgtgaataactcaagtcatagaagaaaaaatgggccttctacattagaaagcagcagatttccagcgagaaaaagaggaaatctatcttccttagaacagatttatggtttagaaaattcaaaagaatatctgtctgaaaatgaaccatgggtggataaatataaaccagaaactcagcatgaacttgctgtgcataaaaagaaaattgaagaagtcgaaacctggttaaaagctcaagttttagaaaggcaaccaaaacagggtggatctattttattaataacaggtcctcctggatgtggaaagacaacgaccttaaaaatactatcaaaggagcatggtattcaagtacaagagtggattaatccagttttaccagacttccaaaaagatgatttcaaggggatgtttaatactgaatcaagcttccatatgtttccctatcagtctcagatagcagttttcaaagagtttctactaagagcgacaaagtataacaagttacaaatgcttggagatgatctgagaactgataagaagataattctggttgaagatttacctaaccagttttatcgggattctcatactttacatgaagttctaaggaagtatgtgaggattggtcgatgtcctcttatatttataatctcggacagtctcagtggagataataatcaaaggttattgtttcccaaagaaattcaggaagagtgttctatctcaaatattagtttcaaccctgtggcaccaacaattatgatgaaatttcttaatcgaatagtgactatagaagctaacaagaatggaggaaaaattactgtccctgacaaaacttctctagagttgctctgtcagggatgttctggtgatatcagaagtgcaataaacagcctccagttttcttcttcaaaaggagaaaacaacttacggccaaggaaaaaaggaatgtctttaaaatcagatgctgtgctgtcaaaatcaaaacgaagaaaaaaacctgatagggtttttgaaaatcaagaggtccaagctattggtggcaaagatgtttctctgtttctcttcagagctttggggaaaattctatattgtaaaagagcatctttaacagaattagactcacctcggttgccctctcatttatcagaatatgaacgggatacattacttgttgaacctgaggaggtagtagaaatgtcacacatgcctggagacttatttaatttatatcttcaccaaaactacatagatttcttcatggaaattgatgatattgtgagagccagtgaatttctgagttttgcagatatcctcagtggtgactggaatacacgctctttactcagggaatatagcacatctatagctacgagaggtgtgatgcattccaacaaagcccgaggatatgctcattgccaaggaggaggatcaagttttcgacccttgcacaaacctcagtggtttctaataaataaaaagtatcgggaaaattgcctggcagcaaaagcactttttcctgacttctgcctaccagctttatgcctccaaactcagctattgccataccttgctctactaaccattccaatgagaaatcaagctcagatttcttttatccaagatattggaaggctccctctgaagcgacactttggaagattgaaaatggaagccctgactgacagggaacatggaatgatagaccctgacagcggagatgaagcccagcttaatggaggacattctgcagaggaatctctgggtgaacccactcaagccactgtgccggaaacctggtctcttcctttgagtcagaatagtgccagtgaactgcctgctagccagccccagcccttttcagcccaaggagacatggaagaaaacataataatagaagactacgagagtgatgggacatagaagccagcctgctaatcagattgctacttcacagcttcatttttgtttcattcagtggtacttcagcagagttaatatgcttttctgatgaattacacaacagtttgttaattcttcattcttgtagtatttcatcacaagaaacctactcttctgtcatcttgaagtaaatagaagatcaagccttcaaatctcttaattttttcggtatttattaaatctgtgagtggtttaaggagcggtcagtgtgtataaagtgtgtttgaacattatgccaaatatcaagatgtgaaggactaattcaggatgcaaaaacgttattggggggttgtaaatatcaactattcaacagtttaggatgcaattacgagtgtaaactgtgtgccttatttacactttattgtctcccgcttctcagatagttttgatgtgttgtacagtggaatatcttagatactttttggaaagtatttacataagttatatcacaattaaaatgttgaatttaa

SEQ ID NO: 10931 - protein, 670 aa, Homo sapiens; identical to SEQ ID NO: 988

SEQ ID NO: 10932 - DNA, 1051 bp, Homo sapiens
gaggctcggcgttgagcccgggtagggccaggtggctgccctttcacctagggtagtccctggtcgcctccgctcttcgcctaaaaggggatgcagctccgggaaacaagtgaattcatggtattttacttttttgggaaatactggaaatgaagacctgcaactgtaatttgaaataaggaaaactttaattttcagtataaaaattgctcaaatagaattgcctgattttaatgacaaaagatattggaaggctccctctgaagcgacactttggaagattgaaaatggaagccctgactgacagggaacatggaatgatagaccctgacagcggagatgaagcccagcttaatggaggacattctgcagaggaatctctgggtgaacccactcaagccactgtgccggaaacctggtctcttcctttgagtcagaatagtgccagtgaactgcctgctagccagccccagcccttttcagcccaaggagacatggaagaaaacataataatagaagactacgagagtgatgggacatagaagccagcctgctaatcagattgctacttcacagcttcatttttgtttcattcagtggtacttcagcagagttaatatgcttttctgatgaattacacaacagtttgttaattcttcattcttgtagtatttcatcacaagaaacctactcttctgtcatcttgaagtaaatagaagatcaagccttcaaatctcttaattttttcggtatttattaaatctgtgagtggtttaaggagcggtcagtgtgtataaagtgtgtttgaacattatgccaaatatcaagatgtgaaggactaattcaggatgcaaaaacgttattggggggttgtaaatatcaactattcaacagtttaggatgcaattacgagtgtaaactgtgtgccttatttacactttattgtctcccgcttctcagatagttttgatgtgttgtacagtggaatatcttagatactttttggaaagtatttacataagttatatcacaattaaaatgttgaatttaa

SEQ ID NO: 10933 - protein, 102 aa, Homo sapiens
MTKDIGRLPLKRHFGRLKMEALTDREHGMIDPDSGDEAQLNGGHSAEESLGEPTQATVPETWSLPLSQNSASELPASQPQPFSAQGDMEENIIIEDYESDGT

SEQ ID NO: 10934 - DNA, 922 bp, Homo sapiens
cggcgttgagcccgggtagggccaggtggctgccctttcacctagggtagtccctggtcgcctccgctcttcgcctaaaaggggatgcagctccgggaaacaagtgaattcatgatattggaaggctccctctgaagcgacactttggaagattgaaaatggaagccctgactgacagggaacatggaatgatagaccctgacagcggagatgaagcccagcttaatggaggacattctgcagaggaatctctgggtgaacccactcaagccactgtgccggaaacctggtctcttcctttgagtcagaatagtgccagtgaactgcctgctagccagccccagcccttttcagcccaaggagacatggaagaaaacataataatagaagactacgagagtgatgggacatagaagccagcctgctaatcagattgctacttcacagcttcatttttgtttcattcagtggtacttcagcagagttaatatgcttttctgatgaattacacaacagtttgttaattcttcattcttgtagtatttcatcacaagaaacctactcttctgtcatcttgaagtaaatagaagatcaagccttcaaatctcttaattttttcggtatttattaaatctgtgagtggtttaaggagcggtcagtgtgtataaagtgtgtttgaacattatgccaaatatcaagatgtgaaggactaattcaggatgcaaaaacgttattggggggttgtaaatatcaactattcaacagtttaggatgcaattacgagtgtaaactgtgtgccttatttacactttattgtctcccgcttctcagatagttttgatgtgttgtacagtggaatatcttagatactttttggaaagtatttacataagttatatcacaattaaaatgttgaatttaa

SEQ ID NO: 10935 - protein, 84 aa, Homo sapiens [sequence omitted]

SEQ ID NO: 10936 - DNA, 3164 bp, Homo sapiens; identical to SEQ ID NO: 987

SEQ ID NO: 10937 - protein, 670 aa, Homo sapiens; identical to SEQ ID NO: 988

SEQ ID NO: 10938 - DNA, 2345 bp, Homo sapiens
gtgaattatagtttaatgtactgcaagtcctaaactacggatgggaactattacagtttataatgtcaaaaacttttcttagaccaaaggtatcttccacaaaggtaacagactgggttgacccatcatttgatgattttctagagtgtagtggcgtctctactattactgccacatcattaggtgtgaataactcaagtcatagaagaaaaaatgggccttctacattagaaagcagcagatttccagcgagaaaaagaggaaatctatcttccttagaacagatttatggtttagaaaattcaaaagaatatctgtctgaaaatgaaccatgggtggataaatataaaccagaaactcagcatgaacttgctgtgcataaaaagaaaattgaagaagtcgaaacctggttaaaagctcaagttttagaaaggcaaccaaaacagggtggatctattttattaataacaggtcctcctggatgtggaaagacaacgaccttaaaaatactatcaaaggagcatggtattcaagtacaagagtggattaatccagttttaccagacttccaaaaagatgatttcaaggggatgtttaatactgaatcaagcttccatatgtttccctatcagtctcagatagcagttttcaaagagtttctactaagagcgacaaagtataacaagttacaaatgcttggagatgatctgagaactgataagaagataattctggttgaagatttacctaaccagttttatcgggattctcatactttacatgaagttctaaggaagtatgtgaggattggtcgatgtcctcttatatttataatctcggacagtctcagtggagataataatcaaaggttattgtttcccaaagaaattcaggaagagtgttctatctcaaatattagtttcaaccctgtggcaccaacaattatgatgaaatttcttaatcgaatagtgactatagaagctaacaagaatggaggaaaaattactgtccctgacaaaacttctctagagttgctctgtcagggatgttctggtgatatcagaagtgcaataaacagcctccagttttcttcttcaaaaggagaaaacaacttacggccaaggaaaaaaggaatgtctttaaaatcagatgctgtgctgtcaaaatcaaaacgaagaaaaaaacctgatagggtttttgaaaatcaagaggtccaagctattggtggcaaagatgtttctctgtttctcttcagagctttggggaaaattctatattgtaaaagagcatctttaacagaattagactcacctcggttgccctctcatttatcagaatatgaacgggatacattacttgttgaacctgaggaggtagtagaaatgtcacacatgcctggagacttatttaatttatatcttcaccaaaactacatagatttcttcatggaaattgatgatattgtgagagccagtgaatttctgagttttgcagatatcctcagtggtgactggaatacacgctctttactcagggaatatagcacatctatagctacgagaggtgtgatgcattccaacaaagcccgaggatatgctcattgccaaggaggaggatcaagttttcgacccttgcacaaacctcagtggtttctaataaataaaaagtatcgggaaaattgcctggcagcaaaagcactttttcctgacttctgcctaccagctttatgcctccaaactcagctattgccataccttgctctactaaccattccaatgagaaatcaagctcagatttcttttatccaagatattggaaggctccctctgaagcgacactttggaagattgaaaatggaagccctgactgacagggaacatggaatgatagaccctgacagcggagatgaagcccagcttaatggaggacattctgcagaggaatctctgggtgaacccactcaagccactgtgccggaaacctggtctcttcctttgagtcagaatagtgccagtgaactgcctgctagccagccccagcccttttcagcccaaggagacatggaagaaaacataataatagaagactacgagagtgatgggacatagaagccagcctgctaatcagattgctacttcacagcttcatttttgtttcattcagtggtacttcagcagagttaatatgcttttctgatgaattacacaacagtttgttaattcttcattcttgtagtatttcatcacaagaaacctactcttctgtcatcttgaagtaaatagaagatcaagccttcaaatctcttaattttttcggtatttattaaatctgtgagtggtttaagg

SEQ ID NO: 10939 - protein, 681 aa, Homo sapiens; identical to SEQ ID NO: 992

SEQ ID NO: 10940 - DNA, 2617 bp, Homo sapiens
gtgaattatagtttaatgtactgcaagtcctaaactacggatgggaactattacagtttataatgtcaaaaacttttcttagaccaaaggtatcttccacaaaggtaacagactgggttgacccatcatttgatgattttctagagtgtagtggcgtctctactattactgccacatcattaggtgtgaataactcaagtcatagaagaaaaaatgggccttctacattagaaagcagcagatttccagcgagaaaaagaggaaatctatcttccttagaacagatttatggtttagaaaattcaaaagaatatctgtctgaaaatgaaccatgggtggataaatataaaccagaaactcagcatgaacttgctgtgcataaaaagaaaattgaagaagtcgaaacctggttaaaagctcaagttttagaaaggcaaccaaaacagggtggatctattttattaataacaggtcctcctggatgtggaaagacaacgaccttaaaaatactatcaaaggagcatggtattcaagtacaagagtggattaatccagttttaccagacttccaaaaagatgatttcaaggggatgtttaatactgaatcaagcttccatatgtttccctatcagtctcagatagcagttttcaaagagtttctactaagagcgacaaagtataacaagttacaaatgcttggagatgatctgagaactgataagaagataattctggttgaagatttacctaaccagttttatcgggattctcatactttacatgaagttctaaggaagtatgtgaggattggtcgatgtcctcttatatttataatctcggacagtctcagtggagataataatcaaaggttattgtttcccaaagaaattcaggaagagtgttctatctcaaatattagtttcaaccctgtggcaccaacaattatgatgaaatttcttaatcgaatagtgactatagaagctaacaagaatggaggaaaaattactgtccctgacaaaacttctctagagttgctctgtcagggatgttctggtgatatcagaagtgcaataaacagcctccagttttcttcttcaaaaggagaaaacaacttacggccaaggaaaaaaggaatgtctttaaaatcagatgctgtgctgtcaaaatcaaaacgaagaaaaaaacctgatagggtttttgaaaatcaagaggtccaagctattggtggcaaagatgtttctctgtttctcttcagagctttggggaaaattctatattgtaaaagagcatctttaacagaattagactcacctcggttgccctctcatttatcagaatatgaacgggatacattacttgttgaacctgaggaggtagtagaaatgtcacacatgcctggagacttatttaatttatatcttcaccaaaactacatagatttcttcatggaaattgatgatattgtgagagccagtgaatttctgagttttgcagatatcctcagtggtgactggaatacacgctctttactcagggaatatagcacatctatagctacgagaggtgtgatgcattccaacaaagcccgaggatatgctcattgccaaggaggaggatcaagttttcgacccttgcacaaacctcagtggtttctaataaataaaaagtatcgggaaaattgcctggcagcaaaagcactttttcctgacttctgcctaccagctttatgcctccaaactcagctattgccataccttgctctactaaccattccaatgagaaatcaagctcagatttcttttatccaagatattggaaggctccctctgaagcgacactttggaagattgaaaatggaagccctgactgacagggaacatggaatgatagaccctgacagcggagatgaagcccagcttaatggaggacattctgcagaggaatctctgggtgaacccactcaagccactgtgccggaaacctggtctcttcctttgagtcagaatagtgccagtgaactgcctgctagccagccccagcccttttcagcccaaggagacatggaagaaaacataataatagaagactacgagagtgatgggacatagaagccagcctgctaatcagattgctacttcacagcttcatttttgtttcattcagtggtacttcagcagagttaatatgcttttctgatgaattacacaacagtttgttaattcttcattcttgtagtatttcatcacaagaaacctactcttctgtcatcttgaagtaaatagaagatcaagccttcaaatctcttaattttttcggtatttattaaatctgtgagtggtttaaggagcggtcagtgtgtataaagtgtgtttgaacattatgccaaatatcaagatgtgaaggactaattcaggatgcaaaaacgttattggggggttgtaaatatcaactattcaacagtttaggatgcaattacgagtgtaaactgtgtgccttatttacactttattgtctcccgcttctcagatagttttgatgtgttgtacagtggaatatcttagatactttttggaaagtatttacataagttatatcacaattaaaatgttgaatttaa

SEQ ID NO: 10941 - protein, 681 aa, Homo sapiens; identical to SEQ ID NO: 992

SEQ ID NO: 10942 - DNA, 2165 bp, Homo sapiens
cccgggagcccgataccggtttcagagtcctgggcagcgtgcgcgctcttcctggcggctgcgcaggtgtgaaaatcacaaatgtcaaatgatggaagatccaggaatcgggacaggcgctacgatgaggtcccaagcgacctgccctatcaagataccaccataagaacccacccaactcttcatgacagtgagcgggcagtgagcgctgatcccttgccaccaccccctctcccattacagccaccattcggcccagacttctactcaagtgacacagaagaaccagctatagcgccagatctcaaaccagtaaggcgctttgtccctgactcctggaagaactttttcagagggaagaaaaaggaccccgaatgggataagccggtgtctgatatcaggtacatctccgatggagtggagtgttcaccaccagcctctccagcaagaccaaaccaccgttcgcccctcaactcctgcaaagatccctacggagggtcagaaggaacctttagttcccggaaagaggctgacgcagtgtttccccgggatccctatggatctctagaccgacacacacaaacagttcgaacatacagtgagaaggtggaggagtataacctgagatactcctacatgaagtcgtgggcaggcctgctgagaatactgggtgtggtggagctgcttttgggggccggtgtctttgcttgtgtcacagcttacattcacaaggacagtgagtggtacaacttgtttggatattcacaaccgtatggcatgggaggcgttggtggattgggcagtatgtatgggggctattactacactggccctaagaccccttttgtactcgtggttgctggattagcttggatcaccaccattattattctggttcttggcatgtccatgtattaccggaccattcttctggactctaattggtggcccctaactgaatttggaattaacgttgccttgtttattttgtatatggccgcagccatagtctatgtgaatgataccaaccgaggtggcctctgctactatccgttatttaatacaccagtgaatgcagtgttctgccgggtagaaggaggacagatagctgcaatgatcttcctgtttgtcaccatgatagtttatctcattagtgctttggtttgcctaaagttatggaggcatgaggcagctcggagacatagagaatatatggaacaacaggagataaatgagccatcattgtcatcgaaaaggaaaatgtgtgaaatggccaccagtggtgacagacaaagagactcagaagttaatttcaaggaactgagaacagcaaaaatgaaacctgaactactgagtggacacatccccccaggccacattcctaaacctatcgtgatgcccgactatgtggcaaaataccctgtgattcagacagatgatgagcgagaacgctataaagctgtgttccaagaccagttttcagagtacaaagagctgtctgcagaagttcaggctgtcctgaggaagtttgatgagctggatgcagtgatgagcagattgccacatcattcggaaagccgacaggaacatgagagaatttcaagaatccatgaagagtttaagaaaaaaaagaatgatcctacatttctggaaaaaaaagaacgctgtgattacctaaagaataaactttctcacataaagcaaagaattcaagaatatgataaagtaatgaattgggatgtacaaggttattcttaacgcttatttgaaaccactttatttttttattttattttatttttttgagatgaagtctcgctctgttacccaggctggaatgcagtggcacaatctcggctcactgcaacctccacctcccgggttcaagcaattctcctgttcaagcaattagcctccccagtagctgggattacaggcgtgcgctgccacaccccgctaatttttgtatttttagtagagacgaggtttcaccatgttggtcaggctgggaaactactttttttaaaaaatagcaagtttactatttatttactgcctttttaatgctagcctctgtggtagagaagcaagcgcttcccaaatcagcttccaattggtttaaccagtatgcaacattaaagattttactcagacatttttaaacg

SEQ ID NO: 10943 - protein, 558 aa, Homo sapiens
MSNDGRSRNRDRRYDEVPSDLPYQDTTIRTHPTLHDSERAVSADPLPPPPLPLQPPFGPDFYSSDTEEPAIAPDLKPVRRFVPDSWKNFFRGKKKDPEWDKPVSDIRYISDGVECSPPASPARPNHRSPLNSCKDPYGGSEGTFSSRKEADAVFPRDPYGSLDRHTQTVRTYSEKVEEYNLRYSYMKSWAGLLRILGVVELLLGAGVFACVTAYIHKDSEWYNLFGYSQPYGMGGVGGLGSMYGGYYYTGPKTPFVLVVAGLAWITTIIILVLGMSMYYRTILLDSNWWPLTEFGINVALFILYMAAAIVYVNDTNRGGLCYYPLFNTPVNAVFCRVEGGQIAAMIFLFVTMIVYLISALVCLKLWRHEAARRHREYMEQQEINEPSLSSKRKMCEMATSGDRQRDSEVNFKELRTAKMKPELLSGHIPPGHIPKPIVMPDYVAKYPVIQTDDERERYKAVFQDQFSEYKELSAEVQAVLRKFDELDAVMSRLPHHSESRQEHERISRIHEEFKKKKNDPTFLEKKERCDYLKNKLSHIKQRIQEYDKVMNWDVQGYS

SEQ ID NO: 10944 - DNA, 2598 bp, Homo sapiens
cccgggagcccgataccggtttcagagtcctgggcagcgtgcgcgctcttcctggcggctgcgcaggtgtgaaaatcacaaatgtcaaatgatggaagatccaggaatcgggacaggcgctacgatgaggtcccaagcgacctgccctatcaagataccaccataagaacccacccaactcttcatgacagtgagcgggcagtgagcgctgatcccttgccaccaccccctctcccattacagccaccattcggcccagacttctactcaagtgacacagaagaaccagctatagcgccagatctcaaaccagtaaggcgctttgtccctgactcctggaagaactttttcagagggaagaaaaaggaccccgaatgggataagccggtgtctgatatcaggtacatctccgatggagtggagtgttcaccaccagcctctccagcaagaccaaaccaccgttcgcccctcaactcctgcaaagatccctacggagggtcagaaggaacctttagttcccggaaagaggctgacgcagtgtttccccgggatccctatggatctctagaccgacacacacaaacagttcgaacatacagtgagaaggtggaggagtataacctgagatactcctacatgaagtcgtgggcaggcctgctgagaatactgggtgtggtggagctgcttttgggggccggtgtctttgcttgtgtcacagcttacattcacaaggacagtgagtggtacaacttgtttggatattcacaaccgtatggcatgggaggcgttggtggattgggcagtatgtatgggggctattactacactggccctaagaccccttttgtactcgtggttgctggattagcttggatcaccaccattattattctggttcttggcatgtccatgtattaccggaccattcttctggactctaattggtggcccctaactgaatttggaattaacgttgccttgtttattttgtatatggccgcagccatagtctatgtgaatgataccaaccgaggtggcctctgctactatccgttatttaatacaccagtgaatgcagtgttctgccgggtagaaggaggacagatagctgcaatgatcttcctgtttgtcaccatgatagtttatctcattagtgctttggtttgcctaaagttatggaggcatgaggcagctcggagacatagagaatatatggaacaacaggagataaatgagccatcattgtcatcgaaaaggaaaatgtgtgaaatggccaccagtggtgacagacaaagagactcagaagttaatttcaaggaactgagaacagcaaaaatgaaacctgaactactgagtggacacatccccccagcccagctaatttttttgtatttttagtagagatggggtttcaccgtgttagccaggatgatctcgatctcctgacctcatgatccacccgcctcagcctcccaaagtgttgggattacaggcgtgagtcaccgcgcccagctggtattgcttttctattccctttggacatacatgctacagtcccacaatgtagcatttccttggaaactccctttttttttttttttgagatggagtttcgctcttgttgcccaggctggagtacagtggtatgatcttggctcactgcagcctctgcctcctgggttcaagcgattctcctgcctctgcctcccaagtagctgggattacaggcacccaccaccatgcccagctaattttttgtatttttagtagagacaggatttcactatgttggccaggttggtctcaagctcctgacctcagatgatctaccagcctcggccttctgaagtgctgggattcaggtgtgagccactgtgcccagcagggatgcttcatctttctaagaattatcttggctttggactttattcataaatgttttatttctgttagtatgaacaatagactgccttaacaaagtttttttttaaacaaaatcgttcttgttggattttattcagcagcatctatcatgtagataaattcccaggtgtagcattacagcttctgactaatatagctgccattcagacaattaatgttcaaagagttttctaaagtgataaaaccaaagaaaagcatgtggaaaagcagaagcttagaaagttgtggtcactgaatgcactccctggtttttatttgtcagtgaaatctttatgcattcattgttaatattttaattccatggctttgtaggctgtgctgtgtctgaaggggtaacacctagggaaacatgaggccccttatgggaccccccaaatggaacaacttcactttctcttttatgtattgagccctgtgttaacatttcacttaagaagagcaccagtgctttaaaaaaaaaaaaaggtaaaatattaccattttgatagactgtaaagagttagattcctgttgaagtgttaaggaaatttaactttgtgaaacttttaaaataaagtttataaatgtagctaatctttgaaaaaccaatgcagtaacactgatttgtaaatgttgtggtcaatccctaggtgcattaaagtttcagtcacctgc

SEQ ID NO: 10945 - protein, 438 aa, Homo sapiens
MSNDGRSRNRDRRYDEVPSDLPYQDTTIRTHPTLHDSERAVSADPLPPPPLPLQPPFGPDFYSSDTEEPAIAPDLKPVRRFVPDSWKNFFRGKKKDPEWDKPVSDIRYISDGVECSPPASPARPNHRSPLNSCKDPYGGSEGTFSSRKEADAVFPRDPYGSLDRHTQTVRTYSEKVEEYNLRYSYMKSWAGLLRILGVVELLLGAGVFACVTAYIHKDSEWYNLFGYSQPYGMGGVGGLGSMYGGYYYTGPKTPFVLVVAGLAWITTIIILVLGMSMYYRTILLDSNWWPLTEFGINVALFILYMAAAIVYVNDTNRGGLCYYPLFNTPVNAVFCRVEGGQIAAMIFLFVTMIVYLISALVCLKLWRHEAARRHREYMEQQEINEPSLSSKRKMCEMATSGDRQRDSEVNFKELRTAKMKPELLSGHIPPAQLIFLYF

SEQ ID NO: 10946 - DNA, 2716 bp, Homo sapiens
cccgggagcccgataccggtttcagagtcctgggcagcgtgcgcgctcttcctggcggctgcgcaggtgtgaaaatcacaaatgtcaaatgatggaagatccaggaatcgggacaggcgctacgatgaggtcccaagcgacctgccctatcaagataccaccataagaacccacccaactcttcatgacagtgagcgggcagtgagcgctgatcccttgccaccaccccctctcccattacagccaccattcggcccagacttctactcaagtgacacagaagaaccagctatagcgccagatctcaaaccagtaaggcgctttgtccctgactcctggaagaactttttcagagggaagaaaaaggaccccgaatgggataagccggtgtctgatatcaggtacatctccgatggagtggagtgttcaccaccagcctctccagcaagaccaaaccaccgttcgcccctcaactcctgcaaagatccctacggagggtcagaaggaacctttagttcccggaaagaggctgacgcagtgtttccccgggatccctatggatctctagaccgacacacacaaacagttcgaacatacagtgagaaggtggaggagtataacctgagatactcctacatgaagtcgtgggcaggcctgctgagaatactgggtgtggtggagctgcttttgggggccggtgtctttgcttgtgtcacagcttacattcacaaggacagtgagtggtacaacttgtttggatattcacaaccgtatggcatgggaggcgttggtggattgggcagtatgtatgggggctattactacactggccctaagaccccttttgtactcgtggttgctggattagcttggatcaccaccattattattctggttcttggcatgtccatgtattaccggaccattcttctggactctaattggtggcccctaactgaatttggaattaacgttgccttgtttattttgtatatggccgcagccatagtctatgtgaatgataccaaccgaggtggcctctgctactatccgttatttaatacaccagtgaatgcagtgttctgccgggtagaaggaggacagatagctgcaatgatcttcctgtttgtcaccatgatagtttatctcattagtgctttggtttgcctaaagttatggaggcatgaggcagctcggagacatagagaatatatggaacaacaggagataaatgagccatcattgtcatcgaaaaggaaaatgtgtgaaatggccaccagtggtgacagacaaagagactcagaagttaatttcaaggaactgagaacagcaaaaatgaaacctgaactactgagtggacacatccccccagcccagctaatttttttgtatttttagtagagatggggtttcaccgtgttagccaggatgatctcgatctcctgacctcatgatccacccgcctcagcctcccaaagtgttgggattacaggcgtgagtcaccgcgcccagctggtattgcttttctattccctttggacatacatgctacagtcccacaatgtagcatttccttggaaactccctttttttttttttttgagatggagtttcgctcttgttgcccaggctggagtacagtggtatgatcttggctcactgcagcctctgcctcctgggttcaagcgattctcctgcctctgcctcccaagtagctgggattacaggcacccaccaccatgcccagctaattttttgtatttttagtagagacaggatttcactatgttggccaggttggtctcaagctcctgacctcagatgatctaccagcctcggccttctgaagtgctgggattcaggtgtgagccactgtgcccagcagggatgcttcatctttctaagaattatcttggctttggactttattcataaatgttttatttctgttagtatgaacaatagactgccttaacaaagtttttttttaaacaaaatcgttcttgttggattttattcagcagcatctatcatgtagataaattcccaggtgtagcattacagcttctgactaatatagctgccattcagacaattaatgttcaaagagttttctaaagtgataaaaccaaagaaaagcatgtggaaaagcagaagcttagaaagttgtggtcactgaatgcactccctggtttttatttgtcagtgaaatctttatgcattcattgttaatattttaattccatggctttgtaggctgtgctgtgtctgaaggggtaacacctagggaaacatgaggccccttatgggaccccccaaatggaacaacttcactttctcttttatgtattgagccctgtgttaacatttcacttaagaagagcaccagtgctttaaaaaaaaaaaaaggtaaaatattaccattttgatagactgtaaagagttagattcctgttgaagtgttaaggaaatttaactttgtgaaacttttaaaataaagtttataaatgtagctaatctttgaaaaaccaatgcagtaacactgatttgtaaatgttgtggtcaatccctaggtgcattaaagtttcagtcacctgccgtgtgtgtgtgtgcccttttatgtttgccttcctagcattcctgtgttcactgtgcatgttcttgaaaatattttcacttgtcagaaaataaactggaaagtcattgaaaacccgta

SEQ ID NO: 10947 - protein, 438 aa, Homo sapiens; identical to SEQ ID NO: 10945

SEQ ID NO: 10948 - DNA, 701 bp, Homo sapiens
gcgcggggcggggcgcgcacctcggggcgatctcggtgctccttacctgggaggtctcccggcttagtttcggcctcgttgggtcggaatctccaaagacagtgggtttcagccagaaacgcgaagacgaacgcctagccggcgcgggcagaaccgaggacacaatgagatttgtgggaccgggcgcccagaggctggcgcgggggagaccccacagctaaaatgctcggtacccccgggcagtcgtgggttagttagaaccgcagagcctttcccgacccctcggaagcgcagaagtatccgaaatctacccgtttcttgggtccagcaaaacttttaagccaggtgtgaaaatcacaaatgtcaaatgatggaagatccaggaatcgggacaggcgctacgatgaggtcccaagcgacctgccctatcaagataccaccataagaacccacccaactcttcatgacagtgagcgggcagtgagcgctgatcccttgccaccaccccctctcccattacagccaccattcggcccagacttctactcaagtgacacagaagaaccagctatagcgccagatctcaaaccagtaaggcgctttgtccctgactcctggaagaactttttcagagggaagaaaaaggaccccgaatgggataagccggtgtctgatatcaggtacatctccgatggagtgga

SEQ ID NO: 10949 - protein, 112 aa, Homo sapiens
MSNDGRSRNRDRRYDEVPSDLPYQDTTIRTHPTLHDSERAVSADPLPPPPLPLQPPFGPDFYSSDTEEPAIAPDLKPVRRFVPDSWKNFFRGKKKDPEWDKPVSDIRYISDG

SEQ ID NO: 10950 - DNA, 377 bp, Homo sapiens
cagccttctgagtagctgggataacaggcatgcaccaccacacctggcttttgtaataccctttataataaaccagtaatggaaccagattggaccatggatatctctgcctgcaaaacctcttgtgctttcaagttgaaggtaacggaaaagtatcagagtaactttaaaagtgtacaatgtctatgtaagcacaacaagaaagcaacttaactgcctgcagcatcagaccaagttcctggatcataagtttgaaagcagcttctagatgacgcttgtggatatttggaataatatctactaatttctgttaagcagctatgtttcaactccacttcaataaaaacagccaaatttctctcctggaaattcttaaa

SEQ ID NO: 10951 - protein, 44 aa, Homo sapiens [sequence omitted]

SEQ ID NO: 10952 - DNA, 323 bp, Homo sapiens
ggaaccagccatgcaaagatctgtgacaagaacattctagggctagaatctaggaccactttggacattcaaagcaaaggaaggaagaggaaggggagcatgggggagatgaaacgcaaggaaggcagagtgtacaatgtctatgtaagcacaacaagaaagcaacttaactgcctgcagcatcagaccaagttcctggatcataagtttgaaagcagcttctagatgacgcttgtggatatttggaataatatctactaatttctgttaagcagctatgtttcaactccacttcaataaaaacagccaaatttctctcctgg

SEQ ID NO: 10953 - protein, 41 aa, Homo sapiens
MGEMKRKEGRVYNVYVSTTRKQLNCLQHQTKFLDHKFESSF

SEQ ID NO: 10954 - DNA, 2638 bp, Homo sapiens
gcctctctccatcagacaccccaaggttccatccgaagcaggcggagcaccgaacgcaccccggggtggtcagggacccccatccgtgctgccccctaggagcccgcgcctctcctctgcgccccgcctctcgggccgcaacgtcgcgcggttcctttaacagcgcgctggcagggtgtgggaagcaggaccgcgtcctcccgccccctcccatccgagtttcaggtgaattggtcaccgagggaggaggccgacacaccacacctacactcccgcgtccacctctccctccctgcttcctctggcggaggcggcaggaaccgagagccaggtccagagcgccgaggagccggtctaggacgcagcagattggtttatcttggaagctaaagggcattgctcatcctgaagatcagctgaccattgacaatcagccatgtcatccaggcctcttgaaagtccacctccttacaggcctgatgaattcaaaccgaatcattatgcaccaagcaatgacatatatggtggagagatgcatgttcgaccaatgctctctcagccagcctactctttttacccagaagatgaaattcttcacttctacaaatggacctctcctccaggagtgattcggatcctgtctatgctcattattgtgatgtgcattgccatctttgcctgtgtggcctccacgcttgcctgggacagaggctatggaacttcccttttaggaggtagtgtaggctacccttatggaggaagtggctttggtagctacggaagtggctatggctatggctatggttatggctatggctacggaggctatacagacccaagagcagcaaagggcttcatgttggccatggctgccttttgtttcattgccgcgttggtgatctttgttaccagtgttataagatctgaaatgtccagaacaagaagatactacttaagtgtgataatagtgagtgctatcctgggcatcatggtgtttattgccacaattgtctatataatgggagtgaacccaactgctcagtcttctggatctctatatggttcacaaatatatgccctctgcaaccaattttatacacctgcagctactggactctacgtggatcagtatttgtatcactactgtgttgtggatccccaggaggccattgccattgtactggggttcatgattattgtggcttttgctttaataattttctttgctgtgaaaactcgaagaaagatggacaggtatgacaagtccaatattttgtgggacaaggaacacatttatgatgagcagccccccaatgtcgaggagtgggttaaaaatgtgtctgcaggcacacaggacgtgccttcacccccatctgactatgtggaaagagttgacagtcccatggcatactcttccaatggcaaagtgaatgacaagcggttttatccagagtcttcctataaatccacgccggttcctgaagtggttcaggagcttccattaacttcgcctgtggatgacttcaggcagcctcgttacagcagcggtggtaactttgagacaccttcaaaaagagcacctgcaaagggaagagcaggaaggtcaaagagaacagagcaagatcactatgagacagactacacaactggcggcgagtcctgtgatgagctggaggaggactggatcagggaatatccacctatcacttcagatcaacaaagacaactgtacaagaggaattttgacactggcctacaggaatacaagagcttacaatcagaacttgatgagatcaataaagaactctcccgtttggataaagaattggatgactatagagaagaaagtgaagagtacatggctgctgctgatgaatacaatagactgaagcaagtgaagggatctgcagattacaaaagtaagaagaatcattgcaagcagttaaagagcaaattgtcacacatcaagaagatggttggagactatgatagacagaaaacatagaaggctgatgccaagttgtttgagaaattaagtatctgacatctctgcaatcttctcagaaggcaaatgactttggaccataaccccggaagccaaacctctgtgagcatcacaaagttttggttgctttaacatcatcagtattgaagcattttataaatcgcttttgataatcaactgggctgaacactccaattaaggattttatgctttaaacattggttcttgtattaagaatgaaatactgtttgaggtttttaagccttaaaggaaggttctggtgtgaactaaactttcacaccccagacgatgtcttcatacctacatgtatttgtttgcataggtgatctcatttaatcctctcaaccacctttcagataactgttatttataatcacttttttccacataaggaaactgggttcctgcaatgaagtctctgaagtgaaactgcttgtttcctagcacacacttttggttaagtctgttttatgacttcattaataataaattccctggcctttcatattttagctactatatatgtgatgatctaccagcctccctattttttttctgttatataaatggttaaaagaggtttttcttaaataataaagatcatgtaaaagt

SEQ ID NO: 10955 - protein, 522 aa, Homo sapiens; identical to SEQ ID NO: 1008

SEQ ID NO: 10956 - DNA, 4713 bp, Homo sapiens
gcctctctccatcagacaccccaaggttccatccgaagcaggcggagcaccgaacgcaccccggggtggtcagggacccccatccgtgctgccccctaggagcccgcgcctctcctctgcgccccgcctctcgggccgcaacgtcgcgcggttcctttaacagcgcgctggcagggtgtgggaagcaggaccgcgtcctcccgccccctcccatccgagtttcaggtgaattggtcaccgagggaggaggccgacacaccacacctacactcccgcgtccacctctccctccctgcttcctctggcggaggcggcaggaaccgagagccaggtccagagcgccgaggagccggtctaggacgcagcagattggtttatcttggaagctaaagggcattgctcatcctgaagatcagctgaccattgacaatcagccatgtcatccaggcctcttgaaagtccacctccttacaggcctgatgaattcaaaccgaatcattatgcaccaagcaatgacatatatggtggagagatgcatgttcgaccaatgctctctcagccagcctactctttttacccagaagatgaaattcttcacttctacaaatggacctctcctccaggagtgattcggatcctgtctatgctcattattgtgatgtgcattgccatctttgcctgtgtggcctccacgcttgcctgggacagaggctatggaacttcccttttaggaggtagtgtaggctacccttatggaggaagtggctttggtagctacggaagtggctatggctatggctatggttatggctatggctacggaggctatacagacccaagagcagcaaagggcttcatgttggccatggctgccttttgtttcattgccgcgttggtgatctttgttaccagtgttataagatctgaaatgtccagaacaagaagatactacttaagtgtgataatagtgagtgctatcctgggcatcatggtgtttattgccacaattgtctatataatgggagtgaacccaactgctcagtcttctggatctctatatggttcacaaatatatgccctctgcaaccaattttatacacctgcagctactggactctacgtggatcagtatttgtatcactactgtgttgtggatccccaggaggccattgccattgtactggggttcatgattattgtggcttttgctttaataattttctttgctgtgaaaactcgaagaaagatggacaggtatgacaagtccaatattttgtgggacaaggaacacatttatgatgagcagccccccaatgtcgaggagtgggttaaaaatgtgtctgcaggcacacaggacgtgccttcacccccatctgactatgtggaaagagttgacagtcccatggcatactcttccaatggcaaagtgaatgacaagcggttttatccagagtcttcctataaatccacgccggttcctgaagtggttcaggagcttccattaacttcgcctgtggatgacttcaggcagcctcgttacagcagcggtggtaactttgagacaccttcaaaaagagcacctgcaaagggaagagcaggaaggtcaaagagaacagagcaagatcactatgagacagactacacaactggcggcgagtcctgtgatgagctggaggaggactggatcagggaatatccacctatcacttcagatcaacaaagacaactgtacaagaggaattttgacactggcctacaggaatacaagagcttacaatcagaacttgatgagatcaataaagaactctcccgtttggataaagaattggatgactatagagaagaaagtgaagagtacatggctgctgctgatgaatacaatagactgaagcaagtgaagggatctgcagattacaaaagtaagaagaatcattgcaagcagttaaagagcaaattgtcacacatcaagaagatggttggagactatgatagacagaaaacatagaaggctgatgccaagttgtttgagaaattaagtatctgacatctctgcaatcttctcagaaggcaaatgactttggaccataaccccggaagccaaacctctgtgagcatcacaaagttttggttgctttaacatcatcagtattgaagcattttataaatcgcttttgataatcaactgggctgaacactccaattaaggattttatgctttaaacattggttcttgtattaagaatgaaatactgtttgaggtttttaagccttaaaggaaggttctggtgtgaactaaactttcacaccccagacgatgtcttcatacctacatgtatttgtttgcataggtgatctcatttaatcctctcaaccacctttcagataactgttatttataatcacttttttccacataaggaaactgggttcctgcaatgaagtctctgaagtgaaactgcttgtttcctagcacacacttttggttaagtctgttttatgacttcattaataataaattccctggcctttcatattttagctactatatatgtgatgatctaccagcctccctattttttttctgttatataaatggttaaaagaggtttttcttaaataataaagatcatgtaaaagtaacaaatgtgtgaaatttaaagattgtaaatatatatttacttttttaagatcaaagtttaaaccccgtggttagaattttgtgtgtttttaaatactttttatctttttgcatgccttttttaaaaaaccaactagaacttttcattatatcagaatatctgattacatttataattcaattgtgacttgaactgtatcttacaggaatgttcaatttctatacatattttataaggtattaaacctggtgttttctttccataataacctgtttgatgttattagtgctgttaacatacagcaatggaaaaccacactcaggagttgtatctgttgttgtttatactcctttggatgctgtgctggttagtcgtttcccattcctttggctgtaagaatgctgatatgtctgggaatagaatgctataccacgaaataccaaataatttcaaatggtgcccttaaattgtatcacttttttaaaaattcagattcttattagtaaaattagttgatagcactgtgctgaccaagttgattgtgatcatcccagcttagacttttctaaaaacttttttttagaataatctataaactgaactttagtatgcatttcagatatttaggtatataatttttttttttttttgagacagagtctcactctcacccaggctggaatgcagtggtgctatcttggctcactgcaacctccacctcccgggttcaagcaattctcctgcctcagcctctcgagtagttgagactacaggtgcccatcaccatgcgtggctaatttttgtatttttaatagagacggggttttaccatagtggccaggttggtcttgaactcctgaccttgtggtctgcctgcctcggcctcccaaagtgctgggattacaggcgtgagccaccatgcctggcctaagtgtgtgtgtgtgtgtgtgtgtgtatttttttttttttttttttgagatggagttttgctcttgttgaacaggctggagtgcaatgtcgcgatctcagctcaccacaacctccgcctcccaggttcaaacaattctcctgcctcggcctcccgagtagctgggattacaggcatgcgccaccacacctggctaattttttttttgtatttttagtagagatggggtttctccatgttggtcaggctggtctcgaactcctgacctcaggtgatccatccacctcggcctcccaaagtgctgggattagaggcgtgagccactgtgcccggcctataatttttgatagatgattttgaattattttccagagataaaattttaaatgtttccattatatcactgatttatttctgcaaattgaataaattcttaattttctgcatgcacataatacaaaaggtattttcatagttttggatttataccaaatgaaaaggattctcttgatgagcacctttaactgatttttctgttaaagttttaacaatttgttcttggaagtcagttcgtgaaggcaagtttgtcagtattttcacaaaactattcagctgaatccagaaagtgaaacagcaagaatttgcattgtaaaattgtgttataaaattggactttgaaatttcaaaaataagaaaaattttcatgtgtatttatactaaataccgttttaggaaactaggatcagggtgtttctgttggcgttggcattaactagctggatgtaaatttgaaaagccactcaagcagcttcctagtctagaaagtcagaggtttagattagatttccgacatcccttccatttctgacctgtagttcttgtctggaattctgctttgttataaactattgttctaaggagtttgttgtgatagcacatagttcattttgtaaagattccctgcgtataaagtgatgccctacatatgtgattttgtattaaaagtatataggatcattattttattttgaaaaatttaaatacagaaaagtataaaatataagtaccatccgcccagaaataacatgtgttaatgttttgtcatatgtgctttatattttttgaaataaagtgaagtcaactagt

SEQ ID NO: 10957 - protein, 522 aa, Homo sapiens; identical to SEQ ID NO: 1008

SEQ ID NO: 10958 - DNA, 4991 bp, Homo sapiens
gcctctctccatcagacaccccaaggttccatccgaagcaggcggagcaccgaacgcaccccggggtggtcagggacccccatccgtgctgccccctaggagcccgcgcctctcctctgcgccccgcctctcgggccgcaacgtcgcgcggttcctttaacagcgcgctggcagggtgtgggaagcaggaccgcgtcctcccgccccctcccatccgagtttcaggtgaattggtcaccgagggaggaggccgacacaccacacctacactcccgcgtccacctctccctccctgcttcctctggcggaggcggcaggaaccgagagccaggtccagagcgccgaggagccggtctaggacgcagcagattggtttatcttggaagctaaagggcattgctcatcctgaagatcagctgaccattgacaatcagccatgtcatccaggcctcttgaaagtccacctccttacaggcctgatgaattcaaaccgaatcattatgcaccaagcaatgacatatatggtggagagatgcatgttcgaccaatgctctctcagccagcctactctttttacccagaagatgaaattcttcacttctacaaatggacctctcctccaggagtgattcggatcctgtctatgctcattattgtgatgtgcattgccatctttgcctgtgtggcctccacgcttgcctgggacagaggctatggaacttcccttttaggaggtagtgtaggctacccttatggaggaagtggctttggtagctacggaagtggctatggctatggctatggttatggctatggctacggaggctatacagacccaagagcagcaaagggcttcatgttggccatggctgccttttgtttcattgccgcgttggtgatctttgttaccagtgttataagatctgaaatgtccagaacaagaagatactacttaagtgtgataatagtgagtgctatcctgggcatcatggtgtttattgccacaattgtctatataatgggagtgaacccaactgctcagtcttctggatctctatatggttcacaaatatatgccctctgcaaccaattttatacacctgcagctactggactctacgtggatcagtatttgtatcactactgtgttgtggatccccaggaggccattgccattgtactggggttcatgattattgtggcttttgctttaataattttctttgctgtgaaaactcgaagaaagatggacaggtatgacaagtccaatattttgtgggacaaggaacacatttatgatgagcagccccccaatgtcgaggagtgggttaaaaatgtgtctgcaggcacacaggacgtgccttcacccccatctgactatgtggaaagagttgacagtcccatggcatactcttccaatggcaaagtgaatgacaagcggttttatccagagtcttcctataaatccacgccggttcctgaagtggttcaggagcttccattaacttcgcctgtggatgacttcaggcagcctcgttacagcagcggtggtaactttgagacaccttcaaaaagagcacctgcaaagggaagagcaggaaggtcaaagagaacagagcaagatcactatgagacagactacacaactggcggcgagtcctgtgatgagctggaggaggactggatcagggaatatccacctatcacttcagatcaacaaagacaactgtacaagaggaattttgacactggcctacaggaatacaagagcttacaatcagaacttgatgagatcaataaagaactctcccgtttggataaagaattggatgactatagagaagaaagtgaagagtacatggctgctgctgatgaatacaatagactgaagcaagtgaagggatctgcagattacaaaagtaagaagaatcattgcaagcagttaaagagcaaattgtcacacatcaagaagatggttggagactatgatagacagaaaacatagaaggctgatgccaagttgtttgagaaattaagtatctgacatctctgcaatcttctcagaaggcaaatgactttggaccataaccccggaagccaaacctctgtgagcatcacaaagttttggttgctttaacatcatcagtattgaagcattttataaatcgcttttgataatcaactgggctgaacactccaattaaggattttatgctttaaacattggttcttgtattaagaatgaaatactgtttgaggtttttaagccttaaaggaaggttctggtgtgaactaaactttcacaccccagacgatgtcttcatacctacatgtatttgtttgcataggtgatctcatttaatcctctcaaccacctttcagataactgttatttataatcacttttttccacataaggaaactgggttcctgcaatgaagtctctgaagtgaaactgcttgtttcctagcacacacttttggttaagtctgttttatgacttcattaataataaattccctggcctttcatattttagctactatatatgtgatgatctaccagcctccctattttttttctgttatataaatggttaaaagaggtttttcttaaataataaagatcatgtaaaagtaacaaatgtgtgaaatttaaagattgtaaatatatatttacttttttaagatcaaagtttaaaccccgtggttagaattttgtgtgtttttaaatactttttatctttttgcatgccttttttaaaaaaccaactagaacttttcattatatcagaatatctgattacatttataattcaattgtgacttgaactgtatcttacaggaatgttcaatttctatacatattttataaggtattaaacctggtgttttctttccataataacctgtttgatgttattagtgctgttaacatacagcaatggaaaaccacactcaggagttgtatctgttgttgtttatactcctttggatgctgtgctggttagtcgtttcccattcctttggctgtaagaatgctgatatgtctgggaatagaatgctataccacgaaataccaaataatttcaaatggtgcccttaaattgtatcacttttttaaaaattcagattcttattagtaaaattagttgatagcactgtgctgaccaagttgattgtgatcatcccagcttagacttttctaaaaacttttttttagaataatctataaactgaactttagtatgcatttcagatatttaggtatataatttttttttttttttgagacagagtctcactctcacccaggctggaatgcagtggtgctatcttggctcactgcaacctccacctcccgggttcaagcaattctcctgcctcagcctctcgagtagttgagactacaggtgcccatcaccatgcgtggctaatttttgtatttttaatagagacggggttttaccatagtggccaggttggtcttgaactcctgaccttgtggtctgcctgcctcggcctcccaaagtgctgggattacaggcgtgagccaccatgcctggcctaagtgtgtgtgtgtgtgtgtgtgtgtatttttttttttttttttttgagatggagttttgctcttgttgaacaggctggagtgcaatgtcgcgatctcagctcaccacaacctccgcctcccaggttcaaacaattctcctgcctcggcctcccgagtagctgggattacaggcatgcgccaccacacctggctaattttttttttgtatttttagtagagatggggtttctccatgttggtcaggctggtctcgaactcctgacctcaggtgatccatccacctcggcctcccaaagtgctgggattagaggcgtgagccactgtgcccggcctataatttttgatagatgattttgaattattttccagagataaaattttaaatgtttccattatatcactgatttatttctgcaaattgaataaattcttaattttctgcatgcacataatacaaaaggtattttcatagttttggatttataccaaatgaaaaggattctcttgatgagcacctttaactgatttttctgttaaagttttaacaatttgttcttggaagtcagttcgtgaaggcaagtttgtcagtattttcacaaaactattcagctgaatccagaaagtgaaacagcaagaatttgcattgtaaaattgtgttataaaattggactttgaaatttcaaaaataagaaaaattttcatgtgtatttatactaaataccgttttaggaaactaggatcagggtgtttctgttggcgttggcattaactagctggatgtaaatttgaaaagccactcaagcagcttcctagtctagaaagtcagaggtttagattagatttccgacatcccttccatttctgacctgtagttcttgtctggaattctgctttgttataaactattgttctaaggagtttgttgtgatagcacatagttcattttgtaaagattccctgcgtataaagtgatgccctacatatgtgattttgtattaaaagtatataggatcattattttattttgaaaaatttaaatacagaaaagtataaaatataagtaccatccgcccagaaataacatgtgttaatgttttgtcatatgtgctttatattttttgaaataaagtgaagtcaactagtatttatagtaaataagttacatacacataagtacatatatgatatttaatcctcacaacgatcttttgacatgtgaccatttcttattcttcttttatagacaaggaactaatgatatgatagattaactggctgttgtcacactagcaagtggcaaaacaagggattaggatcttagtctcttcaactgttagattctatacttccatcctgtgttgactttgttaatggattggataatgtgagatcactctgatgtaaataaagtatcctatatt

SEQ ID NO: 10959 - protein, 522 aa, Homo sapiens; identical to SEQ ID NO: 1008

SEQ ID NO: 10960 - DNA, 5289 bp, Homo sapiens
gcctctctccatcagacaccccaaggttccatccgaagcaggcggagcaccgaacgcaccccggggtggtcagggacccccatccgtgctgccccctaggagcccgcgcctctcctctgcgccccgcctctcgggccgcaacgtcgcgcggttcctttaacagcgcgctggcagggtgtgggaagcaggaccgcgtcctcccgccccctcccatccgagtttcaggtgaattggtcaccgagggaggaggccgacacaccacacctacactcccgcgtccacctctccctccctgcttcctctggcggaggcggcaggaaccgagagccaggtccagagcgccgaggagccggtctaggacgcagcagattggtttatcttggaagctaaagggcattgctcatcctgaagatcagctgaccattgacaatcagccatgtcatccaggcctcttgaaagtccacctccttacaggcctgatgaattcaaaccgaatcattatgcaccaagcaatgacatatatggtggagagatgcatgttcgaccaatgctctctcagccagcctactctttttacccagaagatgaaattcttcacttctacaaatggacctctcctccaggagtgattcggatcctgtctatgctcattattgtgatgtgcattgccatctttgcctgtgtggcctccacgcttgcctgggacagaggctatggaacttcccttttaggaggtagtgtaggctacccttatggaggaagtggctttggtagctacggaagtggctatggctatggctatggttatggctatggctacggaggctatacagacccaagagcagcaaagggcttcatgttggccatggctgccttttgtttcattgccgcgttggtgatctttgttaccagtgttataagatctgaaatgtccagaacaagaagatactacttaagtgtgataatagtgagtgctatcctgggcatcatggtgtttattgccacaattgtctatataatgggagtgaacccaactgctcagtcttctggatctctatatggttcacaaatatatgccctctgcaaccaattttatacacctgcagctactggactctacgtggatcagtatttgtatcactactgtgttgtggatccccaggaggccattgccattgtactggggttcatgattattgtggcttttgctttaataattttctttgctgtgaaaactcgaagaaagatggacaggtatgacaagtccaatattttgtgggacaaggaacacatttatgatgagcagccccccaatgtcgaggagtgggttaaaaatgtgtctgcaggcacacaggacgtgccttcacccccatctgactatgtggaaagagttgacagtcccatggcatactcttccaatggcaaagtgaatgacaagcggttttatccagagtcttcctataaatccacgccggttcctgaagtggttcaggagcttccattaacttcgcctgtggatgacttcaggcagcctcgttacagcagcggtggtaactttgagacaccttcaaaaagagcacctgcaaagggaagagcaggaaggtcaaagagaacagagcaagatcactatgagacagactacacaactggcggcgagtcctgtgatgagctggaggaggactggatcagggaatatccacctatcacttcagatcaacaaagacaactgtacaagaggaattttgacactggcctacaggaatacaagagcttacaatcagaacttgatgagatcaataaagaactctcccgtttggataaagaattggatgactatagagaagaaagtgaagagtacatggctgctgctgatgaatacaatagactgaagcaagtgaagggatctgcagattacaaaagtaagaagaatcattgcaagcagttaaagagcaaattgtcacacatcaagaagatggttggagactatgatagacagaaaacatagaaggctgatgccaagttgtttgagaaattaagtatctgacatctctgcaatcttctcagaaggcaaatgactttggaccataaccccggaagccaaacctctgtgagcatcacaaagttttggttgctttaacatcatcagtattgaagcattttataaatcgcttttgataatcaactgggctgaacactccaattaaggattttatgctttaaacattggttcttgtattaagaatgaaatactgtttgaggtttttaagccttaaaggaaggttctggtgtgaactaaactttcacaccccagacgatgtcttcatacctacatgtatttgtttgcataggtgatctcatttaatcctctcaaccacctttcagataactgttatttataatcacttttttccacataaggaaactgggttcctgcaatgaagtctctgaagtgaaactgcttgtttcctagcacacacttttggttaagtctgttttatgacttcattaataataaattccctggcctttcatattttagctactatatatgtgatgatctaccagcctccctattttttttctgttatataaatggttaaaagaggtttttcttaaataataaagatcatgtaaaagtaacaaatgtgtgaaatttaaagattgtaaatatatatttacttttttaagatcaaagtttaaaccccgtggttagaattttgtgtgtttttaaatactttttatctttttgcatgccttttttaaaaaaccaactagaacttttcattatatcagaatatctgattacatttataattcaattgtgacttgaactgtatcttacaggaatgttcaatttctatacatattttataaggtattaaacctggtgttttctttccataataacctgtttgatgttattagtgctgttaacatacagcaatggaaaaccacactcaggagttgtatctgttgttgtttatactcctttggatgctgtgctggttagtcgtttcccattcctttggctgtaagaatgctgatatgtctgggaatagaatgctataccacgaaataccaaataatttcaaatggtgcccttaaattgtatcacttttttaaaaattcagattcttattagtaaaattagttgatagcactgtgctgaccaagttgattgtgatcatcccagcttagacttttctaaaaacttttttttagaataatctataaactgaactttagtatgcatttcagatatttaggtatataatttttttttttttttgagacagagtctcactctcacccaggctggaatgcagtggtgctatcttggctcactgcaacctccacctcccgggttcaagcaattctcctgcctcagcctctcgagtagttgagactacaggtgcccatcaccatgcgtggctaatttttgtatttttaatagagacggggttttaccatagtggccaggttggtcttgaactcctgaccttgtggtctgcctgcctcggcctcccaaagtgctgggattacaggcgtgagccaccatgcctggcctaagtgtgtgtgtgtgtgtgtgtgtgtatttttttttttttttttttgagatggagttttgctcttgttgaacaggctggagtgcaatgtcgcgatctcagctcaccacaacctccgcctcccaggttcaaacaattctcctgcctcggcctcccgagtagctgggattacaggcatgcgccaccacacctggctaattttttttttgtatttttagtagagatggggtttctccatgttggtcaggctggtctcgaactcctgacctcaggtgatccatccacctcggcctcccaaagtgctgggattagaggcgtgagccactgtgcccggcctataatttttgatagatgattttgaattattttccagagataaaattttaaatgtttccattatatcactgatttatttctgcaaattgaataaattcttaattttctgcatgcacataatacaaaaggtattttcatagttttggatttataccaaatgaaaaggattctcttgatgagcacctttaactgatttttctgttaaagttttaacaatttgttcttggaagtcagttcgtgaaggcaagtttgtcagtattttcacaaaactattcagctgaatccagaaagtgaaacagcaagaatttgcattgtaaaattgtgttataaaattggactttgaaatttcaaaaataagaaaaattttcatgtgtatttatactaaataccgttttaggaaactaggatcagggtgtttctgttggcgttggcattaactagctggatgtaaatttgaaaagccactcaagcagcttcctagtctagaaagtcagaggtttagattagatttccgacatcccttccatttctgacctgtagttcttgtctggaattctgctttgttataaactattgttctaaggagtttgttgtgatagcacatagttcattttgtaaagattccctgcgtataaagtgatgccctacatatgtgattttgtattaaaagtatataggatcattattttattttgaaaaatttaaatacagaaaagtataaaatataagtaccatccgcccagaaataacatgtgttaatgttttgtcatatgtgctttatattttttgaaataaagtgaagtcaactagtatttatagtaaataagttacatacacataagtacatatatgatatttaatcctcacaacgatcttttgacatgtgaccatttcttattcttcttttatagacaaggaactaatgatatgatagattaactggctgttgtcacactagcaagtggcaaaacaagggattaggatcttagtctcttcaactgttagattctatacttccatcctgtgttgactttgttaatggattggataatgtgagatcactctgatgtaaataaagtatcctatattaatttcgagtgcattttaagtacttgtaacataaatgcttcctgtgaaatatctgtaaagacctgaatgggtacatgtgtgtaaagaagaatcagggcagaaaagtgcttttatcatggctccggggaccttagcttcagttggtgttgtgagaattcctcacacaaggacattctccttgcttcagcatcaggatggaagtgtttctcatctggactttttcaaagactcagctggaggaatcagaattcataatttcctggcagctcatgattctgctacactacaccatgccatc

SEQ ID NO: 10961 - protein, 522 aa, Homo sapiens; identical to SEQ ID NO: 1008

SEQ ID NO: 10962 - DNA, 2381 bp, Homo sapiens
agtccccggctgagcgctggcggtcggtgcggcgtcaggtgcgcccgccaggtgagcgcgctccctggcaccgttggcccccggagggtcgggcccagttgcggcgagcggattggtttatcttggaagctaaagggcattgctcatcctgaagatcagctgaccattgacaatcagccatgtcatccaggcctcttgaaagtccacctccttacaggcctgatgaattcaaaccgaatcattatgcaccaagcaatgacatatatggtggagagatgcatgttcgaccaatgctctctcagccagcctactctttttacccagaagatgaaattcttcacttctacaaatggacctctcctccaggagtgattcggatcctgtctatgctcattattgtgatgtgcattgccatctttgcctgtgtggcctccacgcttgcctgggacagaggctatggaacttcccttttaggaggtagtgtaggctacccttatggaggaagtggctttggtagctacggaagtggctatggctatggctatggttatggctatggctacggaggctatacagacccaagagcagcaaagggcttcatgttggccatggctgccttttgtttcattgccgcgttggtgatctttgttaccagtgttataagatctgaaatgtccagaacaagaagatactacttaagtgtgataatagtgagtgctatcctgggcatcatggtgtttattgccacaattgtctatataatgggagtgaacccaactgctcagtcttctggatctctatatggttcacaaatatatgccctctgcaaccaattttatacacctgcagctactggactctacgtggatcagtatttgtatcactactgtgttgtggatccccaggaggccattgccattgtactggggttcatgattattgtggcttttgctttaataattttctttgctgtgaaaactcgaagaaagatggacaggtatgacaagtccaatattttgtgggacaaggaacacatttatgatgagcagccccccaatgtcgaggagtgggttaaaaatgtgtctgcaggcacacaggacgtgccttcacccccatctgactatgtggaaagagttgacagtcccatggcatactcttccaatggcaaagtgaatgacaagcggttttatccagagtcttcctataaatccacgccggttcctgaagtggttcaggagcttccattaacttcgcctgtggatgacttcaggcagcctcgttacagcagcggtggtaactttgagacaccttcaaaaagagcacctgcaaagggaagagcaggaaggtcaaagagaacagagcaagatcactatgagacagactacacaactggcggcgagtcctgtgatgagctggaggaggactggatcagggaatatccacctatcacttcagatcaacaaagacaactgtacaagaggaattttgacactggcctacaggaatacaagagcttacaatcagaacttgatgagatcaataaagaactctcccgtttggataaagaattggatgactatagagaagaaagtgaagagtacatggctgctgctgatgaatacaatagactgaagcaagtgaagggatctgcagattacaaaagtaagaagaatcattgcaagcagttaaagagcaaattgtcacacatcaagaagatggttggagactatgatagacagaaaacatagaaggctgatgccaagttgtttgagaaattaagtatctgacatctctgcaatcttctcagaaggcaaatgactttggaccataaccccggaagccaaacctctgtgagcatcacaaagttttggttgctttaacatcatcagtattgaagcattttataaatcgcttttgataatcaactgggctgaacactccaattaaggattttatgctttaaacattggttcttgtattaagaatgaaatactgtttgaggtttttaagccttaaaggaaggttctggtgtgaactaaactttcacaccccagacgatgtcttcatacctacatgtatttgtttgcataggtgatctcatttaatcctctcaaccacctttcagataactgttatttataatcacttttttccacataaggaaactgggttcctgcaatgaagtctctgaagtgaaactgcttgtttcctagcacacacttttggttaagtctgttttatgacttcattaataataaattccctggcctttcatattttagctactatatatgtgatgatctaccagcctccctattttttttctgttatataaatggttaaaagaggtttttcttaaataataaagatcatgtaaaagt

SEQ ID NO: 10963 - protein, 522 aa, Homo sapiens; identical to SEQ ID NO: 1008

SEQ ID NO: 10964 - DNA, 1325 bp, Homo sapiens
cagaaaacgaggcatctgctcagtgttgaacatctgaagtcctcgcgtgagtgcacctgcgtgcagatgtctgctggtgtttattatggctgtgctctgtgattacagtgcactggcaaagggctgtagtgtactgaacaatgatgcctgtttttattagggttcctgaagtggttcaggagcttccattaacttcgcctgtggatgacttcaggcagcctcgttacagcagcggtggtaactttgagacaccttcaaaaagagcacctgcaaagggaagagcaggaaggtcaaagagaacagagcaagatcactatgagacagactacacaactggcggcgagtcctgtgatgagctggaggaggactggatcagggaatatccacctatcacttcagatcaacaaagacaactgtacaagaggaattttgacactggcctacaggaatacaagagcttacaatcagaacttgatgagatcaataaagaactctcccgtttggataaagaattggatgactatagagaagaaagtgaagagtacatggctgctgctgatgaatacaatagactgaagcaagtgaagggatctgcagattacaaaagtaagaagaatcattgcaagcagttaaagagcaaattgtcacacatcaagaagatggttggagactatgatagacagaaaacatagaaggctgatgccaagttgtttgagaaattaagtatctgacatctctgcaatcttctcagaaggcaaatgactttggaccataaccccggaagccaaacctctgtgagcatcacaaagttttggttgctttaacatcatcagtattgaagcattttataaatcgcttttgataatcaactgggctgaacactccaattaaggattttatgctttaaacattggttcttgtattaagaatgaaatactgtttgaggtttttaagccttaaaggaaggttctggtgtgaactaaactttcacaccccagacgatgtcttcatacctacatgtatttgtttgcataggtgatctcatttaatcctctcaaccacctttcagataactgttatttataatcacttttttccacataaggaaactgggttcctgcaatgaagtctctgaagtgaaactgcttgtttcctagcacacacttttggttaagtctgttttatgacttcattaataataaattccctggcctttcatattttagctactatatatgtgatgatctaccagcctccctattttttttctgttatataaatggttaaaagaggtttttcttaaataataaagatcatgtaaaagt

SEQ ID NO: 10965 - protein, 183 aa, Homo sapiens
MMPVFIRVPEVVQELPLTSPVDDFRQPRYSSGGNFETPSKRAPAKGRAGRSKRTEQDHYETDYTTGGESCDELEEDWIREYPPITSDQQRQLYKRNFDTGLQEYKSLQSELDEINKELSRLDKELDDYREESEEYMAAADEYNRLKQVKGSADYKSKKNHCKQLKSKLSHIKKMVGDYDRQKT

SEQ ID NO: 10966 - DNA, 3400 bp, Homo sapiens
cagaaaacgaggcatctgctcagtgttgaacatctgaagtcctcgcgtgagtgcacctgcgtgcagatgtctgctggtgtttattatggctgtgctctgtgattacagtgcactggcaaagggctgtagtgtactgaacaatgatgcctgtttttattagggttcctgaagtggttcaggagcttccattaacttcgcctgtggatgacttcaggcagcctcgttacagcagcggtggtaactttgagacaccttcaaaaagagcacctgcaaagggaagagcaggaaggtcaaagagaacagagcaagatcactatgagacagactacacaactggcggcgagtcctgtgatgagctggaggaggactggatcagggaatatccacctatcacttcagatcaacaaagacaactgtacaagaggaattttgacactggcctacaggaatacaagagcttacaatcagaacttgatgagatcaataaagaactctcccgtttggataaagaattggatgactatagagaagaaagtgaagagtacatggctgctgctgatgaatacaatagactgaagcaagtgaagggatctgcagattacaaaagtaagaagaatcattgcaagcagttaaagagcaaattgtcacacatcaagaagatggttggagactatgatagacagaaaacatagaaggctgatgccaagttgtttgagaaattaagtatctgacatctctgcaatcttctcagaaggcaaatgactttggaccataaccccggaagccaaacctctgtgagcatcacaaagttttggttgctttaacatcatcagtattgaagcattttataaatcgcttttgataatcaactgggctgaacactccaattaaggattttatgctttaaacattggttcttgtattaagaatgaaatactgtttgaggtttttaagccttaaaggaaggttctggtgtgaactaaactttcacaccccagacgatgtcttcatacctacatgtatttgtttgcataggtgatctcatttaatcctctcaaccacctttcagataactgttatttataatcacttttttccacataaggaaactgggttcctgcaatgaagtctctgaagtgaaactgcttgtttcctagcacacacttttggttaagtctgttttatgacttcattaataataaattccctggcctttcatattttagctactatatatgtgatgatctaccagcctccctattttttttctgttatataaatggttaaaagaggtttttcttaaataataaagatcatgtaaaagtaacaaatgtgtgaaatttaaagattgtaaatatatatttacttttttaagatcaaagtttaaaccccgtggttagaattttgtgtgtttttaaatactttttatctttttgcatgccttttttaaaaaaccaactagaacttttcattatatcagaatatctgattacatttataattcaattgtgacttgaactgtatcttacaggaatgttcaatttctatacatattttataaggtattaaacctggtgttttctttccataataacctgtttgatgttattagtgctgttaacatacagcaatggaaaaccacactcaggagttgtatctgttgttgtttatactcctttggatgctgtgctggttagtcgtttcccattcctttggctgtaagaatgctgatatgtctgggaatagaatgctataccacgaaataccaaataatttcaaatggtgcccttaaattgtatcacttttttaaaaattcagattcttattagtaaaattagttgatagcactgtgctgaccaagttgattgtgatcatcccagcttagacttttctaaaaacttttttttagaataatctataaactgaactttagtatgcatttcagatatttaggtatataatttttttttttttttgagacagagtctcactctcacccaggctggaatgcagtggtgctatcttggctcactgcaacctccacctcccgggttcaagcaattctcctgcctcagcctctcgagtagttgagactacaggtgcccatcaccatgcgtggctaatttttgtatttttaatagagacggggttttaccatagtggccaggttggtcttgaactcctgaccttgtggtctgcctgcctcggcctcccaaagtgctgggattacaggcgtgagccaccatgcctggcctaagtgtgtgtgtgtgtgtgtgtgtgtatttttttttttttttttttgagatggagttttgctcttgttgaacaggctggagtgcaatgtcgcgatctcagctcaccacaacctccgcctcccaggttcaaacaattctcctgcctcggcctcccgagtagctgggattacaggcatgcgccaccacacctggctaattttttttttgtatttttagtagagatggggtttctccatgttggtcaggctggtctcgaactcctgacctcaggtgatccatccacctcggcctcccaaagtgctgggattagaggcgtgagccactgtgcccggcctataatttttgatagatgattttgaattattttccagagataaaattttaaatgtttccattatatcactgatttatttctgcaaattgaataaattcttaattttctgcatgcacataatacaaaaggtattttcatagttttggatttataccaaatgaaaaggattctcttgatgagcacctttaactgatttttctgttaaagttttaacaatttgttcttggaagtcagttcgtgaaggcaagtttgtcagtattttcacaaaactattcagctgaatccagaaagtgaaacagcaagaatttgcattgtaaaattgtgttataaaattggactttgaaatttcaaaaataagaaaaattttcatgtgtatttatactaaataccgttttaggaaactaggatcagggtgtttctgttggcgttggcattaactagctggatgtaaatttgaaaagccactcaagcagcttcctagtctagaaagtcagaggtttagattagatttccgacatcccttccatttctgacctgtagttcttgtctggaattctgctttgttataaactattgttctaaggagtttgttgtgatagcacatagttcattttgtaaagattccctgcgtataaagtgatgccctacatatgtgattttgtattaaaagtatataggatcattattttattttgaaaaatttaaatacagaaaagtataaaatataagtaccatccgcccagaaataacatgtgttaatgttttgtcatatgtgctttatattttttgaaataaagtgaagtcaactagt

SEQ ID NO: 10967 - protein, 183 aa, Homo sapiens; identical to SEQ ID NO: 10965

SEQ ID NO: 10968 - DNA, 3678 bp, Homo sapiens
cagaaaacgaggcatctgctcagtgttgaacatctgaagtcctcgcgtgagtgcacctgcgtgcagatgtctgctggtgtttattatggctgtgctctgtgattacagtgcactggcaaagggctgtagtgtactgaacaatgatgcctgtttttattagggttcctgaagtggttcaggagcttccattaacttcgcctgtggatgacttcaggcagcctcgttacagcagcggtggtaactttgagacaccttcaaaaagagcacctgcaaagggaagagcaggaaggtcaaagagaacagagcaagatcactatgagacagactacacaactggcggcgagtcctgtgatgagctggaggaggactggatcagggaatatccacctatcacttcagatcaacaaagacaactgtacaagaggaattttgacactggcctacaggaatacaagagcttacaatcagaacttgatgagatcaataaagaactctcccgtttggataaagaattggatgactatagagaagaaagtgaagagtacatggctgctgctgatgaatacaatagactgaagcaagtgaagggatctgcagattacaaaagtaagaagaatcattgcaagcagttaaagagcaaattgtcacacatcaagaagatggttggagactatgatagacagaaaacatagaaggctgatgccaagttgtttgagaaattaagtatctgacatctctgcaatcttctcagaaggcaaatgactttggaccataaccccggaagccaaacctctgtgagcatcacaaagttttggttgctttaacatcatcagtattgaagcattttataaatcgcttttgataatcaactgggctgaacactccaattaaggattttatgctttaaacattggttcttgtattaagaatgaaatactgtttgaggtttttaagccttaaaggaaggttctggtgtgaactaaactttcacaccccagacgatgtcttcatacctacatgtatttgtttgcataggtgatctcatttaatcctctcaaccacctttcagataactgttatttataatcacttttttccacataaggaaactgggttcctgcaatgaagtctctgaagtgaaactgcttgtttcctagcacacacttttggttaagtctgttttatgacttcattaataataaattccctggcctttcatattttagctactatatatgtgatgatctaccagcctccctattttttttctgttatataaatggttaaaagaggtttttcttaaataataaagatcatgtaaaagtaacaaatgtgtgaaatttaaagattgtaaatatatatttacttttttaagatcaaagtttaaaccccgtggttagaattttgtgtgtttttaaatactttttatctttttgcatgccttttttaaaaaaccaactagaacttttcattatatcagaatatctgattacatttataattcaattgtgacttgaactgtatcttacaggaatgttcaatttctatacatattttataaggtattaaacctggtgttttctttccataataacctgtttgatgttattagtgctgttaacatacagcaatggaaaaccacactcaggagttgtatctgttgttgtttatactcctttggatgctgtgctggttagtcgtttcccattcctttggctgtaagaatgctgatatgtctgggaatagaatgctataccacgaaataccaaataatttcaaatggtgcccttaaattgtatcacttttttaaaaattcagattcttattagtaaaattagttgatagcactgtgctgaccaagttgattgtgatcatcccagcttagacttttctaaaaacttttttttagaataatctataaactgaactttagtatgcatttcagatatttaggtatataatttttttttttttttgagacagagtctcactctcacccaggctggaatgcagtggtgctatcttggctcactgcaacctccacctcccgggttcaagcaattctcctgcctcagcctctcgagtagttgagactacaggtgcccatcaccatgcgtggctaatttttgtatttttaatagagacggggttttaccatagtggccaggttggtcttgaactcctgaccttgtggtctgcctgcctcggcctcccaaagtgctgggattacaggcgtgagccaccatgcctggcctaagtgtgtgtgtgtgtgtgtgtgtgtatttttttttttttttttttgagatggagttttgctcttgttgaacaggctggagtgcaatgtcgcgatctcagctcaccacaacctccgcctcccaggttcaaacaattctcctgcctcggcctcccgagtagctgggattacaggcatgcgccaccacacctggctaattttttttttgtatttttagtagagatggggtttctccatgttggtcaggctggtctcgaactcctgacctcaggtgatccatccacctcggcctcccaaagtgctgggattagaggcgtgagccactgtgcccggcctataatttttgatagatgattttgaattattttccagagataaaattttaaatgtttccattatatcactgatttatttctgcaaattgaataaattcttaattttctgcatgcacataatacaaaaggtattttcatagttttggatttataccaaatgaaaaggattctcttgatgagcacctttaactgatttttctgttaaagttttaacaatttgttcttggaagtcagttcgtgaaggcaagtttgtcagtattttcacaaaactattcagctgaatccagaaagtgaaacagcaagaatttgcattgtaaaattgtgttataaaattggactttgaaatttcaaaaataagaaaaattttcatgtgtatttatactaaataccgttttaggaaactaggatcagggtgtttctgttggcgttggcattaactagctggatgtaaatttgaaaagccactcaagcagcttcctagtctagaaagtcagaggtttagattagatttccgacatcccttccatttctgacctgtagttcttgtctggaattctgctttgttataaactattgttctaaggagtttgttgtgatagcacatagttcattttgtaaagattccctgcgtataaagtgatgccctacatatgtgattttgtattaaaagtatataggatcattattttattttgaaaaatttaaatacagaaaagtataaaatataagtaccatccgcccagaaataacatgtgttaatgttttgtcatatgtgctttatattttttgaaataaagtgaagtcaactagtatttatagtaaataagttacatacacataagtacatatatgatatttaatcctcacaacgatcttttgacatgtgaccatttcttattcttcttttatagacaaggaactaatgatatgatagattaactggctgttgtcacactagcaagtggcaaaacaagggattaggatcttagtctcttcaactgttagattctatacttccatcctgtgttgactttgttaatggattggataatgtgagatcactctgatgtaaataaagtatcctatatt

SEQ ID NO: 10969 - protein, 183 aa, Homo sapiens; identical to SEQ ID NO: 10965

SEQ ID NO: 10970 - DNA, 3976 bp, Homo sapiens
cagaaaacgaggcatctgctcagtgttgaacatctgaagtcctcgcgtgagtgcacctgcgtgcagatgtctgctggtgtttattatggctgtgctctgtgattacagtgcactggcaaagggctgtagtgtactgaacaatgatgcctgtttttattagggttcctgaagtggttcaggagcttccattaacttcgcctgtggatgacttcaggcagcctcgttacagcagcggtggtaactttgagacaccttcaaaaagagcacctgcaaagggaagagcaggaaggtcaaagagaacagagcaagatcactatgagacagactacacaactggcggcgagtcctgtgatgagctggaggaggactggatcagggaatatccacctatcacttcagatcaacaaagacaactgtacaagaggaattttgacactggcctacaggaatacaagagcttacaatcagaacttgatgagatcaataaagaactctcccgtttggataaagaattggatgactatagagaagaaagtgaagagtacatggctgctgctgatgaatacaatagactgaagcaagtgaagggatctgcagattacaaaagtaagaagaatcattgcaagcagttaaagagcaaattgtcacacatcaagaagatggttggagactatgatagacagaaaacatagaaggctgatgccaagttgtttgagaaattaagtatctgacatctctgcaatcttctcagaaggcaaatgactttggaccataaccccggaagccaaacctctgtgagcatcacaaagttttggttgctttaacatcatcagtattgaagcattttataaatcgcttttgataatcaactgggctgaacactccaattaaggattttatgctttaaacattggttcttgtattaagaatgaaatactgtttgaggtttttaagccttaaaggaaggttctggtgtgaactaaactttcacaccccagacgatgtcttcatacctacatgtatttgtttgcataggtgatctcatttaatcctctcaaccacctttcagataactgttatttataatcacttttttccacataaggaaactgggttcctgcaatgaagtctctgaagtgaaactgcttgtttcctagcacacacttttggttaagtctgttttatgacttcattaataataaattccctggcctttcatattttagctactatatatgtgatgatctaccagcctccctattttttttctgttatataaatggttaaaagaggtttttcttaaataataaagatcatgtaaaagtaacaaatgtgtgaaatttaaagattgtaaatatatatttacttttttaagatcaaagtttaaaccccgtggttagaattttgtgtgtttttaaatactttttatctttttgcatgccttttttaaaaaaccaactagaacttttcattatatcagaatatctgattacatttataattcaattgtgacttgaactgtatcttacaggaatgttcaatttctatacatattttataaggtattaaacctggtgttttctttccataataacctgtttgatgttattagtgctgttaacatacagcaatggaaaaccacactcaggagttgtatctgttgttgtttatactcctttggatgctgtgctggttagtcgtttcccattcctttggctgtaagaatgctgatatgtctgggaatagaatgctataccacgaaataccaaataatttcaaatggtgcccttaaattgtatcacttttttaaaaattcagattcttattagtaaaattagttgatagcactgtgctgaccaagttgattgtgatcatcccagcttagacttttctaaaaacttttttttagaataatctataaactgaactttagtatgcatttcagatatttaggtatataatttttttttttttttgagacagagtctcactctcacccaggctggaatgcagtggtgctatcttggctcactgcaacctccacctcccgggttcaagcaattctcctgcctcagcctctcgagtagttgagactacaggtgcccatcaccatgcgtggctaatttttgtatttttaatagagacggggttttaccatagtggccaggttggtcttgaactcctgaccttgtggtctgcctgcctcggcctcccaaagtgctgggattacaggcgtgagccaccatgcctggcctaagtgtgtgtgtgtgtgtgtgtgtgtatttttttttttttttttttgagatggagttttgctcttgttgaacaggctggagtgcaatgtcgcgatctcagctcaccacaacctccgcctcccaggttcaaacaattctcctgcctcggcctcccgagtagctgggattacaggcatgcgccaccacacctggctaattttttttttgtatttttagtagagatggggtttctccatgttggtcaggctggtctcgaactcctgacctcaggtgatccatccacctcggcctcccaaagtgctgggattagaggcgtgagccactgtgcccggcctataatttttgatagatgattttgaattattttccagagataaaattttaaatgtttccattatatcactgatttatttctgcaaattgaataaattcttaattttctgcatgcacataatacaaaaggtattttcatagttttggatttataccaaatgaaaaggattctcttgatgagcacctttaactgatttttctgttaaagttttaacaatttgttcttggaagtcagttcgtgaaggcaagtttgtcagtattttcacaaaactattcagctgaatccagaaagtgaaacagcaagaatttgcattgtaaaattgtgttataaaattggactttgaaatttcaaaaataagaaaaattttcatgtgtatttatactaaataccgttttaggaaactaggatcagggtgtttctgttggcgttggcattaactagctggatgtaaatttgaaaagccactcaagcagcttcctagtctagaaagtcagaggtttagattagatttccgacatcccttccatttctgacctgtagttcttgtctggaattctgctttgttataaactattgttctaaggagtttgttgtgatagcacatagttcattttgtaaagattccctgcgtataaagtgatgccctacatatgtgattttgtattaaaagtatataggatcattattttattttgaaaaatttaaatacagaaaagtataaaatataagtaccatccgcccagaaataacatgtgttaatgttttgtcatatgtgctttatattttttgaaataaagtgaagtcaactagtatttatagtaaataagttacatacacataagtacatatatgatatttaatcctcacaacgatcttttgacatgtgaccatttcttattcttcttttatagacaaggaactaatgatatgatagattaactggctgttgtcacactagcaagtggcaaaacaagggattaggatcttagtctcttcaactgttagattctatacttccatcctgtgttgactttgttaatggattggataatgtgagatcactctgatgtaaataaagtatcctatattaatttcgagtgcattttaagtacttgtaacataaatgcttcctgtgaaatatctgtaaagacctgaatgggtacatgtgtgtaaagaagaatcagggcagaaaagtgcttttatcatggctccggggaccttagcttcagttggtgttgtgagaattcctcacacaaggacattctccttgcttcagcatcaggatggaagtgtttctcatctggactttttcaaagactcagctggaggaatcagaattcataatttcctggcagctcatgattctgctacactacaccatgccatc

SEQ ID NO: 10971 - protein, 183 aa, Homo sapiens; identical to SEQ ID NO: 10965

SEQ ID NO: 10972 - DNA, 1045 bp, Homo sapiens
tttcaaaaaatataaagcacatatgacaaaacattaacacatgttatttctgggcggatggtacttatattttatacttttctgtatttaaatttttcaaaataaaataatgatcctatatacttttaatacaaaatcacatatgtagggcatcactttatacgcagggaatctttacaaaatgaactatgtgctatcacaacaaactccttagaacaatagtttataacaaagcagaattccagacaagaactacaggtcagaaatggaagggatgtcggaaatctaatctaaacctctgactttctagactaggaagctgcttgagtggcttttcaaatttacatccagctagttaatgccaacgccaacagaaacaccctgatcctagtttcctaaaacggtatttagtataaatacacatgaaaatttttcttatttttgaaatttcaaagtccaattttataacacaattttacaatgcaaattcttgctgtttcactttctggattcagctgaatagttttgtgaaaatactgacaaacttgccttcacgaactgacttccaagaacaaattgttaaaactttaacagaaaaatcagttaaaggtgctcatcaagagaatccttttcatttggtataaatccaaaactatgaaaataccttttgtattatgtgcatgcagaaaattaagaatttattcaatttgcagaaataaatcagtgatataatggaaacatttaaaattttatctctggaaaataattcaaaatcatctatcaaaaattataggccgggcacagtggctcacgcctctaatcccagcactttgggaggccgaggtggatggatcacctgaggtcaggagttcgagaccagcctgaccaacatggagaaaccccatctctactaaaaataaaaaaaaaaaaaaaaaatacacacacacacacacacacacacttaggccaggcatggtggggtgatgggcacctgtagtctcaactactcgagaggctgaggcaggagaattgcttgaacccggga

SEQ ID NO: 10973 - protein, 49 aa, Homo sapiens [sequence omitted]

SEQ ID NO: 10974 - DNA, 633 bp, Homo sapiens
agtccttctagcggcgccggtgagtccgcgtgtggaagtctgtgaggcgcagaggtggggcaggccgtctgactagctaggcggctgggagcgttttcgtggcggggaacggaggttgaattgccctgcctgggctcatagggaaggaggatgtgaaggagcttgtgaaggcagaggaagattattgaataataaaatacagttttgaaaaaaatggatgaagaacctgaaagaactaagcgatgggaaggaggctatgaaagaacatgggagattcttaaagaagatgaatctggatcacttaaagctacaatagaagacattctattcaaggcaaagagaaaaagagtatttgagcaccatggacaagttcgacttggaatgatgcgccacctttatgtggtagtagatggatcaagaacaatggaagaccaagatttaaagcctaatagactgacgtgtactttaaagttgttggaatactttgtagaggaatattttgatcaaaatcctattagtcagattggaataattgtaactaagagtaaaagagctgaaaaattgactgaactttcaggtgtttgattccagcatgtagtatacattgtatgtgttaaaaagaaatttgcaact

SEQ ID NO: 10975 - protein, 123 aa, Homo sapiens; identical to SEQ ID NO: 4536

SEQ ID NO: 10976 - DNA, 1734 bp, Homo sapiens
agtccttctagcggcgccggtgagtccgcgtgtggaagtctgtgaggcgcagaggtggggcaggccgtctgactagctaggcggctgggagcgttttcgtggcggggaacggaggttgaattgccctgcctgggctcatagggaaggaggatgtgaaggagcttgtgaaggcagaggaagattattgaataataaaatacagttttgaaaaaaatggatgaagaacctgaaagaactaagcgatgggaaggaggctatgaaagaacatgggagattcttaaagaagatgaatctggatcacttaaagctacaatagaagacattctattcaaggcaaagagaaaaagagtatttgagcaccatggacaagttcgacttggaatgatgcgccacctttatgtggtagtagatggatcaagaacaatggaagaccaagatttaaagcctaatagactgacgtgtactttaaagttgttggaatactttgtagaggaatattttgatcaaaatcctattagtcagattggaataattgtaactaagagtaaaagagctgaaaaattgactgaactttcaggaaacccaagaaaacatataacgtctttgaaggaagctgtggatatgacctgccatggagagccatctctttataattccctaagcatggctatgcagactctaaaacacatgcctggacatacaagtcgagaagtactaatcatctttagcagccttacaacttgcgatccatctaatatttatgatctaatcaagaccctaaaggcagctaaaattagagtatctgttattggattgtctgcagaagttcgcgtttgcactgtacttgctcgtgaaactggtggcacgtaccatgttattttagatgaaagccattacaaagagttgctcacacatcatcttagtcctcctcctgctagctcaagttctgaatgctcacttattcgtatgggatttcctcagcacaccattgcttctttatctgaccaggatgcaaaaccctctttcagcatggcgcatttggatggcaatactgagccagggcttacattaggaggctatttctgcccacagtgtcgggcaaagtactgtgagctacctgttgaatgtaaaatctgtggtcttactttggtgtctgctccccacttggcacggtcttaccatcatttgtttcctttggatgcttttcaagaaattcccctagaagaatataatggagaaagattttgttatggatgtcagggggaattgaaagaccaacatgtttatgtttgtgctgtgtgccaaaatgttttctgtgtggactgtgatgtttttgttcatgattctctacactgttgccctggctgtattcataagattccagctccttcaggtgtttgattccagcatgtagtatacattgtatgtgttaaaaagaaatttgcaactgtgaataaaaggacttctttagaagaagcttcatttaaaacatgaaaggataatctgacttaagaaactttttgctaagaaaaggtaatattttattaaattttaaatttgtgttgtcacagaaatacctgaaattcagtagtacttcattcaattaattttgttttctattattttgagttatactgttttcaaagtcattatgcagtatgtataaacttataagaattaaattgatgtgataattttatgtttttataattaaatatagaatctttatgattt

SEQ ID NO: 10977 - protein, 395 aa, Homo sapiens; identical to SEQ ID NO: 4522

SEQ ID NO: 10978 - DNA, 1821 bp, Homo sapiens
cggcgccggtgagtccgcgtgtggaagtctgtgaggcgcagaggtggggcaggccgtctgactagctaggcggctgggagcgttttcgtggcggggaacggaggttgaattgccctgcctgggctcatagggaaggaggatgtgaaggagcttgtgaaggcagaggaaggctggagtgcagtggcacaaccttggctcgctccagtgtctacctcccaggttcaagtgattctcctgcctcagcctcccgagtagctgggattacagattattgaataataaaatacagttttgaaaaaaatggatgaagaacctgaaagaactaagcgatgggaaggaggctatgaaagaacatgggagattcttaaagaagatgaatctggatcacttaaagctacaatagaagacattctattcaaggcaaagagaaaaagagtatttgagcaccatggacaagttcgacttggaatgatgcgccacctttatgtggtagtagatggatcaagaacaatggaagaccaagatttaaagcctaatagactgacgtgtactttaaagttgttggaatactttgtagaggaatattttgatcaaaatcctattagtcagattggaataattgtaactaagagtaaaagagctgaaaaattgactgaactttcaggaaacccaagaaaacatataacgtctttgaaggaagctgtggatatgacctgccatggagagccatctctttataattccctaagcatggctatgcagactctaaaacacatgcctggacatacaagtcgagaagtactaatcatctttagcagccttacaacttgcgatccatctaatatttatgatctaatcaagaccctaaaggcagctaaaattagagtatctgttattggattgtctgcagaagttcgcgtttgcactgtacttgctcgtgaaactggtggcacgtaccatgttattttagatgaaagccattacaaagagttgctcacacatcatcttagtcctcctcctgctagctcaagttctgaatgctcacttattcgtatgggatttcctcagcacaccattgcttctttatctgaccaggatgcaaaaccctctttcagcatggcgcatttggatggcaatactgagccagggcttacattaggaggctatttctgcccacagtgtcgggcaaagtactgtgagctacctgttgaatgtaaaatctgtggtcttactttggtgtctgctccccacttggcacggtcttaccatcatttgtttcctttggatgcttttcaagaaattcccctagaagaatataatggagaaagattttgttatggatgtcagggggaattgaaagaccaacatgtttatgtttgtgctgtgtgccaaaatgttttctgtgtggactgtgatgtttttgttcatgattctctacactgttgccctggctgtattcataagattccagctccttcaggtgtttgattccagcatgtagtatacattgtatgtgttaaaaagaaatttgcaactgtgaataaaaggacttctttagaagaagcttcatttaaaacatgaaaggataatctgacttaagaaactttttgctaagaaaaggtaatattttattaaattttaaatttgtgttgtcacagaaatacctgaaattcagtagtacttcattcaattaattttgttttctattattttgagttatactgttttcaaagtcattatgcagtatgtataaacttataagaattaaattgatgtgataattttatgtttttataattaaatatagaatctttatgattt

SEQ ID NO: 10979 - protein, 395 aa, Homo sapiens; identical to SEQ ID NO: 4522

SEQ ID NO: 10980 - DNA, 554 bp, Homo sapiens
ggctggagtgcagtggcacaaccttggctcgctccagtgtctacctcccaggttcaagtgattctcctgcctcagcctcccgagtagctgggattacagattattgaataataaaatacagttttgaaaaaaatggatgaagaacctgaaagaactaagcgatgggaaggaggctatgaaagaacatgggagattcttaaagaagatgaatctggatcacttaaagctacaatagaagacattctattcaaggcaaagagaaaaagagtatttgagcaccatggacaagttcgacttggaatgatgcgccacctttatgtggtagtagatggatcaagaacaatggaagaccaagatttaaagcctaatagactgacgtgtactttaaagttgttggaatactttgtagaggaatattttgatcaaaatcctattagtcaggtacgtatctaagtgatagaattcagaattagattcctattttgcttccaaatgtaatttatttttaaaaattggacatgtattttgtgaattacccaaattgtttaaccagt

SEQ ID NO: 10981 - protein, 106 aa, Homo sapiens
MDEEPERTKRWEGGYERTWEILKEDESGSLKATIEDILFKAKRKRVFEHHGQVRLGMMRHLYVVVDGSRTMEDQDLKPNRLTCTLKLLEYFVEEYFDQNPISQVRI

SEQ ID NO: 10982 - DNA, 1128 bp, Homo sapiens
gaggtctttttaggtttaaccaaacatctggaatatgtttatcaagttagtacatctgaaattatttgtggctatgaccaacagaagtcactttacattaaacattcaaactcacaagactgccatggccatacttggtacccgcttactcagaaggatattaaacagaaacaacagcctgccagcacagcatcaagcagtcctcattagcagtggaagtccttgtagcagtccactagtacaatttgggtgcaaggagataagatcctccacaggcatcaaggaaccaatatctcttaacaattccataaacacagcttccagttccttaaatattttctcactgcttcctactaaaggacggacagagcatttgttcttcagccacatactttccttccactggccagcattctcctctattagactagaactgtggataaacctcagatgtgaatttcttcggagtaagaaatcctcagaggaaattacccagtatattcaaagctacaagggatttgttgacataacgggagaacattttgtgaattcctgggtccagagagaattacctatggcatcagcttattgcaatgacagcatctttgcttacgaagaactacggctggactcttttaaggactggccccgggaatcagctgtgggagttgcagcactggccaaagcaggtcttttctacacaggtataaaggacatcgtccagtgcttttcctgtggagggtgtttagagaaatggcaggaaggtgatgacccattagacgatcacaccagatgttttcccaagtgagtggaatgaatgttaaccatctgcaactttggatgcacttcaacagtttttttctttttcctcatttcctgccttattttatctttagattgagtctttatccactcctcggattcaggctatgaaggatgagtcttcatgtctttcatccctttgctccatgacccccttcctgtactagccttcccctctttatagttatggcatagttttggctagattcatatattcacattacatgtttacattatcatgactatacaaatgctatgtggagctgaagcttgtggtaaatttttatttatttttcccttcctgta

SEQ ID NO: 10983 - protein, 257 aa, Homo sapiens [sequence omitted]

SEQ ID NO: 10984 - DNA, 803 bp, Homo sapiens
aaaaaattagccgggtgtggtggcacatgcctgtactactcgggaggctgaggcaggagaatcacttgaacccaggaggcggaggttgcagtgagacgagaacctgccactgcacttcagcctgggcaacagagtgagactctgcctcaaaaaaaaaaaaaaaaaaaaagtcagataatcaacaacttgaattttaatttccctcagggagaacattttgtgaattcctgggtccagagagaattacctatggcatcagcttattgcaatgacagcatctttgcttacgaagaactacggctggactcttttaaggactggccccgggaatcagctgtgggagttgcagcactggccaaagcaggtcttttctacacaggtataaaggacatcgtccagtgcttttcctgtggagggtgtttagagaaatggcaggaaggtgatgacccattagacgatcacaccagatgttttcccaagtgagtggaatgaatgttaaccatctgcaactttggatgcacttcaacagtttttttctttttcctcatttcctgccttattttatctttagattgagtctttatccactcctcggattcaggctatgaaggatgagtcttcatgtctttcatccctttgctccatgacccccttcctgtactagccttcccctctttatagttatggcatagttttggctagattcatatattcacattacatgtttacattatcatgactatacaaatgctatgtggagctgaagcttgtggtaaatttttatttatttttcccttcctgta

SEQ ID NO: 10985 - protein, 77 aa, Homo sapiens
MASAYCNDSIFAYEELRLDSFKDWPRESAVGVAALAKAGLFYTGIKDIVQCFSCGGCLEKWQEGDDPLDDHTRCFPK

SEQ ID NO: 10986 - DNA, 2092 bp, Homo sapiens
acttccgggtgggcgcgggctcggcgcgccccgcactgttgagcggtcggctggcgccgccggccctgggcagtgagaggcttagcacccgggccagcagctgcggagggtgcactgggtcctccaacagtgatggcccgccggcgccgcgctcgaattttcgctgggcctcagccacctccccgcggggcaagggggcagggctcgggacctgcagcctgccatgctggagccctcaccctcctccccgcccccgtcccctgccccccgccccccgccccccgccccccaaccgcaggctcccgcgcgccaccccgaggggacgggcgccacctcctgctacgcggcacccggtcccgtcaaccgcccaacggctgaggagtgcggcagcgcgccagagactggcgggcagctccgcccgcggccgggatgcactaggcaaagccagctgggctcctgagtccggtgggtacttggagaacttactacgtctagctggaggattgtaaatgcaccaatcagcatgctgtgtctagctcaagaactcaagctccatgaggagatgtttcattgtcgagagcagtcatgatggcctgcactccacacaatgcaacagagtgaaagagcaggttctgcttctttggtgtagtcctgaagcttcctaagaaacttcacatcaggtgatggataggagcaaccctgtaaaaccagccttagactatttttcaaacaggctggtgaattaccagatctccgtcaagtgcagtaaccagttcaagttggaagtgtgtcttttgaatgcagaaaacaaagtcgtggacaaccaggctgggacccagggccagctgaaggtgctgggtgccaacctctggtggccgtacctgatgcacgaacaccccgcctacctgtactcgtgggaggatggtgattgctcacaccaaagccttggacccctcccagcctgtgacctttgtgaccaactccacctacgcagcagacaagggggctctgtatgtggatgtgatccgtgtgaacagctactactcttggtatcgcaactacgggcacctggagttgattcagctgcagctggccgcccagtttgagaattggtgtaagacatcacaatcccattattcagagcgcgtatggagtggaaacgcttgtagggcttcaccagggctcacacctgtaatcccagcactttgggaggctgaggcaggaggatcacttgaggtcaggagttcaagaccagcctggccaacatggtgaaaccccgtctctactaaaagtacaaaaaattagccaggcatggtggggaggtacctgtaatcccagctacttgggaggctgaggcaggagaatcgcttgaacccgggaggcggaggttgcagtgagccgagatcacgccactgcactccagcctgggtgacagagtgagactccatctcaaaaacaaaaaaaaaaaaattaagcagatggctataatttttttaaaaatagaaaagtgttgatgagaaatgggaaacctcatacattgttggtcaaactgtatgcttccatttagaggaaatagtcagaacaaataaatccatagacaccaattaggttggtgtatcccaggggctgggcatggagtggggtggagagagaaggagggcctgcttagtggatacagagttttctttgggggcgatgaaagtgttttggaactagatagagggggtggttgcacaacattgttgttggtgggaatttaaaatggtgcaagcactgtggaaaaaacagtttagcatttcctcaaaaagttaaaacaggccaggcgctgtggctcacgcttgtaattccagcactttgggaggccaagccaggtggatcacttgaggtcaggagtttgagaccagcctagccaacatggtgaaaccctaaaaatacaaaaaattagccgggcatggtggcagacacctgtaatcccagctactcaggagactgaggcaggaaaattgcttgaacctgggaggcggaggttgcagtgagctgagatcgcaccgctgcactccagcctgagtgacagagtgagactctgtgtgag

SEQ ID NO: 10987 - protein, 140 aa, Homo sapiens
MDRSNPVKPALDYFSNRLVNYQISVKCSNQFKLEVCLLNAENKVVDNQAGTQGQLKVLGANLWWPYLMHEHPAYLYSWEDGDCSHQSLGPLPACDLCDQLHLRSRQGGSVCGCDPCEQLLLLVSQLRAPGVDSAAAGRPV

SEQ ID NO: 10988 - DNA, 1342 bp, Homo sapiens
ctccgcccgcggccgggatgcactaggcaaagccagctgggctcctgagtccggtgggtacttggagaacttactacgtctagctggaggattgtaaatgcaccaatcagcatgctgtgtctagctcaagattttctccatccccttattttgggccagtggctgtcattacatatgagaactcaagctccatgaggagatgtttcattgtcgagagcagtcatgatggcctgcactccacacaatgcaacagagtgaaagagcaggttctgcttctttggtgtagtcctgaagcttcctaagaaacttcacatcaggtgatggataggagcaaccctgtaaaaccagccttagactatttttcaaacaggctggtgaattaccagatctccgtcaagtgcagtaaccagttcaagttggaagtgtgtcttttgaatgcagaaaacaaagtcgtggacaaccaggctgggacccagggccagctgaaggtgctgggtgccaacctctggtggccgtacctgatgcacgaacaccccgcctacctgtactcgtgggaggatggtgattgctcacaccaaagccttggacccctcccagcctgtgacctttgtgaccaactccacctacgcagcagacaagggggctctgtatgtggatgtgatccgtgtgaacagctactactcttggtatcgcaactacgggcacctggagttgattcagctgcagctggccgcccagtttgagaattggtgtaagacatcacaatcccattattcagagcgcgtatggagtggaaacgcttgtagggcttcaccagtctttcccagggaactccgatgaagtgttccaacaaaatgagcgagtgaaccaagaagaggatgacattagatccaggagatacaacagaggagataatctccaggatgcctgtgaagaaagatccctggatcccaggatgattataggacaagttgttcataatccagcaggccagaagacttccagggaaactcattcaaggaggtgaaaatgatggatgactcctccaagatgaaaatggaccagccgcagtggctcacgcctgtaataccagcactttgggaggctgaggcaggcggatcacttgaggtcaggagtttgaaactagcctggccaacgtggcaaaactccatctctattaaaaatacaaaaattagccaagcatagtggtgcatgcctgtagtcccagctacttgggatgctgaggcaggaagaattgcttgaacctgggaggcagagtctacagtgagccgagatcatgccactgcactccagcctgggcaacacagtgagactccatctc

SEQ ID NO: 10989 - protein, 140 aa, Homo sapiens; identical to SEQ ID NO: 10987

SEQ ID NO: 10990 - DNA, 1312 bp, Homo sapiens
cggctgaggagtgcggcagcgcgccagagactggcgggcagctccgcccgcggccgggatgcactaggcaaagccagctgggctcctgagtccggtgggtacttggagaacttactacgtctagctggaggattgtaaatgcaccaatcagcatgctgtgtctagctcaagaactcaagctccatgaggagatgtttcattgtcgagagcagtcatgatggcctgcactccacacaatgcaacagagtgaaagagcaggttctgcttctttggtgtagtcctgaagcttcctaagaaacttcacatcaggtgatggataggagcaaccctgtaaaaccagccttagactatttttcaaacaggctggtgaattaccagatctccgtcaagtgcagtaaccagttcaagttggaagtgtgtcttttgaatgcagaaaacaaagtcgtggacaaccaggctgggacccagggccagctgaaggtgctgggtgccaacctctggtggccgtacctgatgcacgaacaccccgcctacctgtactcgtgggaggatggtgattgctcacaccaaagccttggacccctcccagcctgtgacctttgtgaccaactccacctacgcagcagacaagggggctctgtatgtggatgtgatccgtgtgaacagctactactcttggtatcgcaactacgggcacctggagttgattcagctgcagctggccgcccagtttgagaattggtgtaagacatcacaatcccattattcagagcgcgtatggagtggaaacgcttgtagggcttcaccagtctttcccagggaactccgatgaagtgttccaacaaaatgagcgagtgaaccaagaagaggatgacattagatccaggagatacaacagaggagataatctccaggatgcctgtgaagaaagatccctggatcccaggatgattataggacaagttgttcataatccagcaggccagaagacttccagggaaactcattcaaggaggtgaaaatgatggatgactcctccaagatgaaaatggaccagccgcagtggctcacgcctgtaataccagcactttgggaggctgaggcaggcggatcacttgaggtcaggagtttgaaactagcctggccaacgtggcaaaactccatctctattaaaaatacaaaaattagccaagcatagtggtgcatgcctgtagtcccagctacttgggatgctgaggcaggaagaattgcttgaacctgggaggcagagtctacagtgagccgagatcatgccactgcactccagcctggg

SEQ ID NO: 10991 - protein, 140 aa, Homo sapiens; identical to SEQ ID NO: 10987

SEQ ID NO: 10992 - DNA, 705 bp, Homo sapiens
gtcctgaagcttcctaagaaacttcacatcaggtgatggataggagcaaccctgtaaaaccagccttagactatttttcaaacagatggtgattgctcacaccaaagccttggacccctcccagcctgtgacctttgtgaccaactccacctacgcagcagacaagggggctctgtatgtggatgtgatccgtgtgaacagctactactcttggtatcgcaactacgggcacctggagttgattcagctgcagctggccgcccagtttgagaattggtgtaagacatcacaatcccattattcagagcgcgtatggagtggaaacgcttgtagggcttcaccagtctttcccagggaactccgatgaagtgttccaacaaaatgagcgagtgaaccaagaagaggatgacattagatccaggagatacaacagaggagataatctccaggatgcctgtgaagaaagatccctggatcccaggatgattataggacaagttgttcataatccagcaggccagaagacttccagggaaactcattcaaggaggtgaaaatgatggatgactcctccaagatgaaaatggaccagccgcagtggctcacgcctgtaataccagcactttgggaggctgaggcaggcggatcacttgaggtcaggagtttgaaactagcctggccaacgtggcaaaactccatctctat

SEQ ID NO: 10993 - protein, 93 aa, Homo sapiens
MVIAHTKALDPSQPVTFVTNSTYAADKGALYVDVIRVNSYYSWYRNYGHLELIQLQLAAQFENWCKTSQSHYSERVWSGNACRASPVFPRELR

SEQ ID NO: 10994 - DNA, 5612 bp, Homo sapiens
tgccattgccagcaggtgccttgcgcgggtacctggctgcgcttattcatccattatggtcgctctgtcactggtgccattatgtgctcacatgcccactccctcaggtttagaagtcgcgttgcccggcaacagaacaatctgctggcttagcctttggccaagttggcagctggacgaggacgctcagagcccagctcttgagagttcaagtatccgacagttccccactgctcccaggagcggttacccgggcactctgtgcccctcattcctgtttgggccaaggccgaggacctgcgagtaccacagtaagccagtgctgtgtgctctgagttccagggcatcccccagctcagccactacactgagcacaaggactctgtggggcccaggagcaggtagtcacccctttggggtccacaacacccggctgtccccagacttgtgtccagggaagatagtgttgagggccctcaaggagagcggggcagggatgcctgagcagcacaaggaccccagagtccaagaaaatcctgatgatcagagaacggtccccgaggtcaccggggatgcacggtctgcattttggcccctgcgggacaatggaggcccctctccctttgtgcccaggcccgggcctctgcagacagacctccacgcccagagctcagaaatcagatataaccacacatcccagacatcctggacgagctcgagcaccaaacgaaatgccatctccagctcctacagctccacgggaggcttgccggggctaaagcagaggagggggccagcctcatcccgctgccagctgaccctcagttactcaaagacagtgagtgaggacaggcctcaggctgtctcttcgggtcacacacggtgtgaaaagggggcagatacagcaccagggcagacaatcgccccaacgggtggctcccccagatcccaggactctaggccccgtagacgcaagattcccctgctgccacgcaggcgaggggagcctttgatgctgccacctcccttagagctggggtaccgggtcacggctgaagacctgcacctggaaaaagagaaggcattccagcgcatcaacagtgcactgcacgttgaggacaaggccatctcggactgcagaccctcacggccttcccacactttgtcctcacttgcaacaggggcttcgggtgggcctcccgtttctaaagcacccactatggatgcacagcaggacagacccaagtcccaagactgcctgggcctagtggcccccctagcatctgcagcagaggtccccgctacagctcccgtgtctgggaagaagcacagaccaccaggacccctgttctcctcctcagatccccttccggccaactcttcccactcccgggactcagcccaggtcacctcgatgattcctgtccccttgacagctgcaagcagggatgccggcatgagaagaacaaggtcggctcctgcagctgccgcagcagcccctcccccctccacattgaaccccacgtcggggtcactactcaatgcagtggatggaggcccctcacatttcttggcctcagccacagctgcagcacgtgtccagaggtcagaagtgagatataaccagagatcccagacctcccggaccagatcgtgcctcaaacgaaatgccagctccagctcccacagctctacggaaggcctccaggaagtaaagcggaggagggggccagcctcatcccactgccagctggcccacagttcctcaaacacagtgagtgaggatggacctcaggctgtctcttcgggtcaccgctgtgaaaacaaggcaggtacagcaccagggcagacacttgcccccaggggtggctcccccagatcccaggcctctaggccccacatcaacactgcactgcacgttgaggacaaggccatctcggactgcagaccctcacgaccttcccacactttgtcctcacttgcaacagaggcttcgggtgggcctcccgtttctaaagcacccactatggacgcacagcaggacagacccaagtcccaagactgcctgggcctagtggcccccctagcatctgctgcagaggtcccctctacagctcccgtgtctgggaagaagcacagaccaccaggacccctgttctcctcctcagatccccttcctgccacctcttcccactcccgggactcagcccaggtcacctcgctgattcctgccaccttcacagctgcaagcagggatgccggcatgagaagaacaaggtcggctcctgcagctgccgcagcagcccctcccccctccacattgaacaacacgtcggggtcactactcaatgcagtggatggaggcccctcacatttcttggcctcagccacagctgcagcacgtgcccagaggtcagaagtgagatataaccagagatcccagacctcccggaccagatcctgcctcaaacgaaatgccagctccagctccagctcccacagctctacggaaggcctccaggaactaaagcggaggagggggccagcctcatcccactgccagctggcccacagttccccaaacacagtgagtgaggacggacctcaggctgtctcttcgggtcaccgctgtgaaaacaaggcaggtacagcaccagggcagacactcgcccccaggggaggctcccccagatcccaggcctctaggccccacatcaacagtgcactgcacgttgaggacaaggccatctcggactgcagaccctcacggccttcccacactttgtcctcacttgcaacaggggcttcgggtgggcctcccgtttctaaagcacccactatggacgcacagcaggacagacccaagtcccaagactgcctgggcctagtggcccccctagcatctgctgaagaggtcccctctacagctcccgtgtctgggaagaagcacagaccaccaggacccctgttctcctcctcagatccccttcctgccacctcttcccactcccgggactcagcccaggtcacctcgctgattcctgccaccttcacagctgcaagcagggatgccggcatgagaagaacaaggcctggcacctcggctcctgcagctgccgcagcagcccttcccccctccacattgaaccccacgtcggggtcgctactcaatgcagtggatggaggcccctcacatttcttggcctcagccacagctgcagcacgtgcccagaggtcagaagtgagatataaccagagatcccagacctcccggaccagatcctgcctcaaacgaaatgccagctccagctcccacagctctacggaaggcctccaggaagtaaagcggaggagggggccagcctcatcccactgccagctggcccacagttcctcaaacacagtgagtgaggacggacctcaggctgtctcttcgggtcaccgctgtgaaaacaaggcaggtacagcaccagggcagacactcgcccccaggggtggctcccccagatcccaggcctctaggccccgcatcaacagtgcactgcacgttgaggacaaggccatctcggactgcagaccctcacggccttcccacactttgtcctcacttgcaacaggggcttcgggtgggcctcccgtttctaaagcacccactatggatgcacagcagcacagacccaagtcccaagactgcctgggcctactggcccccctagcatctgctgcagaagtcccctctacagctcccgtgtctgggaagaagcacagaccaccaggacccctgttctcctcctcagatccccttcctgccacctcttcccactcacgggactcagcccaggtcacctcgctgattcccgcgcccttcacagctgcaagcagcgatgccggcatgagaagaacaaggcctggcacctcggctcctgcagctgcagcagcagcccctcccccctccacattgaaccccacgtcggggtcactactcaatgcagtggatggaggcccctcacatttcttggcctcagccacagctgcagcacgtgtccagaggtcagaagtgagatataaccagagatcccagacctcccggaccagatcctgcctccaaggaaatgccagctccagctcccacagctctacggaaggcctcccgcaactaaagcggaggagggggccagcctcatcctactgccagctggcccacagttcctcaaacacagtgagtgaggacggacctcaggctgtctcttcgggtcacacccgctgtgagaagaaggcaggtacagcaccagggcagacacttgcccccaggggtggctcccccagatcccaggcctctaggccccgcatcaacactgcactgcacgttgaggacaaggccatctcggactgcagaccctcacggccttcccacactttgtcctcacttgcaacaggggcttcgggtgggcctcccgtttctaaagcacccactatggatgcacagcaggacagacccaagtcccaagactgcctgggcctactggcccccctagcatctgctgcagaggtctcctctacagctcccatgtctgggaagaagcacagaccaccaggacccctgttctcctcctcagatccccttcctgccacctcttcccactccggggactcagcccaggacacctcgctgattcctgcccccttcacacctgcaagcagggatgccggcatcagaagaatgtttcgtgttcgaaattgtttgaggggtttgggtttatttttgttggttttttcttttttttttttgcttacgtgggcatccttcagcttttaataatctgaaaaattgtatttacccattgtcaatgtgtataaattaatctcagtcaattttatacaataaaaggtgaacttttatccatcaaacaataatttaacaaaaaatgtaccggaagaagaatgttcattacaaatataggaaacataaatattaccaaatattggcaagcactaaaatgttcagaaatataagtctattacagttatagctctctcaagcaaaaaaacagcagagaaaaacttagttttcctgaggggctatttatttacttagggatttgttaaaaggtcaaatggggtcacacagaatactaagaagagctgttcacccaggcctcactaagaactcttcttcatgcagtagctatataggaatatgacaactgctcctacgacccaaagaggaactacagcaactactctttagcatctgttgctcccaactctgctttgcaattatatgactcaagcattctggctccgttaactattactgctgttactcccaagtaaattccctctaaaaaataaaaatttttaaagctgtaatttaagctctctgctgcctcatgacttcaattccatcagagttacgcattgtttcctctgtacatctttgctctgcttccattgctaattccctagtaaagtgttgtatattcaaagttccaaagaaacagaatatccaagacatcaccaatcatccaaaacacagtgtaggaggccacagttaagagaagcaagaccattagctctttttataggctcgagaacaacaggatgctttggtc

SEQ ID NO: 10995 - protein, 1586 aa, Homo sapiens
MVALSLVPLCAHMPTPSGLEVALPGNRTICWLSLWPSWQLDEDAQSPALESSSIRQFPTAPRSGYPGTLCPSFLFGPRPRTCEYHSKPVLCALSSRASPSSATTLSTRTLWGPGAGSHPFGVHNTRLSPDLCPGKIVLRALKESGAGMPEQHKDPRVQENPDDQRTVPEVTGDARSAFWPLRDNGGPSPFVPRPGPLQTDLHAQSSEIRYNHTSQTSWTSSSTKRNAISSSYSSTGGLPGLKQRRGPASSRCQLTLSYSKTVSEDRPQAVSSGHTRCEKGADTAPGQTIAPTGGSPRSQDSRPRRRKIPLLPRRRGEPLMLPPPLELGYRVTAEDLHLEKEKAFQRINSALHVEDKAISDCRPSRPSHTLSSLATGASGGPPVSKAPTMDAQQDRPKSQDCLGLVAPLASAAEVPATAPVSGKKHRPPGPLFSSSDPLPANSSHSRDSAQVTSMIPVPLTAASRDAGMRRTRSAPAAAAAAPPPSTLNPTSGSLLNAVDGGPSHFLASATAAARVQRSEVRYNQRSQTSRTRSCLKRNASSSSHSSTEGLQEVKRRRGPASSHCQLAHSSSNTVSEDGPQAVSSGHRCENKAGTAPGQTLAPRGGSPRSQASRPHINTALHVEDKAISDCRPSRPSHTLSSLATEASGGPPVSKAPTMDAQQDRPKSQDCLGLVAPLASAAEVPSTAPVSGKKHRPPGPLFSSSDPLPATSSHSRDSAQVTSLIPATFTAASRDAGMRRTRSAPAAAAAAPPPSTLNNTSGSLLNAVDGGPSHFLASATAAARAQRSEVRYNQRSQTSRTRSCLKRNASSSSSSHSSTEGLQELKRRRGPASSHCQLAHSSPNTVSEDGPQAVSSGHRCENKAGTAPGQTLAPRGGSPRSQASRPHINSALHVEDKAISDCRPSRPSHTLSSLATGASGGPPVSKAPTMDAQQDRPKSQDCLGLVAPLASAEEVPSTAPVSGKKHRPPGPLFSSSDPLPATSSHSRDSAQVTSLIPATFTAASRDAGMRRTRPGTSAPAAAAAALPPSTLNPTSGSLLNAVDGGPSHFLASATAAARAQRSEVRYNQRSQTSRTRSCLKRNASSSSHSSTEGLQEVKRRRGPASSHCQLAHSSSNTVSEDGPQAVSSGHRCENKAGTAPGQTLAPRGGSPRSQASRPRINSALHVEDKAISDCRPSRPSHTLSSLATGASGGPPVSKAPTMDAQQHRPKSQDCLGLLAPLASAAEVPSTAPVSGKKHRPPGPLFSSSDPLPATSSHSRDSAQVTSLIPAPFTAASSDAGMRRTRPGTSAPAAAAAAPPPSTLNPTSGSLLNAVDGGPSHFLASATAAARVQRSEVRYNQRSQTSRTRSCLQGNASSSSHSSTEGLPQLKRRRGPASSYCQLAHSSSNTVSEDGPQAVSSGHTRCEKKAGTAPGQTLAPRGGSPRSQASRPRINTALHVEDKAISDCRPSRPSHTLSSLATGASGGPPVSKAPTMDAQQDRPKSQDCLGLLAPLASAAEVSSTAPMSGKKHRPPGPLFSSSDPLPATSSHSGDSAQDTSLIPAPFTPASRDAGIRRMFRVRNCLRGLGLFLLVFSFFFLLTWASFSF

SEQ ID NO: 10996 - DNA, 535 bp, Homo sapiens
ccacagaacagactgttgtgtttttgttttgttttgttttgttgagatacagagtctcattctgtagcccaggctggaatgcagtggcattatctcagctcattgcaatctctgcctcctggttcacctgaggcgattctcctgcctcagcatcctgagtagctgggattacaggcacccgccaccacgctgggctaatttttgtatttttagtagagacggggtttcaccatgttggccaggctggtctcgaactcttgagctcgtgatccacctgccttggcctcccaaagtgctcacaggcttgagccaccatgcccggccctaatttttaaatttgttgtagaaacaaggtcttgctatgttgtccaggctggtctcaagcgcctggtctcaagtaagcctcccaaagtgctggggttctaggcttgagccacctcgcctggcacttgcaccgtttttctgtgcatgcatctccactcccactgcccaggacctgtggacttagatttgagtcattactgagcacctagca

SEQ ID NO: 10997 - protein, 48 aa, Homo sapiens
MLSRLVSSAWSQVSLPKCWGSRLEPPRLALAPFFCACISTPTAQDLWT

SEQ ID NO: 10998 - DNA, 281 bp, Homo sapiens
cagggctggtgaattaccagatctccgtcaagtgcagtaaccagttcaagttggaagtgtgtcttttgaatgcagaaaacaaagtcgtggacaaccaggctgggacccagggccagctgaaggtgctgggtgccaacctctggtggccgtacctgatgcacgaacaccccgcctacctgtactcgtgggaggtgcggctgactgcacagaagtcactggggcctttgacttctacacactccctgtggggctccgcactgtgcccgtcaccgagagccagt

SEQ ID NO: 10999 - protein, 41 aa, Homo sapiens
MHEHPAYLYSWEVRLTAQKSLGPLTSTHSLWGSALCPSPRA

SEQ ID NO: 11000 - DNA, 1254 bp, Homo sapiens
ttcaaatacttgatggatacatgtggctagtggctaacataagggatagcacagatataaaacatttgctcgtcatataaagttctattggatagtgctggtctgtagcttataggatggtatcttagtctgcttcagctgctaaaacagaataccataaattaggtagcttaaacagtagatattttgaccaggcgtggtggcttatgcctgtattcccaaagtgctgggattacaggcatgagccaccgcgccgggcctatcatatgaattttgagggaacacaaacatgcagtctgtagcagatggtaataggctgacatattacacttgttgatgtaaatctgataggtttctttctctccaaggacagctttttaaatatttaacagtatcaataatttttcaggttctgtgagaattttataatttataatttgcagacttaatgtataatctattttgtcctaacaattacaaatatattttttatttcagattgtatatattcctaccagatggagataattacagctttaaaaatttttattttttcattttatttcacacattgacattaaatttttatggacacataataactgtacatatatatggggtagaatgtgatgttttaatacatgtactcaatgtgtaatgatcaaatcagggtaatttgcataatgatttttctgtagggagaaaattcaaaatctactcttctggctattttcaaatatataatatgttattgttaactatactcatcctactatgcaataggacaccagaacttattcctgggttctacatccgttaaggcaaccaaggattggaaatattggaaaaaaaaattgcgtctgtactgaacatgtacagacttttttcttgtccttattccttacacaatatagtacaataactatttgcatgacatttacatcggatattatgagtgatctagagttgatatgaagtatatgggaggatgtgcaaaggtgatgtgcaaatactatgtcattttatatcagggacttgagtatcctttgttaccctcaggagatcctgaaaccagtcccccatggatactgagggctgactgtatagtcctatcctcacggaactttcattctaatgggggaagactgactataaacaaaatatatgtaataggtggtggtaagtaccgtggagaagtaacaaacggggcaaagtgagttatacagctccattcttagaaaccttggagtactt

SEQ ID NO: 11001 - protein, 31 aa, Homo sapiens [sequence omitted]

SEQ ID NO: 11002 - DNA, 751 bp, Homo sapiens
gagtccggtgggtacttggagaacttactacgtctagctggaggattgtaaatgcaccaatcagcatgctgtgtctagctcaagaactcaagctccatgaggagatgtttcattgtcgagagcagtcatgatggcctgcactccacacaatgcaacagagtgaaagagcaggttctgcttctttggtgtagtcctgaagcttcctaagaaacttcacatcaggtgatggataggagcaaccctgtaaaaccagccttagactatttttcaaacagatgaagtgtttataagtcatcccaaggaagaaacaattcagatgagaactattcaatggatttgcaataacaatccaaagatggaagaagacacttctaggtagacaaaattgcaagtatagagaatgtaaattaagagagagcttagctttcagatgaattaaaagattgtggtgatcagaatgtagagattgacgagagacaaatgaaataaaactagaaggacaagtagagatttgtgggtcaagttttaaaattttattataaatgcactgatactgttctgaacattttcttacacatggaaatttaatgattatggctattgaaaaatgtaactcttcatttatatttttccgagaatgaaatcggtggaattgctggggggtgaaaatgtccaatgcgaaacaggaggctaatttaagaagggatactgcaaaattggtcatgatggctcaaactgctgttcataatag

SEQ ID NO: 11003 - protein, 36 aa, Homo sapiens
MRRCFIVESSHDGLHSTQCNRVKEQVLLLWCSPEAS

SEQ ID NO: 11004 - DNA, 774 bp, Homo sapiens
cccttattttgggccagtggctgtcattacatatgagaactcaagctccatgaggagatgtttcattgtcgagagcagtcatgatggcctgcactccacacaatgcaacagagtgaaagagcaggttctgcttctttggtgtagtcctgaagcttcctaagaaacttcacatcaggtgatggataggagcaaccctgtaaaaccagccttagactatttttcaaacagtaagtaataaaggtgacgttttgatctttatctgcttaattacttctgctatgattctattgattctaacattgaaggagcagtaaatttatatgtattatccaactataaaacaataaataaacgatatgtcaaatacattatcacatccttatgttcttatgataatattgtcctttttttaacagtttttattcttatttgttgattggtttgtctttatgttgtcctttctactatcaaactgaacatgttgaggtcataggctatcaaaactgtacatttctgatgctaaccatagagacttaacaacagtaaataggccaaaatggaatgttgttagccatagtgtgtattattatttcttttatacatgtggtcactgttagaggagtttatgactttttgcctagattaatgacacacaaaccatctacaaacgaatcataccttattccctcactgtaatttttaatgttgctatttttgcctgttaacattccataggtttatcacattgcttaaagatttaatttaatttctgta

SEQ ID NO: 11005 - protein, 36 aa, Homo sapiens; identical to SEQ ID NO: 11003

SEQ ID NO: 11006 - DNA, 751 bp, Homo sapiens; identical to SEQ ID NO: 11002

SEQ ID NO: 11007 - protein, 36 aa, Homo sapiens; identical to SEQ ID NO: 11003

SEQ ID NO: 11008 - DNA, 1262 bp, Homo sapiens
tgagccatcgtgcctggcccccagttgtgttctggcaggggaagatgggacagagaggatgggagggtgtctgagcctttcccggactgacggaacctgtgtcttctctcttttgtggacaggatggtgattgctcacaccaaagccttggacccctcccagcctgtgacctttgtgaccaactccacctacgcagcagacaagggggctctgtatgtggatgtgatccgtgtgaacagctactactcttggtatcgcaactacgggcacctggagttgattcagctgcagctggccgcccagtttgagaattggtgtaagacatcacaatcccattattcagagcgcgtatggagtggaaacgcttgtaaggcttcaccaggatccacctctgatgttcagtgaagaggaccggaaaagtctgctagagcagtaccatctgggtctggatcaaaaacgcagaaaatacgtggttggagagctcatctggaattttgccgatttcatgactaaccagtgtaagtggcagtttagcgcatgggataatgtacccgtcctcattttttcaggttgccttgcccattctggacattttggctgtaagaatattggaaacaaaggggggaacctggtttaatccatgtaggttgtgttgagaatttcctaggaaaagtaagttgtgcttaggaagtaggaaagcagtcaggcccccgcttcccacgtacggtcaaaaagcaaacatgagagtctgctatagtgagatggaaatggctagcttgcctttttcttgtctatttcatagccaaggatgaaggaaaaactggacctcattatggatttacttttgggatacactcattattccagaggagggtaaaaggctgagaagcttaaggtatttcagtctgttttatgttactcatttgcgaaaagcaggctcatcgaatacaggtgagtttcaacgcgtcttgaatatggcagcatttaaaagtcttcagaccaggcatggtggctcatgcctgtcatcccagcactttgggaggccaaggtgggaggattgcttgaggccaggagttcgagaccagcctgttcagcatagcaggacccccatctctacaaaaactaaacagattagctaggtgtggtggtgtgtgcctgtagtcctagctgcttgggaggctgaggcaggcggatagcctgagcacaggagttggaggctgcagtaagccatgattacaccactgcacttgagcctgggcagc

SEQ ID NO: 11009 - protein, 93 aa, Homo sapiens
MVIAHTKALDPSQPVTFVTNSTYAADKGALYVDVIRVNSYYSWYRNYGHLELIQLQLAAQFENWCKTSQSHYSERVWSGNACKASPGSTSDVQ

SEQ ID NO: 11010 - DNA, 1328 bp, Homo sapiens
gatcaagtgaccctcctgcctcaggctcacaaagcgctgggatttacaggtgtgagccactgtgcccggccacaaatcaaaatttttgagtcctgtcattggctcccccaggcccataggacaaagtcctaacccctagtcaggacactcagtgtcctctgctctctcctgggttttcatcctcttctcttctcactcctggccactgatctgtttccactgccctcatttgctctcctgctcttgcttgagctattctttctgcctggaatgcccaagttggcaccataatcaccaactaaaagatccttttctttttatttttttagagatagggtcttgctatgttgcccaggctggtctcaaactcctggactcaattgatctttttgccttggcctcccaaagttctgggattaacaggtgtgatccactgtgctagcctttttttattttttatttttttcctgacaggcaggagaatcgcttgaactggggaggtggaggttgcagtgagccgagattgtgccactgcactccagcctgggcgacagagcaagagtccgtctcaaaaaaaaaaaaaaaaaaaagaaagggtcttcaaagacaataagatctgtgctctcacgtagggtggatgaggggctgccaagttagcaatgaatgtttcccatttcttcttagtttatggactttccataaactcaggatggcagtttggttggttggagaaggatatggtgatggcgggagttacaatacattacttataggggaagataggcttttgaaaggttaaagcttaaaagtgagaatggaaaagggatgaatgaatgaacatgatgaggtgagagggaagaggtaaagggaaaaggagaacaagcaactcttctctgcgtggcacctgggatgaatggtttctggggacatccctgatggcagttttgtggagaggtgcaaagctttatgtgttaagaaatgagctgtaggctcagtgcagtggctcacgcctgtaatcccagcactttgggaggccgaggtgggtgaaaagaaaaaatgggctgggcgccgtggctcacgcctgtaatcccagcactttgggaggccgaggtgggcggatcatgaggtaaggagttcgagagcagcctggccaacatggtgaaaccgtgtctctccaaaaaaatagaaaaaacatccctgtatggtggtgagcacctgtagtcccagttactcaggaggctgaggcatgagaatcgcttaaacctcggaggcggaggctgcaatgagctgagatggtgccactgcactccagcctgggtgacagagct

SEQ ID NO: 11011 - protein, 48 aa, Homo sapiens [sequence omitted]

SEQ ID NO: 11012 - DNA, 798 bp, Homo sapiens
cccagtgaggacagatattttggtcaccatcaagtggatctttatttttatctaacatttacaattctgccagttcttactcttaattctctttgccttgaatcccaggatccacctctgatgttcagtgaagaggaccggaaaagtctgctagagcagtaccatctgggtctggatcaaaaacgcagaaaatacgtggttggagagctcatctggaattttgccgatttcatgactaaccagtccaaggatgaaggaaaaactggacctcattatggatttacttttgggatacactcattattccagaggagggtaaaaggctgagaagcttaaggtatttcagtctgttttatgttactcatttgcgaaaagcaggctcatcgaatacaggtgagtttcaacgcgtcttgaatatggcagcatttaaaagtcttcagaccaggcatggtggctcatgcctgtcatcccagcactttgggaggccaaggtgggaggattgcttgaggccaggagttcgagaccagcctgttcagcatagcaggacccccatctctacaaaaactaaacagattagctaggtgtggtggtgtgtgcctgtagtcctagctgcttgggaggctgaggcaggcggatagcctgagcacaggagttggaggctgcagtaagccatgattacaccactgcacttgagcctgggcagcagagtgagacctgtctttaaaaaaaaaaaaggagctgggcacggtggctcatgcctgtaatcccagcactttgggaggccgaggcaggcagatc

SEQ ID NO: 11013 - protein, 68 aa, Homo sapiens
MFSEEDRKSLLEQYHLGLDQKRRKYVVGELIWNFADFMTNQSKDEGKTGPHYGFTFGIHSLFQRRVKG

SEQ ID NO: 11014 - DNA, 505 bp, Homo sapiens
cccagtgaggacagatattttggtcaccatcaagtggatctttatttttatctaacatttacaattctgccagttcttactcttaattctctttgccttgaatcccaggatccacctctgatgttcagtgaagaggaccggaaaagtctgctagagcagtaccatctgggtctggatcaaaaacgcagaaaatacgtggttggagagctcatctggaattttgccgatttcatgactaaccagtgtgtcagtttcttggtcgggaatgaaaatagtgccaacctgtgataccttcactctaattttactttctgaggaagttttctgtaatagttatttggtgataattattaatactggtgagaaaatcaatgtaaaagaggagaaataacccacacaaccacatacaactaggaaatgatagatggatctgaaaaaaaggatatgcactcttaacaagttcaacacccaagtactattgcaagtaccagctgtatttcatgga

SEQ ID NO: 11015 - protein, 55 aa, Homo sapiens [sequence omitted]

SEQ ID NO: 11016 - DNA, 1064 bp, Homo sapiens
gagaatacattgggtctactaaatctttactatcattcacaagtcttacatcttaagataacttttcaataaaataaaaattcttcattgcacctagaaaggagcagggttttgaaagcgatcaatgattactctgatacctaatataataatataatatagtaaaaatcaaaatacttgaatgaaaaatgtaaaattaatagttttgctttcattgtttttattccagtgtctattttagaatgtttttactctaattgtgtttttatgcaaaaccaaatgagctttagataattccattgatacattacatatgaaagttctcgttaaataggatatagcatattttacttaaaaatccaaattataaaataaagagggattttaagttgagtctaaaatttttgtttcaattttgtttttatttaaagacttgctataattctgtgagagagctataaaagtctgctcagaaacattataatgtaaaatggacagagaaggacaatgagatatttaatttgccacggcaaagccattgctgtgaagaatggataatatatgtcaatggtaatatatgaagaaataacacagatggagctggcttgaaatcctcttgtttatggcagtacatatcggttatgattcaaaaaatatagcccatttccaaaaacctgcaacaaagagatactttctcagatgcctacagtattcagcacagtaacatgctgtataggtttgtagcctaggatcaataggctgtaccacataacctagggcggagtctcactctgttcaccaagctggagtgcagtggtgcagtctcagctcactgcaatttctgcctcaccctcccaagtaattgggattacagttgttgagatcatgacctcttctggaatggtgttctcagaagtccttggacaatcagggtgtactaggagaaaacatgctgtgagatgggatgaaagtcttcaggatggacactatactttctgttattggaggattcggtagtttgaataagcgtttgaatgaataaaatatttgagttgaggactaaa

SEQ ID NO: 11017 - protein, 33 aa, Homo sapiens
MAVHIGYDSKNIAHFQKPATKRYFLRCLQYSAQ

SEQ ID NO: 11018 - DNA, 1226 bp, Homo sapiens
gctttagataattccattgatacattacatatgaaagttctcgttaaataggatatagcatattttacttaaaaatccaaattataaaataaagagggattttaagttgagtctaaaatttttgtttcaattttgtttttatttaaagacttgctataattctgtgagagagctataaaagtctgctcagaaacattataatgtaaaatggacagagaaggacaatgagatatttaatttgccacggcaaagccattgctgtgaagaatggataatatatgtcaatggtaatatatgaagaaataacacaggtgaatagcagaggcaataaatctgtttttaccacaggacttgtcttacacttttctcttagtaataaataaaataattttcgaccagatggagctggcttgaaatcctcttgtttatggcagtacatatcggttatgattcaaaaaatatagcccatttccaaaaacctgcaacaaagagatactttctcagtcctgcaggctgtacaggaagcacagtggcatcttcttctggagaggcctcagggagcttttactcatgacagaaggcaaagcaggagcaggcacttcacatggtgaaagcaggaacaagagagagagagtgtgttggggtaggtgcactaccatggagacagcaccaagtcacgaaggattcgacctcatgatccaaacacttcccaccaagctccaccttcagcactggggatctggtttcaacatgagatttgggcgggacatccaaactatatcatctgtctccctcatccaagaccatgtgatccgtagctcacttttgtctagcaacagattaaatacagcattttctgtgtgatatctttgttgaggtctttgcagatggctgtttctttgtcctgaaactttcttcatctgctctttcaaaatgagtgactcttcatcctcgaagtctatgcttatatattgcttttcagaggaatcttttctgaactgggcattctgccttcaaccaactattttctattatagtttcctgtttgtgagttaatagtccttttgaaaatttgactactcatttaccttcttgggttatttgaaattatctcctcttcactagattctatagaagcatagccatgcctgccctctttactgtttctctactgacttgttgcaatgaatattgtcagtaaacatggaaataaatcagttattcag

SEQ ID NO: 11019 - protein, 48 aa, Homo sapiens
MAVHIGYDSKNIAHFQKPATKRYFLSPAGCTGSTVASSSGEASGSFYS

SEQ ID NO: 11020 - DNA, 790 bp, Homo sapiens
gcgagcagtgcctcactgagctgtcggggactgtctggaaggttcacagatgaagagaaattttgtgagaatgaactgtaccgtgaagctcacctgcatctgatttagtgcctgctcctgctttgccttctgtcatgagtaaaagctccctgaggcctctccagaagaagatgccactgtgcttcctgtacagcctgcaggactaaaaactcaagctggagacggaaatgaacagatgcacatggctggaaagactcagtgctaatctctacaatgttgttttaatagaatggagacaggaccacatactttcttacaataatgaggatcaataaagacaaaactgacactttgtaatgaataatgatctgaacactcacctgagaaagtatctctttgttgcaggtttttggaaatgggctatattttttgaatcataaccgatatgtactgccataaacaagaggatttcaagccagctccatctggtcgaaaattattttatttattactaagagaaaagtgtaagacaagtcctgtggtaaaaacagatttattgcctctgctattcacctgtgttatttcttcatatattaccattgacatatattatccattcttcacagcaatggctttgccgtggcaaattaaatatctcattgtccttctctgtccattttacattataatgtttctgagcagacttttatagctctctcacagaattatagcaagtctttaaataaaaacaaaattgaaacaaaaattttagactcaacttaaaatccct

SEQ ID NO: 11021 - protein, 88 aa, Homo sapiens [sequence omitted]

SEQ ID NO: 11022 - DNA, 860 bp, Homo sapiens
ggtaaaatttaaaatatccattctgactaacaggcagtgatgagaacaataaataaaatatatcttggtttaaattctaagtaaatatatttgacaatataaatataaacatactcatatgagtgaattgcttctaattctggcttttagctaaataagcacttaatgctagtaagaaaaatacattatttcataaagataacaaattctttcagaaatagtaattatatttttaaagagtttggggaaaatagaagtgtatactctaatcttatagcaaagtttctgctaagtttttgtgatgccagtgttttcattatgaatcatttcactgtcaaacaaaatgtacgctgttgattaaacagaggcaaaaagagacggaaagaaaaaggtatattaaaaaaaagacctttggttattctggctgccaccaattgctttcttgtttcagctgaattttgaagtagctaatcatattttggcattttcttgtcatcaaagcatttcgtgaaattatcccattacaatgtttttctcagaggcaaaattaacatggttgacagtttaattgacatatttctttttcgttgtgtgcctttgccaattaaacaaattgcaccctattttgatgttcattttgttaattatttgtaaaactgtagactctgattttttttttttttaattttcaggtgtcagtttcttggtcgggaatgaaaatagtgccaacctgtgataccttcactctaattttactttctgaggaagttttctgtaatagttatttggtgataattattaatactggtgagaaaatcaatgtaaaagaggagaaataacccacacaaccacatacaact

SEQ ID NO: 11023 - protein, 41 aa, Homo sapiens
MKIVPTCDTFTLILLSEEVFCNSYLVIIINTGEKINVKEEK

SEQ ID NO: 11024 - DNA, 348 bp, Homo sapiens
cccacacagccataacatcctatggccctgaaaatagttctgccaagctgcgtgcagtggacacttcacggctggcacaggagagatcacaaggccttgctcaatttcatcaaaagtgttaaagcgactcagcagattgtgaagcacaagtggaagctgataattggtgtttcttacaaatcaacggcttgtctccacacatcaaggtgagaaaatcaatgtaaaagaggagaaataacccacacaaccacatacaactaggaaatgatagatggatctgaaaaaaaggatatgcactcttaacaagttcaacacccaagtactattgcaagtaccagctgtatttca

SEQ ID NO: 11025 - protein, 62 aa, Homo sapiens [sequence omitted]

SEQ ID NO: 11026 - DNA, 5080 bp, Homo sapiens
gagacttatatatgtttctaaattgtaatagttcattaatgtaaagtacagacagtcttcacttttccttcttagaccgtttaaatatggccacgaaacaagtagtctctggttggctgggcactgtggctcatgtccttaacaccaacactttgggaggccgaggcaggcaaatcacttgaggtcaggagttcgagaccagcctggccaatgtggcaaaaccccatctcttctaaaaatacaaaaattagctgagtgcggtggtgcacaccggtaatcccagttactcgagaagctgaggcaggagaatcacttgaacatggaaggcagaggttgcagtgagccaagaccgcaccactacactccagcctgggcaatagagcaagactccatctcaaaaaaaaaagaaaaaagaaaatagtctctggttaaataacctctgaaagactccaccaaaaatttcatcttagcatttctccccaaacttcatgtaaaataaaatagagttgagagaaaaatagaaaggcaagggagtacctgttcactatttttattaaaccagtgttctactttattttaggtgtatcttttcttatttaaatgtcagctaaactttctttttaagatattgaatgaaagatgcccatccttcaggtttcgtttaagcaagaatccccattctcaaataatataatataaactttccaaattcttaagtagatcatctgagattgaaagctaagtttaactttctcaaagatattttagccgccatgacacctagacaaagtggtatattaaattctgattaatttggtcctaaagcacctaagaatcattcttactttcttatccacaggggttattaagttttcacattaaaaaaaatccaacagtgaataatactgcattggggttactgtaattgttaagtaaaataagaaatacaaatctttagttagatcacatggcacctgactactgcttagaaaatggtaagacttactacataaatcatgagtcactattgacatctactatatcatatcataggttaggtatctaattataaatagtcaaatcagctgactcaaggtggcatagctcaagcagaggaagataatacaagttgagtatggatttaacactctaaacctgtcagcactgtaggaaaagtaacttaaaactgcacaccccacttatgcataatcatcagatataaagagggtacattcctgtaatttattgttgctctagtgatcttaaagaattaagtccacattcataaagtccaaacttgtctccaaggatttgctttgactttgggagtatctggatcattaagtaatttccggaggtcagagtaaaagctttttatctctaaatattacttccctggaatattagatgtagcagaagtcagtaacggagtgacctttctcttaaacaattcatagattcactgaaattttcttcaactttaggaaaattaaatatattccacagtgctgtaagtcttaaatattgattttcctctgaaatcttgactcatcctacccaccaacattctccctttgtacactatgttctttgtaatgttcatgttacacaagtgaaaattagtaacattagtaaattttcattgcaggtttatttgttcatatttctggatatataatccattactgttaaacttcatatcaatgttccgatatttcttcatcttatgttttatgttacaaaacaggttatttcactatatgtatgtttaattgattaattcttccctttttttggaaatgaaacagcactctcaattattgggacagaaaagttatttcatagggaatacttcaaacactgatatctacaacaggcagtaagattcgtcacaacaattggtatactgtcaatataccatacaaagttccatctggtcttgattaaaaattattttagttttctcaggaaaatgatacagagggagaattgcctagattatatgagagaaaaaaaagtagagagaaacataatgttttcttagattattacagcagtgaactatttccacctggtaagaagggtgcacttgagaatggggttcaagtactctaggaacatagatgtaagttctggatgcacagtagttgttgcttagctgtaagctggaaatttcaaggcagaaacagcagataccacaactataactgggtctccttgttttttgttttatgtgtatacgtgagattatggggaaagacaaaagtaatgcatagagatttattttttaacattcaattcataagcagtgtttatacctctttgtacttacttgaaaagtgtatattatgtaaatttagtataaaaacacttggactaattcataccatgtggtaaaatttcacattcaaaagaaatacccttctgttattaaaaataaaaaaaaaaggagccaggagggtggctcatgactgtaatcccagtgctctgggaagccaaggtggagggatcatttgaggccaggactacttgagaacagcctgggcaacatagctagatcccttctctacaaaaagtaaaaaaaaaaaaaaaaaaaaaaaaaaatagctaggcagggtggcacatgactggctattaaggaggctcaggtggagggatctcttcagcccaggaatttaaggcttcagtgagctaagattgggccattgcactccagccagggcaacagaccaagacccagtctcaaaataaataaataaaaatgaaagaaagcagtgcactgaaaatcaatttaagtatttactggagttgtcttgaaggcccaatgggaaatgtcagtaagggcacatgagaaaacactttaagaacctattcttccaaagatctttccagtatcttatgacaacacagtaaattatacccactccaaatgcaaaagctgaaactactctgctttctcacttacctacacttttgactttcgaaatacatttctctcttcggatatgagctgcaaactccttatataaaggctccaactctgcagccctaattattctagttggcccaagaaaaatcctaattgttttatctaaggagacggaattttccaatactgtagaggcatgtgtgtgtgtttgctttaaggaagctgttttggtaataaaaagtcactgagggtcataaattcatgttaacacatccagtgtacatgaagtaggcaccgagttaaactatttgtctactatatagcatgtcatcttaaaagccttattttttcctcaaaatattaactttatttttctccctgtaaaatcaagacacagttaaaatgtagccttcctcattttctgggaatactttctaacaagatatgcttctttccaattggacttctaaatttctagcaattctaacagtgcataaaagaggcaaccccaaaagtgtagcaggtactgaataacagatttgcagccttgggtatccacattaaaatttgaaatctaagtgaattacttcaagctgatttcttaggtcaaggagagattatggtccttaaatgcctgataaggtcacatacacaatttcaagtgcattatagtaaatccatgtgacagctcctacagctactaacctgcttccgccctcacggtaacgtgcacaatcttcatcgcatgtcctgggtggtggtaggagcagtagaaaccccctgggtcatgtcagatttagaaaatataagcaatggctcatacacgaattttaagttgtaacctacatgtgataagttgctttatcttccaaatgtaataaaaaccagaagttactttgaaataaattgaaggattagcagtggtgactgaggaataaaaattataatttaaaattgtccttaaagctggaattcttaacttattgaccttatatcctacatattataggactttgtaaatttaggctgatatggaaatgtatatttatatcaaatttaaatttttagaatgatggtgctactatattctaattgttaatttgataattgtaattgtaatttgttaatttgttctaataatattttcatgacattattcatttgctgcttggcttgatggcataacaagtatgggttatttaccctgaaaaggaaacagtatcacccttccagaatctctatttacagctacagaagatgcaacacacctgtttctggaccacttccagatcagatgtgatgcatgctttagatcatttactttgatctaggaattactgtctggcatttcgtggtgtagggtaggtgtctccagcactgtataggtgtctggaattgagataagaatcaatttcaatacaaaatacattttttgcttaaagcacgcaaggattctatgaattcaggtaaattcacagggtggaaaacaggaactaatgttatatattcctgtagttatcttcataatgaagcagaaagaaaaacaaaaaagttacaaaaataaatgaaaagaactgtattttctagaattgaaaaataattcttttagatgatagataagatgtttacatcaacctgcaaaaagtcaatgttgaagaggtctcattgtatctcacagaattttgatttgcctactcacccacaggagacatttctgggacagtagcaacataaggtccatcccaaaactttggctcattatcattaatatcctgcactttgatgatgaattctgattcaggctccaggggctttctggtttctatgtccacagcctgagcacgaagagtgtagaaaggtttttcttctctatctaggctccttattgcatgaatgtcccctgtggtttcatcaatggtaaaaacggtgccagcgccatctcctgagagggtgtatttcgcagtgccctctcccttgtctaagtcggaatggagctttagggaagagagggagagagagaggaagagaaagagaaggacaaagaaagaacaccattaaaaggatgttgccaaattaaaaagtcataatttgcaatacaattcctttaatcaaaaatgttaaataaaaatcttatggttctgttttcttgtt

SEQ ID NO: 11027 - protein, 86 aa, Homo sapiens
MHSSCCLAVSWKFQGRNSRYHNYNWVSLFFVLCVYVRLWGKTKVMHRDLFFNIQFISSVYTSLYLLEKCILCKFSIKTLGLIHTMW

SEQ ID NO: 11028 - DNA, 5309 bp, Homo sapiens
gagacttatatatgtttctaaattgtaatagttcattaatgtaaagtacagacagtcttcacttttccttcttagaccgtttaaatatggccacgaaacaagtagtctctggttggctgggcactgtggctcatgtccttaacaccaacactttgggaggccgaggcaggcaaatcacttgaggtcaggagttcgagaccagcctggccaatgtggcaaaaccccatctcttctaaaaatacaaaaattagctgagtgcggtggtgcacaccggtaatcccagttactcgagaagctgaggcaggagaatcacttgaacatggaaggcagaggttgcagtgagccaagaccgcaccactacactccagcctgggcaatagagcaagactccatctcaaaaaaaaaagaaaaaagaaaatagtctctggttaaataacctctgaaagactccaccaaaaatttcatcttagcatttctccccaaacttcatgtaaaataaaatagagttgagagaaaaatagaaaggcaagggagtacctgttcactatttttattaaaccagtgttctactttattttaggtgtatcttttcttatttaaatgtcagctaaactttctttttaagatattgaatgaaagatgcccatccttcaggtttcgtttaagcaagaatccccattctcaaataatataatataaactttccaaattcttaagtagatcatctgagattgaaagctaagtttaactttctcaaagatattttagccgccatgacacctagacaaagtggtatattaaattctgattaatttggtcctaaagcacctaagaatcattcttactttcttatccacaggggttattaagttttcacattaaaaaaaatccaacagtgaataatactgcattggggttactgtaattgttaagtaaaataagaaatacaaatctttagttagatcacatggcacctgactactgcttagaaaatggtaagacttactacataaatcatgagtcactattgacatctactatatcatatcataggttaggtatctaattataaatagtcaaatcagctgactcaaggtggcatagctcaagcagaggaagataatacaagttgagtatggatttaacactctaaacctgtcagcactgtaggaaaagtaacttaaaactgcacaccccacttatgcataatcatcagatataaagagggtacattcctgtaatttattgttgctctagtgatcttaaagaattaagtccacattcataaagtccaaacttgtctccaaggatttgctttgactttgggagtatctggatcattaagtaatttccggaggtcagagtaaaagctttttatctctaaatattacttccctggaatattagatgtagcagaagtcagtaacggagtgacctttctcttaaacaattcatagattcactgaaattttcttcaactttaggaaaattaaatatattccacagtgctgtaagtcttaaatattgattttcctctgaaatcttgactcatcctacccaccaacattctccctttgtacactatgttctttgtaatgttcatgttacacaagtgaaaattagtaacattagtaaattttcattgcaggtttatttgttcatatttctggatatataatccattactgttaaacttcatatcaatgttccgatatttcttcatcttatgttttatgttacaaaacaggttatttcactatatgtatgtttaattgattaattcttccctttttttggaaatgaaacagcactctcaattattgggacagaaaagttatttcatagggaatacttcaaacactgatatctacaacaggcagtaagattcgtcacaacaattggtatactgtcaatataccatacaaagttccatctggtcttgattaaaaattattttagttttctcaggaaaatgatacagagggagaattgcctagattatatgagagaaaaaaaagtagagagaaacataatgttttcttagattattacagcagtgaactatttccacctggtaagaagggtgcacttgagaatggggttcaagtactctaggaacatagatgtaagttctggatgcacagtagttgttgcttagctgtaagctggaaatttcaaggcagaaacagcagataccacaactataactgggtctccttgttttttgttttatgtgtatacgtgagattatggggaaagacaaaagtaatgcatagagatttattttttaacattcaattcataagcagtgtttatacctctttgtacttacttgaaaagtgtatattatgtaaatttagtataaaaacacttggactaattcataccatgtggtaaaatttcacattcaaaagaaatacccttctgttattaaaaataaaaaaaaaaggagccaggagggtggctcatgactgtaatcccagtgctctgggaagccaaggtggagggatcatttgaggccaggactacttgagaacagcctgggcaacatagctagatcccttctctacaaaaagtaaaaaaaaaaaaaaaaaaaaaaaaaaatagctaggcagggtggcacatgactggctattaaggaggctcaggtggagggatctcttcagcccaggaatttaaggcttcagtgagctaagattgggccattgcactccagccagggcaacagaccaagacccagtctcaaaataaataaataaaaatgaaagaaagcagtgcactgaaaatcaatttaagtatttactggagttgtcttgaaggcccaatgggaaatgtcagtaagggcacatgagaaaacactttaagaacctattcttccaaagatctttccagtatcttatgacaacacagtaaattatacccactccaaatgcaaaagctgaaactactctgctttctcacttacctacacttttgactttcgaaatacatttctctcttcggatatgagctgcaaactccttatataaaggctccaactctgcagccctaattattctagttggcccaagaaaaatcctaattgttttatctaaggagacggaattttccaatactgtagaggcatgtgtgtgtgtttgctttaaggaagctgttttggtaataaaaagtcactgagggtcataaattcatgttaacacatccagtgtacatgaagtaggcaccgagttaaactatttgtctactatatagcatgtcatcttaaaagccttattttttcctcaaaatattaactttatttttctccctgtaaaatcaagacacagttaaaatgtagccttcctcattttctgggaatactttctaacaagatatgcttctttccaattggacttctaaatttctagcaattctaacagtgcataaaagaggcaaccccaaaagtgtagcaggtactgaataacagatttgcagccttgggtatccacattaaaatttgaaatctaagtgaattacttcaagctgatttcttaggtcaaggagagattatggtccttaaatgcctgataaggtcacatacacaatttcaagtgcattatagtaaatccatgtgacagctcctacagctactaacctgcttccgccctcacggtaacgtgcacaatcttcatcgcatgtcctgggtggtggtaggagcagtagaaaccccctgggtcatgtcagatttagaaaatataagcaatggctcatacacgaattttaagttgtaacctacatgtgataagttgctttatcttccaaatgtaataaaaaccagaagttactttgaaataaattgaaggattagcagtggtgactgaggaataaaaattataatttaaaattgtccttaaagctggaattcttaacttattgaccttatatcctacatattataggactttgtaaatttaggctgatatggaaatgtatatttatatcaaatttaaatttttagaatgatggtgctactatattctaattgttaatttgataattgtaattgtaatttgttaatttgttctaataatattttcatgacattattcatttgctgcttggcttgatggcataacaagtatgggttatttaccctgaaaaggaaacagtatcacccttccagaatctctatttacagctacagaagatgcaacacacctgtttctggaccacttccagatcagatgtgatgcatgctttagatcatttactttgatctaggaattactgtctggcatttcgtggtgtagggtaggtgtctccagcactgtataggtgtctggaattgagataagaatcaatttcaatacaaaatacattttttgcttaaagcacgcaaggattctatgaattcaggtaaattcacagggtggaaaacaggaactaatgttatatattcctgtagttatcttcataatgaagcagaaagaaaaacaaaaaagttacaaaaataaatgaaaagaactgtattttctagaattgaaaaataattcttttagatgatagataagatgtttacatcaacctgcaaaaagtcaatgttgaagaggtctcattgtatctcacagaattttgatttgcctactcacccacaggagacatttctgggacagtagcaacataaggtccatcccaaaactttggctcattatcattaatatcctgcactttgatgatgaattctgattcaggctccaggggctttctggtttctatgtccacagcctgagcacgaagagtgtagaaaggtttttcttctctatctaggctccttattgcatgaatgtcccctgtggtttcatcaatggtaaaaacggtgccagcgccatctcctgagagggtgtatttcgcagtgccctctcccttgtctaagtcggaatggagctttagggaagagagggagagagagaggaagagaaagagaaggacaaagaaagaacaccattaaaaggatgttgccaaattaaaaagtcataatttgcaatacaattcctttaatcaaaaatgttaaataaaaatcttatggttctgttttcttgttttttatttctccaacttctttttataaaaatttcaacacaaaaagttgaaaactgcaatgaacacatatacatatacatccaaacattcctccattcgtctattaatctgcttgccttatcagataggtctcatatccattcttctgttcatccttctcttaacccattttttttttgaggtgttacaaagatcagaacaaaagtacaacctcagatatagcagcaggc

SEQ ID NO: 11029 - protein, 86 aa, Homo sapiens; identical to SEQ ID NO: 11027

SEQ ID NO: 11030 - DNA, 530 bp, Homo sapiens
gaaacaagtagtctctggttggctgggcactgtggctcatgtccttaacaccaacactttgggaggccgaggctggtctcaaaccccttacctcaaataatccgcccgcctcagcctcccaaagggctgggattatcggcatgagccactgcgccctgccttctttgttaattttatatgtttcggttatgtaaatatataactgaaagggtaaatatatataaatacatatttactgcacatttatattgatatatatttctctgcttgtatctatctatatacacactttataaataaatgagtcaagatttttaaaacaaaataccaaatttttcagtatcatttgaaatttttcaaaattacttttttaaaatttctgcatattcattcagtgaagttgaatgatccagtgggcactctgtattccttcataaactgtgtggtgaatgtgcgtgtgtgtatgtatgtatatgcacgtgtttatgtgttttctggggttaatttccttaaaataaaaaggcaactgt

SEQ ID NO: 11031 - protein, 51 aa, Homo sapiens
MSLTPTLWEAEAGLKPLTSNNPPASASQRAGIIGMSHCALPSLLILYVSVM

SEQ ID NO: 11032 - DNA, 1911 bp, Homo sapiens
gcgcagtgacgcgccggccatgccggcggctgttgtcgggcctccagcgggcggggccgttggcggagcagaggggaggcgcagccgggcggagggcccacgagggctcagccttcccggtcagcggtggtgacggtatcccagagtgccagagaaccgttgcttttccgagttgctcttcttccaggctccgttggtggtcggcatggcccgtggaaatcaacgagaacttgcccgccagaaaaacatgaagaaaacccaggaaattagcaagggaaagaggaaagaggatagcttgactgcctctcagagaaagcagagttctggaggccagaaatctgagagcaagatgtcagctgggccacacctccctctgaaggctccaagggagaatccttgctttcctcttccagctgctggtggctccaggtattacttggcttatggcagcataactcctatctctgcctttgtctttgtggtcttcttttctgtcttcttcccttctttttatgaggacttttgctgttggatttaggttccattctaacctaggatgatctcatttggaaatccttaatttcatctacaaaaactgttttcccaaataggtcacattcacgcatatcagatggacagatgtatcattttggggtccaccattcaacccactacaaggagttttttaaacaaaaataggaaacttagatgtaacttagcactttttttttttttttttgagatggagtctcactctgtcaccagactggagtgcagtggcgccatctcagctccatgcaacctctgcctcctgggttcaagcagttctcttgcctcagcctcctgggtagctgggattacaggcacgcgctgccacacccaggtaatttatttattttttttttgagacagagtctcgcactgttgcccaggctggactgcagtggcgtgatctctgctcactgcaacctccgcctcccgggttcaagcgattctccagcctcagcttcctgagtagatgggattacaggcgcctgccaccacgcccagctaattttttgtattcttagtagagatggggtttcaccatgttggccaggctggtctccatctcctgacctcgtgattcacccgcctcggcctcccaaagtgctgggattacaggcgtgagtcacagcccccggccataatttagcactttaaaaaataatagccatgttgggccaggcgtggtggctcatgcctgtaatctgagcactttgggagaccaaggcgggtagatcccttgtgcccaggagttcaagaccagcctgggcaacatggcgaaaccccatttctactaaaaatacaaaaattagctggggcgaggggataggccgagttccgggtgtaagggggccattagggagagcagagcgaggcagctgatcttccggattgggggccttgcccggaagctggacctcacggagatgaaacggaagatgcacgaggatatgatctccatacagaactttctcatctacgtggccctgctgcgagtcactccatttatcttaaagaaattggacagcatatgaagattggacatcacatgtgaatgcatgatatgaagagcctggttacagtttctactgttctctgcaagtaaataggcccagaaaggtataagagactctttgaatggacataaaaattctgcttgttaagaacaagttgagctctggtaactgatcttaatagctaaaatataaaaatatttgggaagtctgaaatgaggtctcctggccctggtgtgcccttaatgcctgtgacagttggcctctgtgaatattggtataattgtaaataatgtcaaactccattttctagcaagtattaataattaagggaagtatgtctgaaatggca

SEQ ID NO: 11033 - protein, 110 aa, Homo sapiens; identical to SEQ ID NO: 1014

SEQ ID NO: 11034 - DNA, 701 bp, Homo sapiens
agtgacgcgccggccatgccggcggctgttgtcgggcctccagcgggcggggccgttggcggagcagaggggaggcgcagccgggcggagggcccacgagggctcagccttcccggtcagcggtggtgacggtatcccagagtgccagagaaccgttgcttttccgagttgctcttcttccaggctccgttggtggtcggcatggcccgtggaaatcaacgagaacttgcccgccagaaaaacatgaagaaaacccaggaaattagcaagggaaagaggaaagaggatagcttgactgcctctcagagaaagcagagggactctgagatcatgcaagaaaagcagaaggcagctaatgagaagaagtctatgcagacaagagaaaagtgatgactggctatttggaaaacctgggtgctactgccaactgggtgtatcataagctctaagatcaagattttgtagagtggacagtcattacatatgttataacttatcctttaaaaactattttaaactttatcctttcagctttacttagtgcgatgttttagaagcagtcttcaaagaataaaacactaaccatgcatgtgacatattggtgaacattatttttattattgaacattcatatataatttattaggtaatatgatcagataataggatctcttatataataaagaatctttgtcatcagc

SEQ ID NO: 11035 - protein, 62 aa, Homo sapiens
MARGNQRELARQKNMKKTQEISKGKRKEDSLTASQRKQRDSEIMQEKQKAANEKKSMQTREK

SEQ ID NO: 11036 - DNA, 1275 bp, Homo sapiens
agtgacgcgccggccatgccggcggctgttgtcgggcctccagcgggcggggccgttggcggagcagaggggaggcgcagccgggcggagggcccacgagggctcagccttcccggtcagcggtggtgacggtatcccagagtgccagagaaccgttgcttttccgagttgctcttcttccaggctccgttggtggtcggcatggcccgtggaaatcaacgagaacttgcccgccagaaaaacatgaagaaaacccaggaaattagcaagggaaagaggaaagaggatagcttgactgcctctcagagaaagcagagggactctgagatcatgcaagaaaagcagaaggcagctaatgagaagaagtctatgcagacaagagaaaagtgatgactggctatttggaaaacctgggtgctactgccaactgggtgtatcataagctctaagatcaagattttgtagagtggacagtcattacatatgttataacttatcctttaaaaactattttaaactttatcctttcagctttacttagtgcgatgttttagaagcagtcttcaaagaataaaacactaaccatgcatgtgacatattggtgaacattatttttattattgaacattcatatataatttattaggtaatatgatcagataataggatctcttatataataaagaatctttgtcatcagctttgttaacatagtttttttttcctcacagtttctaaggataaggataaaatagatctttgaagtaaacttaaatatataatagaagttagggtccatttgtataattttgctttgaaatcaagttaaagggccaggtgcggtggcttatgcccacaatcccagcactttgggaggccgaggcgggcggatcacttgaggtcaggagtttgagaccagcctgaccaacatgatgaaacctcatctttactaaaaatacaaaaaaaaaaaaaaaaaaaaaatagccaggtgtgtggtggcacatgcctgtaatctcagctactcgggaggctgaggcaggaaaatcgcttgaacccaaggcagaggttgcagtcagcagatattgcaccactgcactccagcctgggcaacaaagcaagactctgcctcaaaaaaaaaaaaaaatcaacttacaaagcttgcttgaacaatttacaacagatacttcaaaccactggaatagaaactaagtggatgtaaactgaggtctcagttctacttatagctttaacattttttggaatgagtaccatatt

SEQ ID NO: 11037 - protein, 62 aa, Homo sapiens; identical to SEQ ID NO: 11035

SEQ ID NO: 11038 - DNA, 530 bp, Homo sapiens
gcagaggggaggcgcagccgggcggagggcccacgagggctcagccttcccggtcagcggtggtgacggtatcccagagtgccagagaaccgttgcttttccgagttgctcttcttccaggctccgttggtggtcggcatggcccgtggaaatcaacgagaacttgcccgccagaaaaacatgaagaaaacccaggaaattagcaagggaaagaggaaagaggatagcttgactgcctctcagagaaagcagagggactctgagatcatgcaagaaaagcagaaggcagctaatgagaagaagtctatgcagacaagagaaaagtgatgactggctatttggaaaacctgggtgctactgccaactgggtgtatcataagctctaagatcaagattttgtagagtggacagtcattacatatgttataacttatcctttaaaaactattttaaactttatcctttcagctttacttagtgcgatgttttagaagcagtcttcaaagaataaaacactaaccatgcatgtg

SEQ ID NO: 11039 - protein, 62 aa, Homo sapiens; identical to SEQ ID NO: 11035

SEQ ID NO: 11040 - DNA, 1688 bp, Homo sapiens
ttcccggtcagcggtggtgacggtatcccagagtgccagagaaccgttgcttttccgagttgctcttcttccaggctccgttggtggtcggcatggcccgtggaaatcaacgagaacttgcccgccagaaaaacatgaagaaaacccaggaaattagcaagggaaagaggaaagaggatagcttgactgcctctcagagaaagcagagttctggaggccagaaatctgagagcaagatgtcagctgggccacacctccctctgaaggctccaagggagaatccttgctttcctcttccagctgctggtggctccaggttccattctaacctaggatgatctcatttggaaatccttaatttcatctacaaaaactgttttcccaaataggtcacattcacgcatatcagatggacagatgtatcattttggggtccaccattcaacccactacaaggagttttttaaacaaaaataggaaacttagatgtaacttagcactttttttttttttttttgagatggagtctcactctgtcaccagactggagtgcagtggcgccatctcagctccatgcaacctctgcctcctgggttcaagcagttctcttgcctcagcctcctgggtagctgggattacaggcacgcgctgccacacccaggtaatttatttattttttttttgagacagagtctcgcactgttgcccaggctggactgcagtggcgtgatctctgctcactgcaacctccgcctcccgggttcaagcgattctccagcctcagcttcctgagtagatgggattacaggcgcctgccaccacgcccagctaattttttgtattcttagtagagatggggtttcaccatgttggccaggctggtctccatctcctgacctcgtgattcacccgcctcggcctcccaaagtgctgggattacaggcgtgagtcacagcccccggccataatttagcactttaaaaaataatagccatgttgggccaggcgtggtggctcatgcctgtaatctgagcactttgggagaccaaggcgggtagatcccttgtgcccaggagttcaagaccagcctgggcaacatggcgaaaccccatttctactaaaaatacaaaaattagctggggcgaggggataggccgagttccgggtgtaagggggccattagggagagcagagcgaggcagctgatcttccggattgggggccttgcccggaagctggacctcacggagatgaaacggaagatgcacgaggatatgatctccatacagaactttctcatctacgtggccctgctgcgagtcactccatttatcttaaagaaattggacagcatatgaagattggacatcacatgtgaatgcatgatatgaagagcctggttacagtttctactgttctctgcaagtaaataggcccagaaaggtataagagactctttgaatggacataaaaattctgcttgttaagaacaagttgagctctggtaactgatcttaatagctaaaatataaaaatatttgggaagtctgaaatgaggtctcctggccctggtgtgcccttaatgcctgtgacagttggcctctgtgaatattggtataattgtaaataatgtcaaactccattttctagcaagtattaataattaagggaagtatgtctgaaatggc

SEQ ID NO: 11041 - protein, 81 aa, Homo sapiens
MARGNQRELARQKNMKKTQEISKGKRKEDSLTASQRKQSSGGQKSESKMSAGPHLPLKAPRENPCFPLPAAGGSRFHSNLG

SEQ ID NO: 11042 - DNA, 1896 bp, Homo sapiens
ggagtccggctggagaatccccctgggtcgcgcagtgcggggatccccgcttcagtcggcagagagagagctcgcgggtggttccggtccggcttttcaggccggacgggtgcctgcccctcaggtgcgagtttgtgcggtaaagaacacaccccggagatgtggacacggccgccccaggagggtccttgtttggaggtggaaatcaacgagaacttgcccgccagaaaaacatgaagaaaacccaggaaattagcaagggaaagaggaaagaggatagcttgactgcctctcagagaaagcagagttctggaggccagaaatctgagagcaagatgtcagctgggccacacctccctctgaaggctccaagggagaatccttgctttcctcttccagctgctggtggctccaggtattacttggcttatggcagcataactcctatctctgcctttgtctttgtggtcttcttttctgtcttcttcccttctttttatgaggacttttgctgttggatttaggttccattctaacctaggatgatctcatttggaaatccttaatttcatctacaaaaactgttttcccaaataggtcacattcacgcatatcagatggacagatgtatcattttggggtccaccattcaacccactacaaggagttttttaaacaaaaataggaaacttagatgtaacttagcactttttttttttttttttgagatggagtctcactctgtcaccagactggagtgcagtggcgccatctcagctccatgcaacctctgcctcctgggttcaagcagttctcttgcctcagcctcctgggtagctgggattacaggcacgcgctgccacacccaggtaatttatttattttttttttgagacagagtctcgcactgttgcccaggctggactgcagtggcgtgatctctgctcactgcaacctccgcctcccgggttcaagcgattctccagcctcagcttcctgagtagatgggattacaggcgcctgccaccacgcccagctaattttttgtattcttagtagagatggggtttcaccatgttggccaggctggtctccatctcctgacctcgtgattcacccgcctcggcctcccaaagtgctgggattacaggcgtgagtcacagcccccggccataatttagcactttaaaaaataatagccatgttgggccaggcgtggtggctcatgcctgtaatctgagcactttgggagaccaaggcgggtagatcccttgtgcccaggagttcaagaccagcctgggcaacatggcgaaaccccatttctactaaaaatacaaaaattagctggggcgaggggataggccgagttccgggtgtaagggggccattagggagagcagagcgaggcagctgatcttccggattgggggccttgcccggaagctggacctcacggagatgaaacggaagatgcacgaggatatgatctccatacagaactttctcatctacgtggccctgctgcgagtcactccatttatcttaaagaaattggacagcatatgaagattggacatcacatgtgaatgcatgatatgaagagcctggttacagtttctactgttctctgcaagtaaataggcccagaaaggtataagagactctttgaatggacataaaaattctgcttgttaagaacaagttgagctctggtaactgatcttaatagctaaaatataaaaatatttgggaagtctgaaatgaggtctcctggccctggtgtgcccttaatgcctgtgacagttggcctctgtgaatattggtataattgtaaataatgtcaaactccattttctagcaagtattaataattaagggaagtatgtctgaaatggc

SEQ ID NO: 11043 - protein, 96 aa, Homo sapiens
MKKTQEISKGKRKEDSLTASQRKQSSGGQKSESKMSAGPHLPLKAPRENPCFPLPAAGGSRYYLAYGSITPISAFVFVVFFSVFFPSFYEDFCCWI

SEQ ID NO: 11044 - DNA, 559 bp, Homo sapiens
gggtcgcgcagtgcggggatccccgcttcagtcggcagagagagagctcgcgggtggttccggtccggcttttcaggccggacgggtgcctgcccctcaggtgcgagtttgtgcggtaaagaacacaccccggagatgtggacacggccgccccaggagggtccttgtttggaggtggaaatcaacgagaacttgcccgccagaaaaacatgaagaaaacccaggaaattagcaagggaaagaggaaagaggatagcttgactgcctctcagagaaagcagagggactctgagatcatgcaagaaaagcagaaggcagctaatgagaagaagtctatgcagacaagagaaaagtgatgactggctatttggaaaacctgggtgctactgccaactgggtgtatcataagctctaagatcaagattttgtagagtggacagtcattacatatgttataacttatcctttaaaaactattttaaactttatcctttcagctttacttagtgcgatgttttagaagcagtcttcaaagaataaaacactaaccatgcatgtg

SEQ ID NO: 11045 - protein, 48 aa, Homo sapiens
MKKTQEISKGKRKEDSLTASQRKQRDSEIMQEKQKAANEKKSMQTREK

SEQ ID NO: 11046 - DNA, 665 bp, Homo sapiens
gtcgcgcagtgcggggatccccgcttcagtcggcagagagagagctcgcgggtggttccggtccggcttttcaggccggacgggtgcctgcccctcaggtgcgagtttgtgcggtaaagaacacaccccggagatgtggacacggccgccccaggagggtccttgtttggaggtggaaatcaacgagaacttgcccgccagaaaaacatgaagaaaacccaggaaattagcaagggaaagaggaaagaggatagcttgactgcctctcagagaaagcagagggactctgagatcatgcaagaaaagcagaaggcagctaatgagaagaagtctatgcagacaagagaaaagtgatgactggctatttggaaaacctgggtgctactgccaactgggtgtatcataagctctaagatcaagattttgtagagtggacagtcattacatatgttataacttatcctttaaaaactattttaaactttatcctttcagctttacttagtgcgatgttttagaagcagtcttcaaagaataaaacactaaccatgcatgtgacatattggtgaacattatttttattattgaacattcatatataatttattaggtaatatgatcagataataggatctcttatataataaagaatctttgtcatcagc

SEQ ID NO: 11047 - protein, 48 aa, Homo sapiens; identical to SEQ ID NO: 11045

SEQ ID NO: 11048 - DNA, 1239 bp, Homo sapiens
gtcgcgcagtgcggggatccccgcttcagtcggcagagagagagctcgcgggtggttccggtccggcttttcaggccggacgggtgcctgcccctcaggtgcgagtttgtgcggtaaagaacacaccccggagatgtggacacggccgccccaggagggtccttgtttggaggtggaaatcaacgagaacttgcccgccagaaaaacatgaagaaaacccaggaaattagcaagggaaagaggaaagaggatagcttgactgcctctcagagaaagcagagggactctgagatcatgcaagaaaagcagaaggcagctaatgagaagaagtctatgcagacaagagaaaagtgatgactggctatttggaaaacctgggtgctactgccaactgggtgtatcataagctctaagatcaagattttgtagagtggacagtcattacatatgttataacttatcctttaaaaactattttaaactttatcctttcagctttacttagtgcgatgttttagaagcagtcttcaaagaataaaacactaaccatgcatgtgacatattggtgaacattatttttattattgaacattcatatataatttattaggtaatatgatcagataataggatctcttatataataaagaatctttgtcatcagctttgttaacatagtttttttttcctcacagtttctaaggataaggataaaatagatctttgaagtaaacttaaatatataatagaagttagggtccatttgtataattttgctttgaaatcaagttaaagggccaggtgcggtggcttatgcccacaatcccagcactttgggaggccgaggcgggcggatcacttgaggtcaggagtttgagaccagcctgaccaacatgatgaaacctcatctttactaaaaatacaaaaaaaaaaaaaaaaaaaaaatagccaggtgtgtggtggcacatgcctgtaatctcagctactcgggaggctgaggcaggaaaatcgcttgaacccaaggcagaggttgcagtcagcagatattgcaccactgcactccagcctgggcaacaaagcaagactctgcctcaaaaaaaaaaaaaaatcaacttacaaagcttgcttgaacaatttacaacagatacttcaaaccactggaatagaaactaagtggatgtaaactgaggtctcagttctacttatagctttaacattttttggaatgagtaccatatt

SEQ ID NO: 11049 - protein, 48 aa, Homo sapiens; identical to SEQ ID NO: 11045

SEQ ID NO: 11050 - DNA, 635 bp, Homo sapiens
agatctaggagcaccatcaatctgttactctgctagtttatctatgaaaacacaaactaaagatgcatttaaataaggcctgtttattggaattattaataattttggagatgggaaaagagcatgactgtttgactttgtaggtggaaatcaacgagaacttgcccgccagaaaaacatgaagaaaacccaggaaattagcaagggaaagaggaaagaggatagcttgactgcctctcagagaaagcagagggactctgagatcatgcaagaaaagcagaaggcagctaatgagaagaagtctatgcagacaagagaaaagtgatgactggctatttggaaaacctgggtgctactgccaactgggtgtatcataagctctaagatcaagattttgtagagtggacagtcattacatatgttataacttatcctttaaaaactattttaaactttatcctttcagctttacttagtgcgatgttttagaagcagtcttcaaagaataaaacactaaccatgcatgtgacatattggtgaacattatttttattattgaacattcatatataatttattaggtaatatgatcagataataggatctcttatataataaagaatctttgtcatcag

SEQ ID NO: 11051 - protein, 48 aa, Homo sapiens; identical to SEQ ID NO: 11045

SEQ ID NO: 11052 - DNA, 1210 bp, Homo sapiens
agatctaggagcaccatcaatctgttactctgctagtttatctatgaaaacacaaactaaagatgcatttaaataaggcctgtttattggaattattaataattttggagatgggaaaagagcatgactgtttgactttgtaggtggaaatcaacgagaacttgcccgccagaaaaacatgaagaaaacccaggaaattagcaagggaaagaggaaagaggatagcttgactgcctctcagagaaagcagagggactctgagatcatgcaagaaaagcagaaggcagctaatgagaagaagtctatgcagacaagagaaaagtgatgactggctatttggaaaacctgggtgctactgccaactgggtgtatcataagctctaagatcaagattttgtagagtggacagtcattacatatgttataacttatcctttaaaaactattttaaactttatcctttcagctttacttagtgcgatgttttagaagcagtcttcaaagaataaaacactaaccatgcatgtgacatattggtgaacattatttttattattgaacattcatatataatttattaggtaatatgatcagataataggatctcttatataataaagaatctttgtcatcagctttgttaacatagtttttttttcctcacagtttctaaggataaggataaaatagatctttgaagtaaacttaaatatataatagaagttagggtccatttgtataattttgctttgaaatcaagttaaagggccaggtgcggtggcttatgcccacaatcccagcactttgggaggccgaggcgggcggatcacttgaggtcaggagtttgagaccagcctgaccaacatgatgaaacctcatctttactaaaaatacaaaaaaaaaaaaaaaaaaaaaatagccaggtgtgtggtggcacatgcctgtaatctcagctactcgggaggctgaggcaggaaaatcgcttgaacccaaggcagaggttgcagtcagcagatattgcaccactgcactccagcctgggcaacaaagcaagactctgcctcaaaaaaaaaaaaaaatcaacttacaaagcttgcttgaacaatttacaacagatacttcaaaccactggaatagaaactaagtggatgtaaactgaggtctcagttctacttatagctttaacattttttggaatgagtaccatatt

SEQ ID NO: 11053 - protein, 48 aa, Homo sapiens; identical to SEQ ID NO: 11045

SEQ ID NO: 11054 - DNA, 800 bp, Homo sapiens
tctcttgcctcagcctcctgggtagctgggattacaggcacgcgctgccacacccaggtaatttatttattttttttttgagacagagtctcgcactgttgcccaggctggactgcagtggcgtgatctctgctcactgcaacctccgcctcccgggttcaagcgattctccagcctcagcttcctgagtagatgggattacaggcgcctgccaccacgcccatttctactaaaaatacaaaaattagctggggcgaggggataggccgagttccgggtgtaagggggccattagggagagcagagcgaggcagctgatcttccggattgggggccttgcccggaagctggacctcacggagatgaaacggaagatgcacgaggatatgatctccatacagaactttctcatctacgtggccctgctgcgagtcactccatttatcttaaagaaattggacagcatatgaagattggacatcacatgtgaatgcatgatatgaagagcctggttacagtttctactgttctctgcaagtaaataggcccagaaaggtataagagactctttgaatggacataaaaattctgcttgttaagaacaagttgagctctggtaactgatcttaatagctaaaatataaaaatatttgggaagtctgaaatgaggtctcctggccctggtgtgcccttaatgcctgtgacagttggcctctgtgaatattggtataattgtaaataatgtcaaactccattttctagcaagtattaataattaagggaagtatgtctgaaatggc

SEQ ID NO: 11055 - protein, 41 aa, Homo sapiens
MGLQAPATTPISTKNTKISWGEGIGRVPGVRGPLGRAERGS

SEQ ID NO: 11056 - DNA, 1625 bp, Homo sapiens
ccacaaatgtgggagggcgataaccactcgtagaaagcgtgagaagttactacaagcggtcctcccggccaccgtactgttccgctcccagaagccccgggcggcggaagtcgtcactcttaagaagggacggggccccacgctgcgcacccgcgggtttgctatggcgatgagcagcggcggcagtggtggcggcgtcccggagcaggaggattccgtgctgttccggcgcggcacaggccagagcgatgattctgacatttgggatgatacagcactgataaaagcatatgataaagctgtggcttcatttaagcatgctctaaagaatggtgacatttgtgaaacttcgggtaaaccaaaaaccacacctaaaagaaaacctgctaagaagaataaaagccaaaagaagaatactgcagcttccttacaacagtggaaagttggggacaaatgttctgccatttggtcagaagacggttgcatttacccagctaccattgcttcaattgattttaagagagaaacctgtgttgtggtttacactggatatggaaatagagaggagcaaaatctgtccgatctactttccccaatctgtgaagtagctaataatatagaacaaaatgctcaagagaatgaaaatgaaagccaagtttcaacagatgaaagtgagaactccaggtctcctggaaataaatcagataacatcaagcccaaatctgctccatggaactcttttctccctccaccaccccccatgccagggccaagactgggaccaggaaagccaggtctaaaattcaatggcccaccaccgccaccgccaccaccaccaccccacttactatcatgctggctgcctccatttccttctggaccaccaataattcccccaccacctcccatatgtccagattctcttgatgatgctgatgctttgggaagtatgttaatttcatggtacatgagtggctatcatactggctattatatgggttttagacaaaatcaaaaagaaggaaggtgctcacattccttaaattaaggagaaatgctggcatagagcagcactaaatgacaccactaaagaaacgatcagacagatctggaatgtgaagcgttatagaagataactggcctcatttcttcaaaatatcaagtgttgggaaagaaaaaaggaagtggaatgggtaactcttcttgattaaaagttatgtaataaccaaatgcaatgtgaaatattttactggactctattttgaaaaaccatctgtaaaagactgaggtgggggtgggaggccagcacggtggtgaggcagttgagaaaatttgaatgtggattagattttgaatgatattggataattattggtaattttatgagctgtgagaagggtgttgtagtttataaaagactgtcttaatttgcatacttaagcatttaggaatgaagtgttagagtgtcttaaaatgtttcaaatggtttaacaaaatgtatgtgaggcgtatgtggcaaaatgttacagaatctaactggtggacatggctgttcattgtactgtttttttctatcttctatatgtttaaaagtatataataaaaatatttaatttttttttaaa

SEQ ID NO: 11057 - protein, 294 aa, Homo sapiens; identical to SEQ ID NO: 1016

SEQ ID NO: 11058 - DNA, 1529 bp, Homo sapiens
ccacaaatgtgggagggcgataaccactcgtagaaagcgtgagaagttactacaagcggtcctcccggccaccgtactgttccgctcccagaagccccgggcggcggaagtcgtcactcttaagaagggacggggccccacgctgcgcacccgcgggtttgctatggcgatgagcagcggcggcagtggtggcggcgtcccggagcaggaggattccgtgctgttccggcgcggcacaggccagagcgatgattctgacatttgggatgatacagcactgataaaagcatatgataaagctgtggcttcatttaagcatgctctaaagaatggtgacatttgtgaaacttcgggtaaaccaaaaaccacacctaaaagaaaacctgctaagaagaataaaagccaaaagaagaatactgcagcttccttacaacagtggaaagttggggacaaatgttctgccatttggtcagaagacggttgcatttacccagctaccattgcttcaattgattttaagagagaaacctgtgttgtggtttacactggatatggaaatagagaggagcaaaatctgtccgatctactttccccaatctgtgaagtagctaataatatagaacaaaatgctcaagagaatgaaaatgaaagccaagtttcaacagatgaaagtgagaactccaggtctcctggaaataaatcagataacatcaagcccaaatctgctccatggaactcttttctccctccaccaccccccatgccagggccaagactgggaccaggaaagataattcccccaccacctcccatatgtccagattctcttgatgatgctgatgctttgggaagtatgttaatttcatggtacatgagtggctatcatactggctattatatgggttttagacaaaatcaaaaagaaggaaggtgctcacattccttaaattaaggagaaatgctggcatagagcagcactaaatgacaccactaaagaaacgatcagacagatctggaatgtgaagcgttatagaagataactggcctcatttcttcaaaatatcaagtgttgggaaagaaaaaaggaagtggaatgggtaactcttcttgattaaaagttatgtaataaccaaatgcaatgtgaaatattttactggactctattttgaaaaaccatctgtaaaagactgaggtgggggtgggaggccagcacggtggtgaggcagttgagaaaatttgaatgtggattagattttgaatgatattggataattattggtaattttatgagctgtgagaagggtgttgtagtttataaaagactgtcttaatttgcatacttaagcatttaggaatgaagtgttagagtgtcttaaaatgtttcaaatggtttaacaaaatgtatgtgaggcgtatgtggcaaaatgttacagaatctaactggtggacatggctgttcattgtactgtttttttctatcttctatatgtttaaaagtatataataaaaatatttaatttttttttaaa

SEQ ID NO: 11059 - protein, 262 aa, Homo sapiens; identical to SEQ ID NO: 1018

SEQ ID NO: 11060 - DNA, 1477 bp, Homo sapiens
ccacaaatgtgggagggcgataaccactcgtagaaagcgtgagaagttactacaagcggtcctcccggccaccgtactgttccgctcccagaagccccgggcggcggaagtcgtcactcttaagaagggacggggccccacgctgcgcacccgcgggtttgctatggcgatgagcagcggcggcagtggtggcggcgtcccggagcaggaggattccgtgctgttccggcgcggcacaggccagagcgatgattctgacatttgggatgatacagcactgataaaagcatatgataaagctgtggcttcatttaagcatgctctaaagaatggtgacatttgtgaaacttcgggtaaaccaaaaaccacacctaaaagaaaacctgctaagaagaataaaagccaaaagaagaatactgcagcttccttacaacagtggaaagttggggacaaatgttctgccatttggtcagaagacggttgcatttacccagctaccattgcttcaattgattttaagagagaaacctgtgttgtggtttacactggatatggaaatagagaggagcaaaatctgtccgatctactttccccaatctgtgaagtagctaataatatagaacaaaatgctcaagagaatgaaaatgaaagccaagtttcaacagatgaaagtgagaactccaggtctcctggaaataaatcagataacatcaagcccaaatctgctccatggaactcttttctccctccaccaccccccatgccagggccaagactgggaccaggaaagataattcccccaccacctcccatatgtccagattctcttgatgatgctgatgctttgggaagtatgttaatttcatggtacatgagtggctatcatactggctattatatggaaatgctggcatagagcagcactaaatgacaccactaaagaaacgatcagacagatctggaatgtgaagcgttatagaagataactggcctcatttcttcaaaatatcaagtgttgggaaagaaaaaaggaagtggaatgggtaactcttcttgattaaaagttatgtaataaccaaatgcaatgtgaaatattttactggactctattttgaaaaaccatctgtaaaagactgaggtgggggtgggaggccagcacggtggtgaggcagttgagaaaatttgaatgtggattagattttgaatgatattggataattattggtaattttatgagctgtgagaagggtgttgtagtttataaaagactgtcttaatttgcatacttaagcatttaggaatgaagtgttagagtgtcttaaaatgtttcaaatggtttaacaaaatgtatgtgaggcgtatgtggcaaaatgttacagaatctaactggtggacatggctgttcattgtactgtttttttctatcttctatatgtttaaaagtatataataaaaatatttaatttttttttaaatt

SEQ ID NO: 11061 - protein, 250 aa, Homo sapiens; identical to SEQ ID NO: 1026

SEQ ID NO: 11062 - DNA, 1573 bp, Homo sapiens
ccacaaatgtgggagggcgataaccactcgtagaaagcgtgagaagttactacaagcggtcctcccggccaccgtactgttccgctcccagaagccccgggcggcggaagtcgtcactcttaagaagggacggggccccacgctgcgcacccgcgggtttgctatggcgatgagcagcggcggcagtggtggcggcgtcccggagcaggaggattccgtgctgttccggcgcggcacaggccagagcgatgattctgacatttgggatgatacagcactgataaaagcatatgataaagctgtggcttcatttaagcatgctctaaagaatggtgacatttgtgaaacttcgggtaaaccaaaaaccacacctaaaagaaaacctgctaagaagaataaaagccaaaagaagaatactgcagcttccttacaacagtggaaagttggggacaaatgttctgccatttggtcagaagacggttgcatttacccagctaccattgcttcaattgattttaagagagaaacctgtgttgtggtttacactggatatggaaatagagaggagcaaaatctgtccgatctactttccccaatctgtgaagtagctaataatatagaacaaaatgctcaagagaatgaaaatgaaagccaagtttcaacagatgaaagtgagaactccaggtctcctggaaataaatcagataacatcaagcccaaatctgctccatggaactcttttctccctccaccaccccccatgccagggccaagactgggaccaggaaagccaggtctaaaattcaatggcccaccaccgccaccgccaccaccaccaccccacttactatcatgctggctgcctccatttccttctggaccaccaataattcccccaccacctcccatatgtccagattctcttgatgatgctgatgctttgggaagtatgttaatttcatggtacatgagtggctatcatactggctattatatggaaatgctggcatagagcagcactaaatgacaccactaaagaaacgatcagacagatctggaatgtgaagcgttatagaagataactggcctcatttcttcaaaatatcaagtgttgggaaagaaaaaaggaagtggaatgggtaactcttcttgattaaaagttatgtaataaccaaatgcaatgtgaaatattttactggactctattttgaaaaaccatctgtaaaagactgaggtgggggtgggaggccagcacggtggtgaggcagttgagaaaatttgaatgtggattagattttgaatgatattggataattattggtaattttatgagctgtgagaagggtgttgtagtttataaaagactgtcttaatttgcatacttaagcatttaggaatgaagtgttagagtgtcttaaaatgtttcaaatggtttaacaaaatgtatgtgaggcgtatgtggcaaaatgttacagaatctaactggtggacatggctgttcattgtactgtttttttctatcttctatatgtttaaaagtatataataaaaatatttaatttttttttaaatt

SEQ ID NO: 11063 - protein, 282 aa, Homo sapiens; identical to SEQ ID NO: 1022

SEQ ID NO: 11064 - DNA, 433 bp, Homo sapiens
gcacccgcgggtttgctatggcgatgagcagcggcggcagtggtggcggcgtcccggagcaggaggattccgtgctgttccggcgcggcacaggccagagcgatgattctgacatttgggatgatacagcactgataaaagcatatgataaagctgtggcttcatttaagcatgctctaaagaatggtgacatttgtgaaacttcgggtaaaccaaaaaccacacctaaaagaaaacctgctaagaagaatgttctgccatttggtcagaagacggttgcatttacccagctaccattgcttcaattgattttaagagagaaacctgtgttgtggtttacactggatatggaaatagagaggagcaaaatctgtccgatctactttccccaatctgtgaagtagctaataatatagaacaaaatgctcaagag

SEQ ID NO: 11065 - protein, 128 aa, Homo sapiens
MAMSSGGSGGGVPEQEDSVLFRRGTGQSDDSDIWDDTALIKAYDKAVASFKHALKNGDICETSGKPKTTPKRKPAKKNVLPFGQKTVAFTQLPLLQLILREKPVLWFTLDMEIERSKICPIYFPQSVK

SEQ ID NO: 11066 - DNA, 798 bp, Homo sapiens
ataattcccccaccacctcccatatgtccagattctcttgatgatgctgatgctttgggaagtatgttaatttcatggtacatgagtggctatcatactggctattatatggtaaacagggtttcactgtgttagccaggatggtctcaatctcctgaccccgtgatccacccgcctcggccttccaagagaaatgaaatttttttaatgcacaaagatctggggaaatgctggcatagagcagcactaaatgacaccactaaagaaacgatcagacagatctggaatgtgaagcgttatagaagataactggcctcatttcttcaaaatatcaagtgttgggaaagaaaaaaggaagtggaatgggtaactcttcttgattaaaagttatgtaataaccaaatgcaatgtgaaatattttactggactctattttgaaaaaccatctgtaaaagactgaggtgggggtgggaggccagcacggtggtgaggcagttgagaaaatttgaatgtggattagattttgaatgatattggataattattggtaattttatgagctgtgagaagggtgttgtagtttataaaagactgtcttaatttgcatacttaagcatttaggaatgaagtgttagagtgtcttaaaatgtttcaaatggtttaacaaaatgtatgtgaggcgtatgtggcaaaatgttacagaatctaactggtggacatggctgttcattgtactgtttttttctatcttctatatgtttaaaagtatataataaaaatatttaatttttttttaaa

SEQ ID NO: 11067 - protein, 33 aa, Homo sapiens
MHKDLGKCWHRAALNDTTKETIRQIWNVKRYRR

SEQ ID NO: 11068 - DNA, 1578 bp, Homo sapiens
cccaagtgctgggattataggcgtgagccactgtgcccggcctagtcttgtatttttagtagagtcgggatttctccatgttggccaggctgttctcgaactcctgagctcaggtgatccaactgtctcggcctcccaaagtgctgggattacaggcgtgagccactgtgcctagcctgagccaccacgccggcctaatttttaaattttttgtagagacagggtctcattatgttgcccagggtggtgtcaagctccaggtctcaagtgatccccctacctccgcctcccaaagttgtgggattgtaggcatgagccactgcaagaaaaccttaactgcagcctaataattgttttctttgggataacttttaaagtacattaaaagactatcaacttaatttctgatcatattttgttgaataaaataagtaaaatgtcttgtgaaacaaaatgctttttaacatccatataaagctatctatatatagctatctatatctatatagctattttttttaacttcctttattttccttacagggttttagacaaaatcaaaaagaaggaaggtgctcacattccttaaattaaggagtaagtctgccagcattatgaaagtgaatcttacttttgtaaaactttatggtttgtggaaaacaaatgtttttgaacatttaaaaagttcagatgttagaaagttgaaaggttaatgtaaaacaatcaatattaaagaattttgatgccaaaactattagataaaaggttaatctacatccctactagaattctcatacttaactggttggttgtgtggaagaaacatactttcacaataaagagctttaggatatgatgccattttatatcactagtaggcagaccagcagacttttttttattgtgatatgggataacctaggcatactgcactgtacactctgacatatgaagtgctctagtcaagtttaactggtgtccacagaggacatggtttaactggaattcgtcaagcctctggttctaatttctcatttgcaggaaatgctggcatagagcagcactaaatgacaccactaaagaaacgatcagacagatctggaatgtgaagcgttatagaagataactggcctcatttcttcaaaatatcaagtgttgggaaagaaaaaaggaagtggaatgggtaactcttcttgattaaaagttatgtaataaccaaatgcaatgtgaaatattttactggactctattttgaaaaaccatctgtaaaagactgaggtgggggtgggaggccagcacggtggtgaggcagttgagaaaatttgaatgtggattagattttgaatgatattggataattattggtaattttatgagctgtgagaagggtgttgtagtttataaaagactgtcttaatttgcatacttaagcatttaggaatgaagtgttagagtgtcttaaaatgtttcaaatggtttaacaaaatgtatgtgaggcgtatgtggcaaaatgttacagaatctaactggtggacatggctgttcattgtactgtttttttctatcttctatatgttt

SEQ ID NO: 11069 - protein, 37 aa, Homo sapiens
MPKLLDKRLIYIPTRILILNWLVVWKKHTFTIKSFRI

SEQ ID NO: 11070 - DNA, 5934 bp, Homo sapiens
atgattacaacatgatgcaccactctcctatacaaattttgatttaagaaaagattttatttttcaaaggaaaccacaagtgaaagcaatcttgaagattcaatagcagttggtcctatagtgccaggtaagaactttgaagtagcacgtgggattatatgtatttgtaaatatatttgtatacagggcagttgcaaaaaaaagagtatttataattgtccaaagagcttccaaagaggagcagcattgcaacagtgtcgtgtatgagcaaaagtcaagattcttgtggcttctccagagtgcaggcaggaccaaactgatagtaggcaacgtgtctcaggtacaagcaaaccagtccttagaagcaccaatcagtaaacttctttcctgagatttttatttttattcattttattttattttattttatttgagacagggtcttactttgtcacccaggctggaatgcaatggcaagatcatggctcactgcagcgtcgacctcccaggctcaagtgatcctcccatctcagcctccccagtagctgggaccacaagcatgtgccaccacacctggctaatttttgtattttttgtagagacagggttttgccatgttggccaggctggtcttgaactcctaggctcaagcaattcgcctgcctcggtctcccacagtgctgggattacaggcatgagtcactttgcctggcctctttcctgagatgcatggtgcttatgataagcacacattatgtctaggtccctgcttcaagtgtggcactttggacacatgctttccacattccgattttgtgccaaaacctatgagatgattgcaatgtgggaatcatggatggctgtggaaaatcctaacacattcgtagtagacaggcagaatcatggaatgaaaaggcatggcgttcagactgagggagatgtgactatgaatccctgttgtgcccccctttctttctctccacagaaatggcacagggtgaagcccagtggtttcaagaggcaaagaatctgaatgagcagctgagagcagcttataccagcgccagtttccgccacatgtctttgcttgatatctcttccgatctggccacggaccacttgctgggctgtgatctgtctattgcttcaaaacacatcagcaaacctgtgcaagaacctctggtgctgcctgaggtctttggcaacttgaactctgtcatgtgtgtggagggtgaagctggaagtggaaagacggtcctcctgaagaaaatagcttttctgtgggcatctggatgctgtcccctgttaaacaggttccagctggttttctacctctcccttagttccaccagaccagacgaggggctggccagtatcatctgtgaccagctcctagagaaagaaggatctgttactgaaatgtgcatgaggaacattatccagcagttaaagaatcaggtcttattccttttagatgactacaaagaaatatgttcaatccctcaagtcataggaaaactgattcaaaaaaaccacttatcccggacctgcctattgattgctgtccgtacaaacagggccagggacatccgccgatacctagagaccattctagagatcaaagcatttcccttttataatactgtctgtatattacggaagctcttttcacataatatgactcgtctgcgaaagtttatggtttactttggaaagaaccaaagtttgcagaagatacagaaaactcctctctttgtggcggcgatctgtgctcattggtttcagtatccttttgacccatcctttgatgatgtggctgttttcaagtcctatatggaacgcctttccttaaggaacaaagcgacagctgaaattctcaaagcaactgtgtcctcctgtggtgagctggccttgaaagggtttttttcatgttgctttgagtttaatgatgatgatctcgcagaagcaggggttgatgaagatgaagatctaaccatgtgcttgatgagcaaatttacagcccagagactaagaccattctaccggtttttaagtcctgccttccaagaatttcttgcggggatgaggctgattgaactcctggattcagataggcaggaacatcaagatttgggactgtatcatttgaaacaaatcaactcacccatgatgactgtaagcgcctacaacaattttttgaactatgtctccagcctcccttcaacaaaagcagggcccaaaattgtgtctcatttgctccatttagtggataacaaagagtcattggagaatatatctgaaaatgatgactacttaaagcaccagccagaaatttcactgcagatgcagttacttaggggattgtggcaaatttgtccacaagcttacttttcaatggtttcagaacatttactggttcttgccctgaaaactgcttatcaaagcaacactgttgctgcgtgttctccatttgttttgcaattccttcaagggagaacactgactttgggtgcgcttaacttacagtactttttcgaccacccagaaagcttgtcattgttgaggagcatccacttcccaatacgaggaaataagacatcacccagagcacatttttcagttctggaaacatgttttgacaaatcacaggtgccaactatagatcaggactatgcttctgcctttgaacctatgaatgaatgggagcgaaatttagctgaaaaagaggataatgtaaagagctatatggatatgcagcgcagggcatcaccagaccttagtactggctattggaaactttctccaaagcagtacaagattccctgtctagaagtcgatgtgaatgatattgatgttgtaggccaggatatgcttgagattctaatgacagttttctcagcttcacagcgcatcgaactccatttaaaccacagcagaggctttatagaaagcatccgcccagctcttgagctgtctaaggcctctgtcaccaagtgctccataagcaagttggaactcagcgcagccgaacaggaactgcttctcaccctgccttccctggaatctcttgaagtctcagggacaatccagtcacaagaccaaatctttcctaatctggataagttcctgtgcctgaaagaactgtctgtggatctggagggcaatataaatgttttttcagtcattcctgaagaatttccaaacttccaccatatggagaaattattgatccaaatttcagctgagtatgatccttccaaactagtaaaattaattcaaaattctccaaaccttcatgttttccatctgaagtgtaacttcttttcggattttgggtctctcatgactatgcttgtttcctgtaagaaactcacagaaattaagttttcggattcattttttcaagccgtcccatttgttgccagtttgccaaattttatttctctgaagatattaaatcttgaaggccagcaatttcctgatgaggaaacatcagaaaaatttgcctacattttaggttctcttagtaacctggaagaattgatccttcctactggggatggaatttatcgagtggccaaactgatcatccagcagtgtcagcagcttcattgtctccgagtcctctcatttttcaagactttgaatgatgacagcgtggtggaaattgccaaagtagcaatcagtggaggtttccagaaacttgagaacctaaagctttcaatcaatcacaagattacagaggaaggatacagaaatttctttcaagcactggacaacatgccaaacttgcaggagttggacatctccaggcatttcacagagtgtatcaaagctcaggccacaacagtcaagtctttgagtcaatgtgtgttacgactaccaaggctcattagactgaacatgttaagttggctcttggatgcagatgatattgcattgcttaatgtcatgaaagaaagacatcctcaatctaagtacttaactattctccagaaatggatactgccgttctctccaatcattcagaaataaaagattcagctaaaaactgctgaatcaataatttgtcttggggcatattgaggatgtaaaaaaagttgttgattaatgctaaaaaccaaattatccaaaattattttattaaatattgcatacaaaagaaaatgtgtaaggcttgctaaaaaacaaaacaaaacaaaacacagtcctgcatactcaccaccaagctcaagaaataaatcatcaccaatacctttgaggtccctgagtaatccaccccagctaaaggcaaacccttcaatcaggtttatacagcaaaccctccattgtccatggtcaacagggaaggggttggggacaggtctgccaatctatctaaaagccacaatatggaagaagtattcaatttatataataaatggctaacttaacggttgaatcactttcatacatggatgaaacgggtttaacacaggatccacatgaatcttctgtgggccaagagatgttccttaatccttgtagaacctgttttctatattgaactagctttggtacagtagagttaacttactttccatttatccactgccaatataaagaggaaacaggggttagggaaaaatgacttcattccagaggcttctcagagttcaacatatgctataatttagaattttcttatgaatccactctacttgggtagaaaatattttatctctagtgattgcatattatttccatatcatagtatttcatagtattatatttgatatgagtgtctatatcaatgtcagtgtccagaatttcgttcctaccagttaagtagttttctgaacggccagaagaccattcgaaattcatgatactactataagttggtaaacaaccatacttttatcctcatttttattctcactaagaaaaaagtcaactcccctccccttgcccaagtatgaaatatagggacagtatgtatggtgtggtctcatttgtttagaaaaccacttatgactgggtgcggtggctcacacctgtaatcccagcactttgggaggctgaggcgggcgaatcatttgaggtgaggaattcgagaccagcctggccagcatggtgaaaccccatctctactaaaaatacaaaaattagccaggtgtggtggcacatgcctgtagtcccagccactagggcggctgagacgcaagacttgcttgaacccgggaggcagaggttgcagtgagccaagatggcgccactgcattccagcctgggcaacagagcaagaccctgtctgtctcaaaacaaaaaacaaaaccacttatattgctagctacattaagaatttctgaatatgttactgagcttgcttgtggtaaccatttataatatcagaaagtatatgtacaccaaaacatgttgaacatccatgttgtacaactgaaatataaataattttgtcaattatacctaaataaaactggaaaaaaatttctggaagtttatatctaaaaatgttaatagtgcgtacctctaggaagtgggcctggaagccattcttacttttcagtctctcccattctgtactgttttttgttttactttcgtgcctgcattatttttctatttaaaacaaaaataaatctagtttagcactaaaatattaactggagctacctctggagggcaagagtactagaaggtgggatggattgtcttcttgcttgtctgattttatatgtaatacctttgtaattagaaaggttgttaagcattatatcagaatccagtcaggagacagaaaccacacagaaatttgaatggggaaagtttaatatacagatgctcggcctgacgcagtggctcacgcctgtaattccagcactttgggaggccgaggtgggcagatcacttgaggtcaggagttcgagacca

SEQ ID NO: 11071 - protein, 1015 aa, Homo sapiens [sequence omitted]

SEQ ID NO: 11072 - DNA, 5446 bp, Homo sapiens
cagatgtgaatttcttcggagtaagaaatcctcagaggaaattacccagtatattcaaagctacaagggatttgttgacataacgggagaacattttgtgaattcctgggtccagagagaattacctatggcatcagcttattgcaatgacagcatctttgcttacgaagaactacggctggactcttttaaggactggccccgggaatcagctgtgggagttgcagcactggccaaagcaggtcttttctacacaggtataaaggacatcgtccagtgcttttcctgtggagggtgtttagagaaatggcaggaaggtgatgacccattagacgatcacaccagatgttttcccaattgtccatttctccaaaatatgaagtcctctgcggaagtgactccagaccttcagagccgtggtgaactttgtgaattactggaaaccacaagtgaaagcaatcttgaagattcaatagcagttggtcctatagtgccagaaatggcacagggtgaagcccagtggtttcaagaggcaaagaatctgaatgagcagctgagagcagcttataccagcgccagtttccgccacatgtctttgcttgatatctcttccgatctggccacggaccacttgctgggctgtgatctgtctattgcttcaaaacacatcagcaaacctgtgcaagaacctctggtgctgcctgaggtctttggcaacttgaactctgtcatgtgtgtggagggtgaagctggaagtggaaagacggtcctcctgaagaaaatagcttttctgtgggcatctggatgctgtcccctgttaaacaggttccagctggttttctacctctcccttagttccaccagaccagacgaggggctggccagtatcatctgtgaccagctcctagagaaagaaggatctgttactgaaatgtgcatgaggaacattatccagcagttaaagaatcaggtcttattccttttagatgactacaaagaaatatgttcaatccctcaagtcataggaaaactgattcaaaaaaaccacttatcccggacctgcctattgattgctgtccgtacaaacagggccagggacatccgccgatacctagagaccattctagagatcaaagcatttcccttttataatactgtctgtatattacggaagctcttttcacataatatgactcgtctgcgaaagtttatggtttactttggaaagaaccaaagtttgcagaagatacagaaaactcctctctttgtggcggcgatctgtgctcattggtttcagtatccttttgacccatcctttgatgatgtggctgttttcaagtcctatatggaacgcctttccttaaggaacaaagcgacagctgaaattctcaaagcaactgtgtcctcctgtggtgagctggccttgaaagggtttttttcatgttgctttgagtttaatgatgatgatctcgcagaagcaggggttgatgaagatgaagatctaaccatgtgcttgatgagcaaatttacagcccagagactaagaccattctaccggtttttaagtcctgccttccaagaatttcttgcggggatgaggctgattgaactcctggattcagataggcaggaacatcaagatttgggactgtatcatttgaaacaaatcaactcacccatgatgactgtaagcgcctacaacaattttttgaactatgtctccagcctcccttcaacaaaagcagggcccaaaattgtgtctcatttgctccatttagtggataacaaagagtcattggagaatatatctgaaaatgatgactacttaaagcaccagccagaaatttcactgcagatgcagttacttaggggattgtggcaaatttgtccacaagcttacttttcaatggtttcagaacatttactggttcttgccctgaaaactgcttatcaaagcaacactgttgctgcgtgttctccatttgttttgcaattccttcaagggagaacactgactttgggtgcgcttaacttacagtactttttcgaccacccagaaagcttgtcattgttgaggagcatccacttcccaatacgaggaaataagacatcacccagagcacatttttcagttctggaaacatgttttgacaaatcacaggtgccaactatagatcaggactatgcttctgcctttgaacctatgaatgaatgggagcgaaatttagctgaaaaagaggataatgtaaagagctatatggatatgcagcgcagggcatcaccagaccttagtactggctattggaaactttctccaaagcagtacaagattccctgtctagaagtcgatgtgaatgatattgatgttgtaggccaggatatgcttgagattctaatgacagttttctcagcttcacagcgcatcgaactccatttaaaccacagcagaggctttatagaaagcatccgcccagctcttgagctgtctaaggcctctgtcaccaagtgctccataagcaagttggaactcagcgcagccgaacaggaactgcttctcaccctgccttccctggaatctcttgaagtctcagggacaatccagtcacaagaccaaatctttcctaatctggataagttcctgtgcctgaaagaactgtctgtggatctggagggcaatataaatgttttttcagtcattcctgaagaatttccaaacttccaccatatggagaaattattgatccaaatttcagctgagtatgatccttccaaactagtaaaattaattcaaaattctccaaaccttcatgttttccatctgaagtgtaacttcttttcggattttgggtctctcatgactatgcttgtttcctgtaagaaactcacagaaattaagttttcggattcattttttcaagccgtcccatttgttgccagtttgccaaattttatttctctgaagatattaaatcttgaaggccagcaatttcctgatgaggaaacatcagaaaaatttgcctacattttaggttctcttagtaacctggaagaattgatccttcctactggggatggaatttatcgagtggccaaactgatcatccagcagtgtcagcagcttcattgtctccgagtcctctcatttttcaagactttgaatgatgacagcgtggtggaaattgccaaagtagcaatcagtggaggtttccagaaacttgagaacctaaagctttcaatcaatcacaagattacagaggaaggatacagaaatttctttcaagcactggacaacatgccaaacttgcaggagttggacatctccaggcatttcacagagtgtatcaaagctcaggccacaacagtcaagtctttgagtcaatgtgtgttacgactaccaaggctcattagactgaacatgttaagttggctcttggatgcagatgatattgcattgcttaatgtcatgaaagaaagacatcctcaatctaagtacttaactattctccagaaatggatactgccgttctctccaatcattcagaaataaaagattcagctaaaaactgctgaatcaataatttgtcttggggcatattgaggatgtaaaaaaagttgttgattaatgctaaaaaccaaattatccaaaattattttattaaatattgcatacaaaagaaaatgtgtaaggcttgctaaaaaacaaaacaaaacaaaacacagtcctgcatactcaccaccaagctcaagaaataaatcatcaccaatacctttgaggtccctgagtaatccaccccagctaaaggcaaacccttcaatcaggtttatacagcaaaccctccattgtccatggtcaacagggaaggggttggggacaggtctgccaatctatctaaaagccacaatatggaagaagtattcaatttatataataaatggctaacttaacggttgaatcactttcatacatggatgaaacgggtttaacacaggatccacatgaatcttctgtgggccaagagatgttccttaatccttgtagaacctgttttctatattgaactagctttggtacagtagagttaacttactttccatttatccactgccaatataaagaggaaacaggggttagggaaaaatgacttcattccagaggcttctcagagttcaacatatgctataatttagaattttcttatgaatccactctacttgggtagaaaatattttatctctagtgattgcatattatttccatatcatagtatttcatagtattatatttgatatgagtgtctatatcaatgtcagtgtccagaatttcgttcctaccagttaagtagttttctgaacggccagaagaccattcgaaattcatgatactactataagttggtaaacaaccatacttttatcctcatttttattctcactaagaaaaaagtcaactcccctccccttgcccaagtatgaaatatagggacagtatgtatggtgtggtctcatttgtttagaaaaccacttatgactgggtgcggtggctcacacctgtaatcccagcactttgggaggctgaggcgggcgaatcatttgaggtgaggaattcgagaccagcctggccagcatggtgaaaccccatctctactaaaaatacaaaaattagccaggtgtggtggcacatgcctgtagtcccagccactagggcggctgagacgcaagacttgcttgaacccgggaggcagaggttgcagtgagccaagatggcgccactgcattccagcctgggcaacagagcaagaccctgtctgtctcaaaacaaaaaacaaaaccacttatattgctagctacattaagaatttctgaatatgttactgagcttgcttgtggtaaccatttataatatcagaaagtatatgtacaccaaaacatgttgaacatccatgttgtacaactgaaatataaataattttgtcaattatacctaaataaaactggaaaaaaatttctggaagtttatatctaaaaatgttaatagtgcgtacctctaggaagtgggcctggaagccattcttacttttcagtctctcccattctgtactgttttttgttttactttcgtgcctgcattatttttctatttaaaacaaaaataaatctagtttagcactaaaatattaactggagctacctctggagggcaagagtactagaaggtgggatggattgtcttcttgcttgtctgattttatatgtaatacctttgtaattagaaaggttgttaagcattatatcagaatccagtcaggagacagaaaccacacagaaatttgaatggggaaagtttaatatacagatgctcggcctgacgcagtggctcacgcctgtaattccagcactttgggaggccgaggtgggcagatcacttgaggtcaggagttcgagacca

SEQ ID NO: 11073 - protein, 1139 aa, Homo sapiens
MASAYCNDSIFAYEELRLDSFKDWPRESAVGVAALAKAGLFYTGIKDIVQCFSCGGCLEKWQEGDDPLDDHTRCFPNCPFLQNMKSSAEVTPDLQSRGELCELLETTSESNLEDSIAVGPIVPEMAQGEAQWFQEAKNLNEQLRAAYTSASFRHMSLLDISSDLATDHLLGCDLSIASKHISKPVQEPLVLPEVFGNLNSVMCVEGEAGSGKTVLLKKIAFLWASGCCPLLNRFQLVFYLSLSSTRPDEGLASIICDQLLEKEGSVTEMCMRNIIQQLKNQVLFLLDDYKEICSIPQVIGKLIQKNHLSRTCLLIAVRTNRARDIRRYLETILEIKAFPFYNTVCILRKLFSHNMTRLRKFMVYFGKNQSLQKIQKTPLFVAAICAHWFQYPFDPSFDDVAVFKSYMERLSLRNKATAEILKATVSSCGELALKGFFSCCFEFNDDDLAEAGVDEDEDLTMCLMSKFTAQRLRPFYRFLSPAFQEFLAGMRLIELLDSDRQEHQDLGLYHLKQINSPMMTVSAYNNFLNYVSSLPSTKAGPKIVSHLLHLVDNKESLENISENDDYLKHQPEISLQMQLLRGLWQICPQAYFSMVSEHLLVLALKTAYQSNTVAACSPFVLQFLQGRTLTLGALNLQYFFDHPESLSLLRSIHFPIRGNKTSPRAHFSVLETCFDKSQVPTIDQDYASAFEPMNEWERNLAEKEDNVKSYMDMQRRASPDLSTGYWKLSPKQYKIPCLEVDVNDIDVVGQDMLEILMTVFSASQRIELHLNHSRGFIESIRPALELSKASVTKCSISKLELSAAEQELLLTLPSLESLEVSGTIQSQDQIFPNLDKFLCLKELSVDLEGNINVFSVIPEEFPNFHHMEKLLIQISAEYDPSKLVKLIQNSPNLHVFHLKCNFFSDFGSLMTMLVSCKKLTEIKFSDSFFQAVPFVASLPNFISLKILNLEGQQFPDEETSEKFAYILGSLSNLEELILPTGDGIYRVAKLIIQQCQQLHCLRVLSFFKTLNDDSVVEIAKVAISGGFQKLENLKLSINHKITEEGYRNFFQALDNMPNLQELDISRHFTECIKAQATTVKSLSQCVLRLPRLIRLNMLSWLLDADDIALLNVMKERHPQSKYLTILQKWILPFSPIIQK

SEQ ID NO: 11074 - DNA, 728 bp, Homo sapiens
cctgccttccctggaatctcttgaagtctcagggacaatccagtcacaagaccaaatctttcctaatctggataagttcctgtgcctgaaagaactgtctgtggatctggagggcaatataaatgttttttcagtcattcctgaagaatttccaaacttccaccatatggagaaattattgatccaaatttcagctgagtatgatccttccaaactagtaaaattaattcaaaattctccaaaccttcatgttttccatctgaagtgtaacttcttttcggattttgggtctctcatgactatgcttgtttcctgtaagaaactcacagaaattaagttttcggattcattttttcaagccgtcccatttgttgccagtttgccaaattttatttctctgaagatattaaatcttgaaggccagcaatttcctgatgaggaaacatcagaaaaatttgcctacattttaggttctcttagtaacctggaagaattgatccttcctactggggatggaatttatcgagtggccaaactgatcatccagcagtgtcagcagcttcattgtctccgagtcctctcatttttcaagactttgaatgatgacagcgtggtggaaattgacggagtcttgctctgtcacccaggctggagtgcagtggtgggattttggctcactgcaacctctacctcccaggttcaagctgattctcctgcctcagcctccc

SEQ ID NO: 11075 - protein, 186 aa, Homo sapiens
MEKLLIQISAEYDPSKLVKLIQNSPNLHVFHLKCNFFSDFGSLMTMLVSCKKLTEIKFSDSFFQAVPFVASLPNFISLKILNLEGQQFPDEETSEKFAYILGSLSNLEELILPTGDGIYRVAKLIIQQCQQLHCLRVLSFFKTLNDDSVVEIDGVLLCHPGWSAVVGFWLTATSTSQVQADSPASA

SEQ ID NO: 11076 - DNA, 541 bp, Homo sapiens
attgcaatgacagcatctttgcttacgaagaactacggctggactcttttaaggactggccccgggaatcagctgtgggagttgcagcactggccaaagcaggtcttttctacacaggtataaaggacatcgtccagtgcttttcctgtggagggtgtttagagaaatggcaggaaggtgatgacccattagacgatcacaccagatgttttcccaagtgagtggaatgaatgttaaccatctgcaactttggatgcacttcaacagtttttttctttttcctcatttcctgccttattttatctttagattgagtctttatccactcctcggattcaggctatgaaggatgagtcttcatgtctttcatccctttgctccatgacccccttcctgtactagccttcccctctttatagttatggcatagttttggctagattcatatattcacattacatgtttacattatcatgactatacaaatgctatgtggagctgaagcttgtggtaaatttttatttatttttcccttcctgta

SEQ ID NO: 11077 - protein, 38 aa, Homo sapiens
MTASLLTKNYGWTLLRTGPGNQLWELQHWPKQVFSTQV

SEQ ID NO: 11078 - DNA, 1018 bp, Homo sapiens
ggctggtgaattaccagatctccgtcaagtgcagtaaccagttcaagttggaagtgtgtcttttgaatgcagaaaacaaagtcgtggacaaccaggctgggacccagggccagctgaaggtgctgggtgccaacctctggtggccgtacctgatgcacgaacaccccgcctacctgtactcgtgggaggatggtgattgctcacaccaaagccttggacccctcccagcctgtgacctttgtgaccaactccacctacgcagcagacaagggggctctgtatgtggatgtgatccgtgtgaacagctactactcttggtatcgcaactacgggcacctggagttgattcagctgcagctggccgcccagtttgagaattggtgtaagacatcacaatcccattattcagagcgcgtatggagtggaaacgcttgtagggtttcaccaggatccacctctgatgttcagtgaagaggaccggaaaagtctgctagagcagtaccatctgggtctggatcaaaaacgcagaaaatacgtggttggagagctcatctggaattttgccgatttcatgactaaccagtgtgtcagtttcttggtcgggaatgaaaatagtgccaacctgtgataccttcactctaattttactttctgaggaagttttctgtaatagttatttggtgataattattaatactgatgtgaatttcttcggagtaagaaatcctcagaggaaattacccagtatattcaaagctacaagggatttgttgacataacggtctgttttcaaggtcagtttccggaaacagtgaccctgagaaggcttcctcctgagtatgcataaacattcacagcttgcatgcgtgtgtgtgtgtgtgtgtgtgtgtgtgtgtgtgtgtgtatgtttgcttgcactgcataaaaacaattgcaacatcaacagaaataaaaattaaaggaataattctcctccgactctgccgttccatccagtgaaactcttcattctggggta

SEQ ID NO: 11079 - protein, 93 aa, Homo sapiens; identical to SEQ ID NO: 1012

SEQ ID NO: 11080 - DNA, 727 bp, Homo sapiens
atgtgaatttcttcggagtaagaaatcctcagaggaaattacccagtatattcaaagctacaagggatttgttgacataacgggctggcttctgacgggctctgcttgccttcctgatagtcttcccctttatgaatgaagccacttgccccagcttccctctgctgcccctatctgcaggcttgctaagatctcctgacctaggcgctgtcacccacagtgggctgcagagctggctcttcctagctggctaactatcctgaatcagtaaaaatttcctagtggagagtgatgggaaatcgaatccaaactggcttaaacaaaaatgagaatttattgattaacatgactcaggagaccagaactctatagagaacatggcctgacagtgggggaagagaggtgtttcctcaaaaagaaactgggtgcagctttcccagaagaatcagttgctcaatatataataccctgatgaatttagttaccattctatgtctcttacttcctcattcgtcaaagtacatctgtgatatttaaatgcaggtctgttttcaaggtcagtttccggaaacagtgaccctgagaaggcttcctcctgagtatgcataaacattcacagcttgcatgcgtgtgtgtgtgtgtgtgtgtgtgtgtgtgtgtgtgtgtatgtttgcttgcactgcataaaaacaattgcaacatcaacagaaataaaaattaaaggaat

SEQ ID NO: 11081 - protein, 40 aa, Homo sapiens
MNEATCPSFPLLPLSAGLLRSPDLGAVTHSGLQSWLFLAG

SEQ ID NO: 11082 - DNA, 2121 bp, Homo sapiens
ttctctcttcggatatgagctgcaaactccttatataaaggctccaactctgcagccctaattattctagttggcccaagaaaaatcctaattgttttatctaaggagacggaattttccaatactgtagaggcatgtgtgtgtgtttgctttaaggaagctgttttggtaataaaaagtcactgagggtcataaattcatgttaacacatccagtgtacatgaagtaggcaccgagttaaactatttgtctactatatagcatgtcatcttaaaagccttattttttcctcaaaatattaactttatttttctccctgtaaaatcaagacacagttaaaatgtagccttcctcattttctgggaatactttctaacaagatatgcttctttccaattggacttctaaatttctagcaattctaacagtgcataaaagaggcaaccccaaaagtgtagcaggtactgaataacagatttgcagccttgggtatccacattaaaatttgaaatctaagtgaattacttcaagctgatttcttaggtcaaggagagattatggtccttaaatgcctgataaggtcacatacacaatttcaagtgcattatagtaaatccatgtgacagctcctacagctactaacctgcttctgccctcacggtagcgtgcacaatcttcatcgcatgtcctgggtggtggtaggagcagtagaaaccccctgggtcatgtcagatttagaaaatataagcaatggctcatacacgaattttaagttgtaacctacatgtgataagttgctttatcttccaaatgtaataaaaaccagaagttactttgaaataaattgaaggattagcagtggtgactgaggaataaaaattataatttaaaattgtccttaaggctggaattcttaacttattgaccttatatcctacatattataggactttgtaaatttaggctgatatggaaatgtatatttatatcaaatttaaatttttagaatgatggtgctactatattctaattgttaatttgataattgtaattgtaatttgttaatttgttctaataatattttcatgacattattcatttgctgcttggcttgatggcataacaagtatgggttatttaccctgaaaaggaaacagtatcacccttccagaatctctatttacagctacagaagatgcaacacacctgtttctggaccacttccagatcagatgtgatgcatgctttagatcatttactttgatctaggaattactgtctggcatttcgtggtgtagggtaggtgtctccagcactgtataggtgtctggaattgagataagaatcaatttcaatacaaaatacattttttgcttaaagcacgcaaggattctatgaattcaggtaaattcacagggtggaaaacaggaactaatgttatatattcctgtagttatcttcataatgaagcagaaagaaaaacaaaaaagttacaaaaataaatgaaaagaactgtattttctagaattgaaaaataattcttttagatgatagataagatgtttacatcaacctgcaaaaagtcaatgttgaagaggtctcattgtatctcacagaattttgatttgcctactcacccacaggagacatttctgggacagtagcaacataaggtccatcccaaaactttggctcattatcattaatatcctgcactttgatgatgaattctgattcaggctccaggggctttctggtttctatgtccacagcctgagcacgaagagtgtagaaaggtttttcttctctatctaggctccttattgcatgaatgtcccctgtggtttcatcaatggtaaaaacggtgccagcgccatctcctgagagggtgtatttcgcagtgccctctcccttgtctaagtcggaatggagctttagggaagagagggagagagagaggaagagaaagagaaggacaaagaaagaacaccattaaaaggatgttgccaaattaaaaagtcataatttgcaatacaattcctttaatcaaaaatgttaaataaaaatcttatggttctgttttcttgttttttatttctccaacttctttttataaaaatt

SEQ ID NO: 11083 - protein, 54 aa, Homo sapiens [sequence omitted]

SEQ ID NO: 11084 - DNA, 2089 bp, Homo sapiens
ttctctcttcggatatgagctgcaaactccttatataaaggctccaactctgcagccctaattattctagttggcccaagaaaaatcctaattgttttatctaaggagacggaattttccaatactgtagaggcatgtgtgtgtgtttgctttaaggaagctgttttggtaataaaaagtcactgagggtcataaattcatgttaacacatccagtgtacatgaagtaggcaccgagttaaactatttgtctactatatagcatgtcatcttaaaagccttattttttcctcaaaatattaactttatttttctccctgtaaaatcaagacacagttaaaatgtagccttcctcattttctgggaatactttctaacaagatatgcttctttccaattggacttctaaatttctagcaattctaacagtgcataaaagaggcaaccccaaaagtgtagcaggtactgaataacagatttgcagccttgggtatccacattaaaatttgaaatctaagtgaattacttcaagctgatttcttaggtcaaggagagattatggtccttaaatgcctgataaggtcacatacacaatttcaagtgcattatagtaaatccatgtgacagctcctacagctactaacctgcttctgccctcacggtagcgtgcacaatcttcatcgcatgtcctgggtggtggtaggagcagtagaaaccccctgggtcatgtcagatttagaaaatataagcaatggctcatacacgaattttaagttgtaacctacatgtgataagttgctttatcttccaaatgtaataaaaaccagaagttactttgaaataaattgaaggattagcagtggtgactgaggaataaaaattataatttaaaattgtccttaaggctggaattcttaacttattgaccttatatcctacatattataggactttgtaaatttaggctgatatggaaatgtatatttatatcaaatttaaatttttagaatgatggtgctactatattctaattgttaatttgataattgtaattgtaatttgttaatttgttctaataatattttcatgacattattcatttgctgcttggcttgatggcataacaagtatgggttatttaccctgaaaaggaaacagtatcacccttccagaatctctatttacagctacagaagatgcaacacacctgtttctggaccacttccagatcagatgtgatgcatgctttagatcatttactttgatctaggaattactgtctggcatttcgtggtgtagggtaggtgtctccagcactgtataggtgtctggaattgagataagaatcaatttcaatacaaaatacattttttgcttaaagcacgcaaggattctatgaattcaggtaaattcacagggtggaaaacaggaactaatgttatatattcctgtagttatcttcataatgaagcagaaagaaaaacaaaaaagttacaaaaataaatgaaaagaactgtattttctagaattgaaaaataattcttttagatgatagataagatgtttacatcaacctgcaaaaagtcaatgttgaagaggtctcattgtatctcacagaattttgatttgcctactcacccacaggagacatttctgggacagtagcaacataaggtccatcccaaaactttggctcattatcattaatatcctgcactttgatgatgaattctgattcaggctccaggggctttctggtttctatgtccacagcctgagcacgaagagtgtagaaaggtttttcttctctatctaggctccttattgcatgaatgtcccctgtggtttcatcaatggtaaaaacggtgccagcgccatctcctgagagggtgtatttcgcagtgccctctcccttgtctaagtcggaatggagctttagggaagagagggagagagagaggaagagaaagagaaggacaaagaaagaacaccattaaaaggatgttgccaaattaaaaagtcataatttgcaatacaattcctttaatcaaaaatgttaaataaaaatcttatggttctgttttcttgtt

SEQ ID NO: 11085 - protein, 54 aa, Homo sapiens [sequence omitted]

SEQ ID NO: 11086 - DNA, 241 bp, Homo sapiens
gtgcagtggacacttcacggctggcacaggagagatcacaaggccttgctcaatttcatcaaaagtgttaaagcgactcagcagattgtgaagcacaagtggaagctgataattggtgtttcttacaaatcaacggcttgtctccacacatcaaggtgagaaaatcaatgtaaaagaggagaaataacccacacaaccacatacaactaggaaatgatagatggatctgaaaaaaaggata

SEQ ID NO: 11087 - protein, 52 aa, Homo sapiens
VQWTLHGWHRRDHKALLNFIKSVKATQQIVKHKWKLIIGVSYKSTACLHTSR

SEQ ID NO: 11088 - DNA, 3695 bp, Homo sapiens
ggaaaaccttcttagagttgtcttgacaccactgatgtcgagtgtgcgggtgtttgtaggatggcctgccactcagtccaggggcaggagcaacggggagatcccacaagcaaagtgaactgggggatgggctgaaggggctccaggcaactgagccctactcgcaggtcctcggccttggcccaaacaggaatgaggggcacagagtgcccgggtaaccgctcctgggagcagtggggaactgtcggatacttgaactctcaagagctgggctctgagcgtcctcgtccagctgccaacttggccaaaggctaagccagcagattgttctgttgccgggcaacgcgacttctaaacctgagggagtgggcatgtgagcacataatggcaccagtgacagagcgaccataatggatgaataagcgcagccaggtaccggcgcaaggcacctgctggcaatggcaggaggcggacgtggggggtcgtgcagtaggtactggagggagagacgtgggcacaaaggtcgcgggaggaacaggtgcccacaatggctgcatatttgcccgtggatcactgaagattcctgctctcctgctgaggtggagactgcagtgagctgagatcgcaccattgcactccagcctgggcaacgagtgcaaaactcagtctccagataaaaaaaagaaaaagaaaaaaaagaggccgggtgtggtggcttatgcctatgatcctagcactttgggaggtcggggtggacggatcacgagatcaggagttggaggccagcctggccaacatagtgaaagcccgtctctagtaaaaatacaaaatttagtcagacatggtgggcaggagagagcatgtgcaggggaacatccatttataaaaccatcagacctcatgagacttattcactaccatgagaacagcatgggggaaactgcctccatgattcagttatctccacctggccccacccttgacacatgggaattgttacaattcaagatgagatttgggtgcggacagagccaaaccatataattcttccccggcccctcccaaatctcatgtcctcatatttcaaaagcaatcgtgccttcccctaagtcccccaaactcttatttcagcattaactcaaaattccatagtccaaagtctcatctgagacaaggcaagtcccttccacctatgagcctgtaaaatcaaaagcaagttagttattttctagatacacagggatacaggcattgggtagatacactcgtttcaaatgggagaaattggccaaagcgaaagagctacaggccccatgcaagtccaaaacccagcaggcaaatcttaaagctccaaaatgacctcctttgactccatgtgtcacatctaggtgatgcaagaagtgggttcccagggtcttgggcagccccgcccctgtggctttgcagggtacagccccccttctggctgcattgagtgtctgcagcttttccaggcacacagtgcaagctgtcagtggatctaccattctggggtctggaggatggtggcccttttctcacagctctgcttggcagtaccccagtggggactctgtgtggaagctccaaccccatatttccctttgacactgccctagcagaggttatccatgagggccccccctcccctcccctcccccccacagcaaacttttgcctggatttccaggcattttcatacatcttctgaaatgtaggcagaggttcatgaacgttaatgcttgacttcggtgcatctgcaggcttaacaccacctagaacctgaaaggcttggaacttgcaccctctgaagccatggcctgaggtgtaccttggccccttttacctatggcaggagcagctgggatgcagggccccaagttcctaggctgcacacagcagggggttctggacccacaaaaccatttttccttctaagcctcctggcctgtgatgggagggtctgctgtgagggtctctaacatgccctggagacatttgccccattgtcttggtgattaacatttggctcctcattacttatgcaaatttctacaacccagtctcctgagaaaatagatttttcttttctgttgcatcatcaggctacaaattttctgaacttttatgctctgcttcttctcgaatgctttgctgcttagaaatttcttctgtcagataccttaaatcatctctctcaagttcaaagttccacagatctgtagggaactctagaaaaaaattcttattttccctctttcccgcctatcttatgcccgtttctaatacaggtgcacaatgcctgcagtgtctttgcatagtaagagtgactttactccatttcccaacaaattcctcatctgcctctgagaccacctccgcctggaccttgttgtccatatcactattaacattttggtcaaagccattcaacaagtctctaggaagttccaaactttcccacattttcctatcctcttctgagccttccaaactgttccagcctctccctgttacccatttccaaagttgcttccacattttcgggtatctttacagcagcaccccactctactggtatcaacttattgtattagtctgttctcacactgcaaataaagacatacctgagactgggtaatttataaaggaaagaggttgaattgactcacagttctgcatggctggggaggcctcacagtcatggtggaaggcaaggaggtgcaaaagcatgtctcacatagtggcaggcaggagagagcatgtgcaggggagctcccatttataaaaccatcagatctcatgagacttagtcactaccgcgagaacagtatggggggaaccatccccatgattcagttatctgcacccggccccacccttgacacgtgggaattattacaatgcaagggctggtgaattaccagatctccgtcaagtgcagtaaccagttcaagttggaagtgtgtcttttgaatgcagaaaacaaagtcgtggacaaccaggctgggacccagggccagctgaaggtgctgggtgccaacctctggtggccgtacctgatgcacgaacaccccgcctacctgtactcgtgggaggatggtgattgctcacaccaaagccttggacccctcccagcctgtgacctttgtgaccaactccacctacgcagcagacaagggggctctgtatgtggatgtgatccgtgtgaacagctactactcttggtatcgcaactacgggcacctggagttgattcagctgcagctggccgcccagtttgagaattggtgtaagacatcacaatcccattattcagagcgcgtatggagtggaaacgcttgtagggcttcaccaggatccacctctgatgttcagtgaagaggaccggaaaagtctgctagagcagtaccatctgggtctggatcaaaaacgcagaaaatacgtggttggagagctcatctggaattttgccgatttcatgactaaccagtttgttgagatcatgacctcttctggaatggtgttctcagaagtccttggacaatcagggtgtactaggagaaaacatgctgtgagatgggatgaaagtcttcaggatggacactatactttctgttattggaggattcggtagtttgaataagcgtttgaatgaataaaatatttgagttgag

SEQ ID NO: 11089 - protein, 126 aa, Homo sapiens
MQGLVNYQISVKCSNQFKLEVCLLNAENKVVDNQAGTQGQLKVLGANLWWPYLMHEHPAYLYSWEDGDCSHQSLGPLPACDLCDQLHLRSRQGGSVCGCDPCEQLLLLVSQLRAPGVDSAAAGRPV

SEQ ID NO: 11090 - DNA, 790 bp, Homo sapiens; identical to SEQ ID NO: 11020

SEQ ID NO: 11091 - protein, 88 aa, Homo sapiens [sequence omitted]

SEQ ID NO: 11092 - DNA, 1226 bp, Homo sapiens; identical to SEQ ID NO: 11018

SEQ ID NO: 11093 - protein, 48 aa, Homo sapiens; identical to SEQ ID NO: 11019

SEQ ID NO: 11094 - DNA, 798 bp, Homo sapiens; identical to SEQ ID NO: 11012

SEQ ID NO: 11095 - protein, 68 aa, Homo sapiens; identical to SEQ ID NO: 11013

SEQ ID NO: 11096 - DNA, 742 bp, Homo sapiens
gccaacctctggtggccgtacctgatgcacgaacaccccgcctacctgtactcgtgggaggatggtgattgctcacaccaaagccttggacccctcccagcctgtgacctttgtgaccaactccacctacgcagcagacaagggggctctgtatgtggatgtgatccgtgtgaacagctactactcttggtatcgcaactacgggcacctggagttgattcagctgcagctggccgcccagtttgagaattggtgtaagacatcacaatcccattattcagagcgcgtatggagtggaaacgcttgtagggtttcaccagggctggtgaattaccagatctccgtcaagtgcagtaaccagttcaagttggaagtgtgtcttttgaatgcagaaaacaaagtcgtggacaaccaggctgggacccagggccagctgaaggtgctgggtgccaacctctggtggccgtacctgatgcacgaacaccccgcctacctgtactcgtgggaggatggtgattgctcacaccaaagccttggacccctcccagcctgtgacctttgtgaccaactccacctacgcagcagacaagggggctctgtatgtggatgtgatccgtgtgaacagctactactcttggtatcgcaactacgggcacctggagttgattcagctgcagctggccgcccagtttgagaattggtgtaagacatcacaatcccattattcagagcgcgtatggag

SEQ ID NO: 11097 - protein, 210 aa, Homo sapiens
MVIAHTKALDPSQPVTFVTNSTYAADKGALYVDVIRVNSYYSWYRNYGHLELIQLQLAAQFENWCKTSQSHYSERVWSGNACRVSPGLVNYQISVKCSNQFKLEVCLLNAENKVVDNQAGTQGQLKVLGANLWWPYLMHEHPAYLYSWEDGDCSHQSLGPLPACDLCDQLHLRSRQGGSVCGCDPCEQLLLLVSQLRAPGVDSAAAGRPV

SEQ ID NO: 11098 - DNA, 1832 bp, Homo sapiens
ctctttagaagacacataataaaatagaatcatcagtgttttttcataaacatgaatctttagagtgttacttgatcctgcataataagggtacttttttgcttaatgtaagcatagtatactaattcttttaaacttcagaaagcatatttacagtctaggcagatgggacatgaaggtcacacagcatgagcggtgaaatatctcatttacctagagttctagagagaattttaggaactcttatttattatcagtgcataaacaagagtaaactctacaaaactgtttgcaaaactctcctctttctactcagaaggctttccctagaataatcattatggagtctgtccatcctttactcattcactgcatggggacaggtgttagttatgagattggtgaatttagaaagctaaccaatttcatacctattttgggattctcaattcacaaacttttgtgcgtttcttaattatttcctttctttttcttgtagagagcagtcatgatggcctgcactccacacaatgcaacagagtgaaagagcaggttctgcttctttggtgtagtcctgaagcttcctaagaaacttcacatcaggtgatggataggagcaaccctgtaaaaccagccttagactatttttcaaacaggctggtgaattaccagatctccgtcaagtgcagtaaccagttcaagttggaagtgtgtcttttgaatgcagaaaacaaagtcgtggacaaccaggctgggacccagggccagctgaaggtgctgggtgccaacctctggtggccgtacctgatgcacgaacaccccgcctacctgtactcgtgggaggatggtgattgctcacaccaaagccttggacccctcccagcctgtgacctttgtgaccaactccacctacgcagcagacaagggggctctgtatgtggatgtgatccgtgtgaacagctactactcttggtatcgcaactacgggcacctggagttgattcagctgcagctggccgcccagtttgagaattggtgtaagacatcacaatcccattattcagagcgcgtatggagtggaaacgcttgtagggtttcaccaggtaagcggtgttgaactttctgcttgtgtattctctctgggcagagatgccacttgcctcccccaccatgccatctctgaagaatattacagaccattttggagcatggtgaataagaaattttcaccttaggagttcacttgaatagtcatttttatatttgtgactgcaagtcactcttaggggctgtacttccttagtactggtagcattattatccaatggacttttatagctttcattaggttttcttttgtttttgttctttaaagaacgttttacttatcttagtatttcatttttcatctatattatgaggcagtaagagtcttctgtttttccaaagttgagactgctttatatttatttcgtattgtctacagctgtagtgttcaatacattagccactagccacatgtggttatttaaataagataaaataaaaattggccgggcgtggtgggtcacgccggtaatcccagcactttgggaggccgaggcgggcagatcattaggtcaggagatcgagaccatccttactaagacggtgaacccccatctctattaaaaatacaaaaaattagccgggcgtggtggcgggcgcctgcagtcccagctactcaggaggctgaggcaggagaatggcgtgaacctgggaggcagagtttgcagtgagccgagatggcgccactgcactccagcctgggggacagagcgagactccatctc

SEQ ID NO: 11099 - protein, 140 aa, Homo sapiens; identical to SEQ ID NO: 10987

SEQ ID NO: 11100 - DNA, 251 bp, Homo sapiens
agtgcagtaaccagttcaagttggaagtgtgtcttttgaatgcagaaaacaaagtcgtggacaaccaggctgggacccagggccagctgaaggtgctgggtgccaacctctggtggccgtacctgatgcacgaacaccccgcctacctgtactcgtgggaggtgcggctgactgcacagaagtcactggggcctttgacttctacacactccctgtggggctccgcactgtgcccgtcaccgagagccagt

SEQ ID NO: 11101 - protein, 41 aa, Homo sapiens; identical to SEQ ID NO: 10999

SEQ ID NO: 11102 - DNA, 635 bp, Homo sapiens
ttcaaatacttgatggatacatgtggctagtggctaacataagggatagcacagatataaaacatttgctcgtcatataaagttctattggatagtgctggtctgtagcttataggatggtatcttagtctgcttcagctgctaaaacagaataccataaattaggtagcttaaacagtagatattttgaccaggcgtggtggcttatgcctgtattcccaaagtgctgggattacaggcatgagccaccgcgccgggcctatcatatgaattttgagggaacacaaacatgcagtctgtagcagatggtaataggctgacatattacacttgttgatgtaaatctgataggtttctttctctccaaggacagctttttaaatatttaacagtatcaataatttttcaggttctgtgagaattttataatttataatttgcagacttaatgtataatctattttgtcctaacaattacaaatatattttttatttcagattgtatatattcctaccagatggagataattacagctttaaaaatttttattttttcattttatttcacacattgacattaaatttttatggacacataataactgtacatatatatggggtagaatgtgatgttt

SEQ ID NO: 11103 - protein, 31 aa, Homo sapiens [sequence omitted]

SEQ ID NO: 11104 - DNA, 1306 bp, Homo sapiens
cccttattttgggccagtggctgtcattacatatgagaactcaagctccatgaggagatgtttcattgtcgagagcagtcatgatggcctgcactccacacaatgcaacagagtgaaagagcaggttctgcttctttggtgtagtcctgaagcttcctaagaaacttcacatcaggtgatggataggagcaaccctgtaaaaccagccttagactatttttcaaacagtaagtaataaaggtgacgttttgatctttatctgcttaattacttctgctatgattctattgattctaacattgaaggagcagtaaatttatatgtattatccaactataaaacaataaataaacgatatgtcaaatacattatcacatccttatgttcttatgataatattgtcctttttttaacagtttttattcttatttgttgattggtttgtctttatgttgtcctttctactatcaaactgaacatgttgaggtcataggctatcaaaactgtacatttctgatgctaaccatagagacttaacaacagtaaataggccaaaatggaatgttgttagccatagtgtgtattattatttcttttatacatgtggtcactgttagaggagtttatgactttttgcctagattaatgacacacaaaccatctacaaacgaatcataccttattccctcactgtaatttttaatgttgctatttttgcctgttaacattccataggtttatcacattgcttaaagatttaatttaatttctgtaattgtatatgtcatgagagattgcttttaaccttccaatgttcgtggtctcattttcactaacataatcccaactttagctgcgcacaataccacatttcccagcattccttgcatctggatatagctgtattcaaataagccgtgtgaaacttctgggatggctccttaagtgcagttgactcattagggaggtatgtcttttttatttttctacactttgtgctgctgtcctggagtacagacatggtggctagaagcatgaaatcaccttgaaggtagaagtcatgcattgaagttagtaaaagtgaaatgtaagtgtatagtttcctgatgaaaatgggaagcttatgtactagcaacagaatgcttattatgcaggcttcctatatgtaaaagaggacaaattctcattttattaagtttctgaaagtagatttctaaatgctggttctattttttattgaaagtaatggcaaaaaacgcaatgccttttgtaccaacctaatagttaataaacatatcctcaaatg

SEQ ID NO: 11105 - protein, 36 aa, Homo sapiens; identical to SEQ ID NO: 11003

SEQ ID NO: 11106 - DNA, 1436 bp, Homo sapiens
aaagcggcggagaggagtgtcgggcggagtttccggctgagagtccttctagcggcgccggctggagtgcagtggcacaaccttggctcgctccagtgtctacctgccaggttcaagtgattctcctgcctcagcctcccgagtagctgggattacagattattgaataataaaatacagttttgaaaaaaatggatgaagaacctgaaagaactaagcgatgggaaggaggctatgaaagaacatgggagattcttaaagaagatgaatctggatcacttaaagctacaatagaagacattctattcaaggcaaagagaaaaagtatttgagcaccatggacaagttcgacttggaatgatgcgccacctttatgtggtagtagatggatcaagaacaatggaagaccaagatttaaagcctaatagactgacgtgtactttaaagttgttggaatactttgtagaggaatattttgatcaaaatcctattagtcagattggaataattgtaactaagagtaaaagagctgaaaaattgactgaactttcaggaaacccaagaaaacatataacgtctttgaagaaagctgtggatatgacctgccatggagagccatctctttataattccctaagcatggctatgcagactctaaagttagtattatacattatgtataattgaattagaagttttttaaatgagttaagttgaagtgatgtgttaatatggggcccataaacccagctataacaaaattgttaagtacgagaattatgtagtgttatttatgatgtttagtgtggtgttggttagtaatttttattttacattttagtaagatattgttaaaggttttataaaaatataatttaaaactgtcggcagtatcaatagtacaaaaataggttgatgaaaaaatattttattaaaatgagatttaatatagtataataattgtaagttggttgtacctttattaacatttattaatttattttgaaagtaatggccaaaaccacaattccttttgcaccaatgtcatatatctgtaaattaatagatatggcaagttcagctatatggaatagagctaagaccccaaaggaaatacttggtatagttaaagcttatatatatatataagctttatatacatattatatatataatttattatacatatatatataaagcttatatatatgttaaacttacatatataagttaaagcttatatgtctattatacacacacacacacacacacacacacacacacacacacacacacacatatatattttttcgagacagagtcttgctctgtcacccaggctggcatgcagtggcgtgatctcagctcactacaacctccacctctgggttcaagtgattcttgtgcctcagcctccctagtgctgggattacagg

SEQ ID NO: 11107 - protein, 109 aa, Homo sapiens
MMRHLYVVVDGSRTMEDQDLKPNRLTCTLKLLEYFVEEYFDQNPISQIGIIVTKSKRAEKLTELSGNPRKHITSLKKAVDMTCHGEPSLYNSLSMAMQTLKLVLYIMYN

SEQ ID NO: 11108 - DNA, 669 bp, Homo sapiens
gagagtccttctagcggcgccggtgagtccgcgtgtggaagtctgtgaggcgcagaggtggggcaggccgtctggctagctaggcggctgggagcgttttcgtggcggggaacggaggttgaattgccctgcctgggctcatagggaaggaggatgtgaaggagcttgtgaaggcagaggaagattattgaataataaaatacagttttgaaaaaaatggatgaagaacctgaaagaactaagcgatgggaaggaggctatgaaagaacatgggagattcttaaagaagatgaatctggatcacttaaagctacaatagaagacattctattcaaggcaaagagaaaaagtatttgagcaccatggacaagttcgacttggaatgatgcgccacctttatgtggtagtagatggatcaagaacaatggaagaccaagatttaaagcctaatagactgacgtgtactttaaagttgttggaatactttgtagaggaatattttgatcaaaatcctattagtcagattggaataattgtaactaagagtaaaagagctgaaaaattgactgaactttcagacacatgcctggacatacaagtcgagaagtactaatcatctttagcagccttacaacttgcgatccatctaatatttatgatctaatcaag

SEQ ID NO: 11109 - protein, 76 aa, Homo sapiens
MMRHLYVVVDGSRTMEDQDLKPNRLTCTLKLLEYFVEEYFDQNPISQIGIIVTKSKRAEKLTELSDTCLDIQVEKY

SEQ ID NO: 11110 - DNA, 2660 bp, Homo sapiens
gagagtccttctagcggcgccggtgagtccgcgtgtggaagtctgtgaggcgcagaggtggggcaggccgtctggctagctaggcggctgggagcgttttcgtggcggggaacggaggttgaattgccctgcctgggctcatagggaaggaggatgtgaaggagcttgtgaaggcagaggaagattattgaataataaaatacagttttgaaaaaaatggatgaagaacctgaaagaactaagcgatgggaaggaggctatgaaagaacatgggagattcttaaagaagatgaatctggatcacttaaagctacaatagaagacattctattcaaggcaaagagaaaaagtatttgagcaccatggacaagttcgacttggaatgatgcgccacctttatgtggtagtagatggatcaagaacaatggaagaccaagatttaaagcctaatagactgacgtgtactttaaagttgttggaatactttgtagaggaatattttgatcaaaatcctattagtcagattggaataattgtaactaagagtaaaagagctgaaaaattgactgaactttcaggaaacccaagaaaacatataacgtctttgaagaaagctgtggatatgacctgccatggagagccatctctttataattccctaagcatggctatgcagactctaaaacacatgcctggacatacaagtcgagaagtactaatcatctttagcagccttacaacttgcgatccatctaatatttatgatctaatcaagaccctaaaggcagctaaaattagagtatctgttactggattgtctgcagaagttcgcgtttgcactgtacttgctcgtgaaactggtggcacgtaccatgttattttagatgaaagccattacaaagagttgctcacacatcatgttagtcctcctcctgctagctcaagttctgaatgctcacttattcgtatgggatttcctcagcacaccattgcttctttatctgaccaggatgcaaaaccctctttcagcatggcgcatttggatggcaatactgagccagggcttacattaggaggctatttctgcccacagtgtcgggcaaagtactgtgagctacctgttgaatgtaaaatctgtggtcttactttggtgtctgctccccacttggcacggtcttaccatcatttgtttcctttggatgcttttcaagaaattcccctagaagaatataatggagaaagattttgttatggatgtcagggggaattgaaagaccaacatgtttatgtttgtgctgtgtgccaaaatgttttctgtgtggactgtgatgtttttgttcatgattctctacactgttgccctggctgtattcataagattccagctccttcaggtgtttgattccagcatgtagtatacattgtatgtgttaaaaagaaatttgcaactgtgaataaaaggacttctttagaagaagcttcatttaaaacatgaaaggataatctgacttaagaaactttttgctaagaaaaggtaatattttattaaattttaaatttgtgttgtcacagaaatacctgaaattcagtagtacttcattcaattaattttgttttctattattttgagttatactgttttcaaagtcattatgcagtatgtataaacttataagaattaaattgatgtgataattttatgtttttataattaaatatagaatctttatgatttatgttaattcattaatttagtgtaagaagaaagttaagtctgaatgtaaattcagtgtaagatgaaaatttatcaatacttatgaaattaggctgggcgctgtggctcacacctgtaatcccaacactttgggaggctgaggtgggcagatcacttgaggtcaggagttcgagaccagcctggccaacatggtgaaaccccgtcactactaaaaatacaaaaaataattagccgggcatggtggttcacgcctggagtcccagctacttgggaggctgaggcaggagaatcgcttgaacccaggaggcggaggttgcagggagccgagattgtgccactgcactccaccctagagtgagactccctctcaaaaaaaaaaaaagttatgaaattaatacatatgaaatgatgtactgctacatccaccagagaggtctttttaggtttaaccaaacatctggaatatgtttatcaagttagtacatctgaaattatttgtggctatgaccaacagaagtcactttacattaaacattcaaactcacaagactgccatggccatacttggtacccgcttactcagaaggatattaaacagaaacaacagcctgccagcacagcatcaagcagtcctcattagcagtggaagtccttgtagcagtccactagtacaatttgggtgcaaggagataagatcctccacaggcatcaaggaaccaatatctcttaacaattccataaacacagcttccaggtatccacaagggatgtgtcaatttcaagagtcactacactcaggaaagcctaaagcttgaagactccatttatttatagtgcatcccaatccagatacgtaacaattaacgagttatttttactataagcaaagttgcctaaaatcatagttgatactaaccatggttaa

SEQ ID NO: 11111 - protein, 339 aa, Homo sapiens [sequence omitted]

SEQ ID NO: 11112 - DNA, 850 bp, Homo sapiens
gtccttctagcggcgccggtgagtccgcgtgtggaagtctgtgaggcgcagaggtggggcaggccgtctggctagctaggcggctgggagcgttttcgtggcggggaacggaggttgaattgccctgcctgggctcatagggaaggaggatgtgaaggagcttgtgaaggcagaggaagattattgaataataaaatacagttttgaaaaaaatggatgaagaacctgaaagaactaagcgatgggaaggaggctatgaaagaacatgggagattcttaaagaagatgaatctggatcacttaaagctacaatagaagacattctattcaaggcaaagagaaaaagtatttgagcaccatggacaagttcgacttggaatgatgcgccacctttatgtggtagtagatggatcaagaacaatggaagaccaagatttaaagcctaatagactgacgtgtactttaaaggtaaaatttaagtttatactaaatcatttaaatttgtaccaaaatcacttaaacttttactaaaaaagtggggaagaacactggattctaaaggatatttttaaagaatgcaatattttttattttttgccttgtatttttagttaatgctaatgatagctaagtagaagtactgccaggttatttagggaaattttaaaccaacatagctaattatttgtgtttttaatttctatcctcccaccccacatcaggatcttggtttatcagttaccccttttctttcttgaatcttcattctcctttgccttacttaactctgtctcctcagattacaaatatgttcgtattcctaatttatcaaaacctattctcaattctg

SEQ ID NO: 11113 - protein, 50 aa, Homo sapiens
MMRHLYVVVDGSRTMEDQDLKPNRLTCTLKVKFKFILNHLNLYQNHLNFY

SEQ ID NO: 11114 - DNA, 412 bp, Homo sapiens
atggatgaagaacctgaaagaactaagcgatgggaaggaggctatgaaagaacatgggagattcttaaagaagatgaatctggatcacttaaagctacaatagaagacattctattcaaggcaaagagaaaaaggtatgtaaccttcctatgtatcttaaaaaggtaaaatatattcattttaagcctttctatctataaatactcctcagtacttcattttagctgtgtttcagggtaactgacctattgccttctgactatggggaaagaactagccacctacccttgccccagcaggaaatggtctttagagactgtctacaatacctataattgtgtgtattgtattccataagttaattatttactccactaaaaatgcacgttatgacattcttactcagaattag

SEQ ID NO: 11115 - protein, 55 aa, Homo sapiens
MDEEPERTKRWEGGYERTWEILKEDESGSLKATIEDILFKAKRKRYVTFLCILKR

SEQ ID NO: 11116 - DNA, 1133 bp, Homo sapiens
ataaacgtagataaaatgaaggtgtactatgatatcttcagttttatcagaaatgatgtaaaaattacaacctctttaaaaagtagtgttaatcattaagttagaaaatatatagctgggcatggtggcagatgcctgtaatcccagctacatgggaaggtgaggtgggagaatcgcttgaacccaggcagtggaggatgcagtgagccaagatcatgccactgcaccccagcctgggtgacagaacaagactccatctcaagaaaaaaaaaaaagaaaaatatatatatgaacttcagaatctgaggtcatatatagacaggtctttcccccgtttcctctactttttcttgtagcttggaattagtcagtttcatcatgctataataagcttatctgaaaggcagtaaagtgatattttgtacaacttcattggctttttgagaagaacatttttaggttcttagtcctagaattttgctgtttgcttggaaaaagaaagtaatacattttcttctatgaaggatttcctcagcacaccattgcttctttatctgaccaggatgcaaaaccctctttcagcatggcgcatttggatggcaatactgagccagggcttacattaggaggctatttctgcccacagtgtcgggcaaagtactgtgagctacctgttgaatgtaaaatctgtggtcttactttggtgtctgctccccacttggcacggtcttaccatcatttgtttcctttggatgcttttcaagaaattcccctagaagaatataatggagaaagattttgttatggatgtcagggggaattgaaagaccaacatgtttatgtttgtgctgtgtgccaaaatgttttctgtgtggactgtgatgtttttgttcatgattctctacactgttgccctggctgtattcataagattccagctccttcaggtgtttgattccagcatgtagtatacattgtatgtgttaaaaagaaatttgcaactgtgaataaaaggacttctttagaagaagcttcatttaaaacatgaaaggataatctgacttaagaaactttttgctaagaaaaggtaatattttattaaattttaaatttgtgttgtcacagaaatacct

SEQ ID NO: 11117 - protein, 123 aa, Homo sapiens [sequence omitted]

SEQ ID NO: 11118 - DNA, 1128 bp, Homo sapiens
tacaggaagggaaaaataaataaaaatttaccacaagcttcagctccacatagcatttgtatagtcatgataatgtaaacatgtaatgtgaatatatgaatctagccaaaactatgccataactataaagaggggaaggctagtacaggaagggggtcatggagcaaagggatgaaagacatgaagactcatccttcatagcctgaatccgaggagtggataaagactcaatctaaagataaaataaggcaggaaatgaggaaaaagaaaaaaactgttgaagtgcatccaaagttgcagatggttaacattcattccactcacttgggaaaacatctggtgtgatcgtctaatgggtcatcaccttcctgccatttctctaaacaccctccacaggaaaagcactggacgatgtcctttatacctgtgtagaaaagacctgctttggccagtgctgcaactcccacagctgattcccggggccagtccttaaaagagtccagccgtagttcttcgtaagcaaagatgctgtcattgcaataagctgatgccataggtaattctctctggacccaggaattcacaaaatgttctcccgttatgtcaacaaatcccttgtagctttgaatatactgggtaatttcctctgaggatttcttactccgaagaaattcacatctgaggtttatccacagttctagtctaatagaggagaatgctggccagtggaaggaaagtatgtggctgaagaacaaatgctctgtccgtcctttagtaggaagcagtgagaaaatatttaaggaactggaagctgtgtttatggaattgttaagagatattggttccttgatgcctgtggaggatcttatctccttgcacccaaattgtactagtggactgctacaaggacttccactgctaatgaggactgcttgatgctgtgctggcaggctgttgtttctgtttaatatccttctgagtaagcgggtaccaagtatggccatggcagtcttgtgagtttgaatgtttaatgtaaagtgacttctgttggtcatagccacaaataatttcagatgtactaacttgataaacatattccagatgtttggttaaacctaaaaagacctc

SEQ ID NO: 11119 - protein, 65 aa, Homo sapiens
MWLKNKCSVRPLVGSSEKIFKELEAVFMELLRDIGSLMPVEDLISLHPNCTSGLLQGLPLLMRTA

SEQ ID NO: 11120 - DNA, 729 bp, Homo sapiens
attcctttaatttttatttctgttgatgttgcaattgtttttatgcagtgcaagcaaacatacacacacacacacacacacacacacacacacacacacacgcatgcaagctgtgaatgtttatgcatactcaggaggaagccttctcagggtcactgtttccggaaactgaccttgaaaacagacctgcatttaaatatcacagatgtactttgacgaatgaggaagtaagagacatagaatggtaactaaattcatcagggtattatatattgagcaactgattcttctgggaaagctgcacccagtttctttttgaggaaacacctctcttcccccactgtcaggccatgttctctatagagttctggtctcctgagtcatgttaatcaataaattctcatttttgtttaagccagtttggattcgatttcccatcactctccactaggaaatttttactgattcaggatagttagccagctaggaagagccagctctgcagcccactgtgggtgacagcgcctaggtcaggagatcttagcaagcctgcagataggggcagcagagggaagctggggcaagtggcttcattcataaaggggaagactatcaggaaggcaagcagagcccgtcagaagccagcccgttatgtcaacaaatcccttgtagctttgaatatactgggtaatttcctctgaggatttcttactccgaagaaattcacat

SEQ ID NO: 11121 - protein, 57 aa, Homo sapiens
MQCKQTYTHTHTHTHTHTHTHASCECLCILRRKPSQGHCFRKLTLKTDLHLNITDVL

SEQ ID NO: 11122 - DNA, 803 bp, Homo sapiens
tacaggaagggaaaaataaataaaaatttaccacaagcttcagctccacatagcatttgtatagtcatgataatgtaaacatgtaatgtgaatatatgaatctagccaaaactatgccataactataaagaggggaaggctagtacaggaagggggtcatggagcaaagggatgaaagacatgaagactcatccttcatagcctgaatccgaggagtggataaagactcaatctaaagataaaataaggcaggaaatgaggaaaaagaaaaaaactgttgaagtgcatccaaagttgcagatggttaacattcattccactcacttgggaaaacatctggtgtgatcgtctaatgggtcatcaccttcctgccatttctctaaacaccctccacaggaaaagcactggacgatgtcctttatacctgtgtagaaaagacctgctttggccagtgctgcaactcccacagctgattcccggggccagtccttaaaagagtccagccgtagttcttcgtaagcaaagatgctgtcattgcaataagctgatgccataggtaattctctctggacccaggaattcacaaaatgttctccctgagggaaattaaaattcaagttgttgattatctgactttttttttttttttttttttgaggcagagtctcactctgttgcccaggctgaagtgcagtggcaggttctcgtctcactgcaacctccgcctcctgggttcaagtgattctcctgcctcagcctcccgagtagtacaggcatgtgccaccacacccggctaatttttt

SEQ ID NO: 11123 - protein, 46 aa, Homo sapiens
MGHHLPAISLNTLHRKSTGRCPLYLCRKDLLWPVLQLPQLIPGASP

SEQ ID NO: 11124 - DNA, 1759 bp, Homo sapiens
gcaaagccagctgggctcctgagtccggtgggtacttggagaacttactacgtctagctggaggattgtaaatgcaccaatcagcatgctgtgtctagctcaagattttctccatccccttattttgggccagtggctgtcattacatatgagatgagtctcttgaagactacagatgaactcaagctccatgaggagatgtttcattgtcgagagcagtcatgatggcctgcactccacacaatgcaacagagtgaaagagcaggttctgcttctttggtgtagtcctgaagcttcctaagaaacttcacatcaggtgatggataggagcaaccctgtaaaaccagccttagactatttttcaaacaggctggtgaattaccagatctccgtcaagtgcagtaaccagttcaagttggaagtgtgtcttttgaatgcagaaaacaaagtcgtggacaaccaggctgggacccagggccagctgaaggtgctgggtgccaacctctggtggccgtacctgatgcacgaacaccccgcctacctgtactcgtgggaggatggtgattgctcacaccaaagccttggacccctcccagcctgtgacctttgggaccaactccacctacgcagcagacaagggggctctgtatgtggatgtgatccgtgtgaacagctactactcttggtatcgcaactacgggcacctggagttgattcggctgcagctggccgcccagtttgagaattggtgtaagacatcacaatcccattattcagagcgcgtatggagtggaaacgcttgtagggtttcaccagggctggtgaattaccagatctccgtcaagtgcagtaaccagttcaagttggaagtgtgtcttttgaatgcagaaaacaaagtcgtggacaaccaggctgggacccagggccagctgaaggtgctggtgccaacctctggtggccgtacctgatgcacgaacaccccgcctacctgtactcgtgggaggatggtgattgctcacaccaaagccttggacccctcccagcctgtgacctttgggaccaactccacctacgcagcagacaaggcggctctgtatgtggatgtgatccgtgtgaacagctactactcttggtatcgcaactacgggcacctggagttgattcggctgcagctggccgcccagtttgagaattggtgtaagacatcacaatcccattattcagagcgcgtatggagtggaaacgcttgtagggtttcaccagtctttcccagggaactccgatgaagtgttccaacaaaatgagcgagtgaaccaagaagaggatgacattagatccaggagatacaacagaggagataatctccaggatgcctgtgaagaaagatccctggatcccaggatgattataggacaagttgttcataatccagcaggccagaagacttccagggaaactcatttcaagatgaaaatggaccagccgcagtggctcacgcctgtaataccagcactttgggaggctgaggcaggcggatcacttgaggtcaggagtttgaaactagcctggccaacgtggcaaaactccatctctattaaaaatacaaaaattagccaggcatagtggtgcatgcctgtagtcccagctacttgggatgctgaggcaggaagaattgcttgaacctgggaggcagagtctgcagtgagccgagatcatgccactgcactccagcctgggtgacagagccagactccgtctc

SEQ ID NO: 11125 - protein, 140 aa, Homo sapiens; identical to SEQ ID NO: 4568

SEQ ID NO: 11126 - DNA, 535 bp, Homo sapiens; identical to SEQ ID NO: 10996

SEQ ID NO: 11127 - protein, 48 aa, Homo sapiens; identical to SEQ ID NO: 10997

SEQ ID NO: 11128 - DNA, 1752 bp, Homo sapiens
cccttattttgggccagtggctgtcattacatatgagatgagtctcttgaagactacagatgaactcaagctccatgaggagatgtttcattgtcgagagcagtcatgatggcctgcactccacacaatgcaacagagtgaaagagcaggttctgcttctttggtgtagtcctgaagcttcctaagaaacttcacatcaggtgatggataggagcaaccctgtaaaaccagccttagactatttttcaaacagtaagtaataaaggtgacgttttgatctttatctgcttaattacttctgctatgattctattgattctaacattgaaggagcagtaaatttatatgtattatccaactataaaacaataaataaacgatatgtcaaatacattatcacatccttatgttcttatgataatattgtcctttttttaacagtttttattcttatttgttgattggtttgtctttatgttgtcctttctactatcaaactgaacatgttgaggtcataggctatcaaaactgtacatttctgatgctaaccatagagacttaacaacagtaaataggccaaaatggaatgttgttagccatagtgtgtattattatttcttttatacatgtggtcactgttagaggagtttatgactttttgcctagattaatgacacacaaaccatctacaaacgaatcataccttattccctcactgtaatttttaatgttgctatttttgcctgttaacattccataggtttatcacattgcttaaagatttaatttaatttctgtaattgtatatgtcatgagagattgcttttaaccttccaatgttcgtggtctcattttcactaacataatcccaactttagctgcgcacaataccacatttcccagcattccttgcatctggatatagctgtattcaaataagccgtgtgaaacttctgggatggctccttaagtgcagttgactcattagggaggtatgtcttttttatttttctacactttgtgctgctgtcctggagtacagacatggtggctagaagcatgaaatcaccttgaaggtagaagtcatgcattgaagttagtaaaagtgaaatgtaagtgtatagtttcctgatgaaaatgggaagcttatgtactagcaacagaatgcttattatgcaggcttcctatatgtaaaagaggacaaattctcattttattaagtttctgaaagtagatttctaaatgctggttctattttttattgaaagtaatggcaaaaaacgcaatgccttttgtaccaacctaatagttaataaacatatcctcaaatgaaatgtcttagaattgtgttcatcaagttaatattaataatttattagaatagcactctaaagggttgcagcctatgcatgaaaatacttacaaactactacatgataatcaattctttttggcaagactgctatttacatggacacaagagttattataagaatgttgtatgtatacatgaatagtgtctgttaaacactggatataataaaaacaatagtttttctgttaattataacaatctgaacatttttgtgattatatttcacaaatgacacaccattttatttgcagatttttcttatccccaaagtttttgttaatttattaccaacacagcacacaagtctagtggcaatgcattacctctgcagttgattttgaagtaagaaggcctatttattgcattcattcctgctt

SEQ ID NO: 11129 - protein, 41 aa, Homo sapiens
MNSSSMRRCFIVESSHDGLHSTQCNRVKEQVLLLWCSPEAS

SEQ ID NO: 11130 - DNA, 2088 bp, Homo sapiens
gacttccgggtgggcgcgggctcggcgcgccccgcactgttgagcggtcggctggcgccgccggccctgggcagtgagaggcttagcacccgggccagcagctgcggagggtgcactgggtcctccaacagtgatggcccgccggcgccgcgctcgaattttcgctgggcctcagccacctccccgcggggcaagggggcagggctcgggacctgcagcctgccatgctggagccctcaccctcctccccgcccccgtcccctgccccccgccccccgccccccgccccccaaccgcaggctcccgcgcgccaccccgaggggacgggcgccacctcctgctacgcggcacccggtcccgtcaaccgcccaacggctgaggagtgcggcagcgcgccagagactggcgggcagctccgcccgcggccgggatgcactaggcaaagccagctgggctcctgagtccggtgggtacttggagaacttactacgtctagctggaggattgtaaatgcaccaatcagcatgctgtgtctagctcaagaactcaagctccatgaggagatgtttcattgtcgagagcagtcatgatggcctgcactccacacaatgcaacagagtgaaagagcaggttctgcttctttggtgtagtcctgaagcttcctaagaaacttcacatcaggtgatggataggagcaaccctgtaaaaccagccttagactatttttcaaacaggctggtgaattaccagatctccgtcaagtgcagtaaccagttcaagttggaagtgtgtcttttgaatgcagaaaacaaagtcgtggacaaccaggctgggacccagggccagctgaaggtgctgggtgccaacctctggtggccgtacctgatgcacgaacaccccgcctccctgtactcgtgggaggatggtgattgctcacaccaaagccttggacccctcccagcctgtgacctttgtgaccaactccacctacgcagcagacaagggggctctgtatgtggatgtgatccgtgtgaacagctactactcttggtatcgcaactacgggcacctggagttgattcagctgcagctggccgcccagtttgagaattggtgtaagacatcacaatcccattattcagagcgcgtatggagtggaaacgcttgtaaggcttcaccaggatccacctctgatgttcagtgaagaggaccggaaaagtctgctagagcagtaccatctgggtctggatcaaaaacgcagaaaatacgtggttggagagctcatctggaattttgccgatttcatgactaaccagtccaaggatgaaggaaaaactggacctcattatggatttacttttgggatacactcattattccagaggagggtaaaaggctgagaagcttaaggtatttcagtctgttttatgttactcatttgcgaaaagcaggctcatcgaatacaggtgagtttcaacgcgtcttgaatatggcagcatttaaaagtcttcagaccaggcatggtggctcatgcctgtcatcccagcactttgggaggccaaggtgggaggattgcttgaggccaggagttcgagaccagcctgttcagcatagcaggacccccatctctacaaaaactaaacagattagctaggtgtggtggtgtgtgcctgtagtcctagctgcttgggaggctgaggcaggcggatagcctgagcacaggagttggaggctgcagtaagccatgattacaccactgcacttgagcctgggcagcagagtgagacctgtctttaaaaaaaaaaaaggagctgggcacggtggctcatgcctgtaatcccagcactttgggaggccgaggcaggcagatcacgaggtcaggagatcgagaccatcctggctaacagtgaaaccctgtctctactgaaaatacaaaaaaaatcagccgggcgtggtggcgggtgcctgtagtcccagctgctcgggaggctgaggcaggagaatggcatgaacccaggagttggagcttgcagtgagccgagattgtgccactgcactccagcctgggcgacagtgagactgcttctc

SEQ ID NO: 11131 - protein, 140 aa, Homo sapiens
MDRSNPVKPALDYFSNRLVNYQISVKCSNQFKLEVCLLNAENKVVDNQAGTQGQLKVLGANLWWPYLMHEHPASLYSWEDGDCSHQSLGPLPACDLCDQLHLRSRQGGSVCGCDPCEQLLLLVSQLRAPGVDSAAAGRPV

SEQ ID NO: 11132 - DNA, 1306 bp, Homo sapiens; identical to SEQ ID NO: 11104

SEQ ID NO: 11133 - protein, 36 aa, Homo sapiens; identical to SEQ ID NO: 11003

SEQ ID NO: 11134 - DNA, 3965 bp, Homo sapiens
tcccaaagtgctgggattacaggcatgagccaccgcgcccggcctatcatatgaattttgagggaacacaaacatgcagtctgtagcagatggtaataggctgacatattacacttgttgatgtaaatctgataggtttctttctctccaaggacagctttttaaatatttaacagtatcaataatttttcaggttctgtgagaattttataatttataatttgcagacttaacgtataatctattttgtcctaacaattacaaatatattttttatttcagattgtatatattcctaccagatggagataattacagctttaaaaatttttattttttcattttatttcacacattgacattaaatttttatggacacataataactgtacatatatatggggtagaatgtgatgttttaatacatgtactcaatgtgtaatgatcaaatcagggtaatttgcataatgatttttctgtagggagaaaattcaaaatctactcttctggctattttcaaatatataatatgttattgttaactatactcatcctactatgcaataggacaccagaacttattcctgggttctacatccgttaaggcaaccaaggattggaaatattggaaaaaaaaattgcgtctgtactgaacatgtacagacttttttcttgtccttattccttacacaatatagtacaataactatttgcatgacatttacatcggatattatgagtgatctagagttgatatgaagtatatgggaggatgtgcaaaggtgatgtgcaaatactatgtcattttatatcagggacttgagtatcctttgttaccctcaggagatcctgaaaccagtcccccatggatactgagggctgactgtatagtcctatcctcacggaactttcattctaatgggggaagactgactataaacaaaatatatgtaataggtggtggtaagtaccgtggagaagtaacaaatggggcaaagtgagttatacagctccattcttagaaaccttggagtacttttcttagtttatactcgtggtggtttccttttgtctcctttattacatgggactctgacatgtgcccatagctagggtgacagtaggatctacccgatagtagggtggcagtaggatctacccaaaaagcgtcctgctgatacaggaccaaagcatcctgttgttctcgagcctataaaaagagctaatggtgttgcttctcttaactgtggcctcctacactgtgttttggatgattggtgatgtcttggatattctgtttctttggaactttgaatatacaacactttactagggaattagcaatggaagcagagcaaagatgtacagaggaaacaatgcgtaactctgatggaattgaagtcatgaggcagcagagagcttaaattacagctttaaaaatttttattttttagagggaatttacttgggagtaacagcagtaatagttaacggagccagaatgcttgagtcatataattgcaaagcagagttgggagcaacagatgctaaagagtagttgctgtagttcctctttgggtcgtaggagcagttgtcatattactatatagctactgcatgaagaagagttcttagtgaggcctgggtgaacagctcttcttagtattctgtgtgaccccatttgaccttttaacaaatccctaagtaaataaatagcccctcaggaaaactaagtttttctctgctgtttttttgcttgagagagctataactgtaatagacttatatttctgaacattttagtgcttgccaatatttggtaatatttatgtttcctatatttgtaatgaacattcttcttccggtacattttttgttaaattattgtttgatggataaaagttcaccttttattgtataaaattgactgagattaatttatacacattgacaatgggtaaatagaatttttcagattattaaaagctgaaggatgcccacgtaagcaaaaaaaaaaaagaaaaaaccaacaaaaataaacccaaacccctcaaacagtttcgaacacgaaacattcttctgatgccggcatccctgcttgcaggtgtgaagggggcaggaatcagcgaggtgtcctgggctgagtccccggagtgggaagaggtggcaggaaggggatctgaggaggagaacaggggtcctggtggtctgtgcttcttcccagacacgggagctgtagaggagacctctgcagcagatgctaggggggccagtaggcccaggcagtcttgggacttgggtctgtcctgctgtgcatccatagtgggtgctttagaaacgggaggcccacccgaagcccctgttgcaagtgaggacaaagtgtgggaaggccgtgagggtctgcagtccgagatggccttgtcctcaacgtgcagtgcactgttgatgcggggcctagaggcctgggatctggggtagccacccctgggggcgagtgtctgccctggtgctgtacctgccttgttttcacagcggtgacccgaagagacagcctgaggtccgtcctcactcactgtgtttgaggaactgtgggccagctggcagtgggatgaggctggccccctcctccgctttagttcctggaggccttccgtagagctgtgggagctggagctggcatttcgtttgaggcaggatctggtccgggaggtctgggatctctggttatatctcacttctgacctctgggcacgtgctgcagctgtggctgaggccaagaaatgtgaggggcctccatccactgcattgagtagcgaccccgacgtggggttcaatgtggaggggggaagggctgctgcggcagctgcaggagccgaggtgccaggccttgttcttctcatgccggcatccctgcttgcagctgtgaaggtggcaggaatcagcgaggtgacctgggctgagtcccgggagtgggaagaggtggcaggaaggggatctgaggaggagaacaggggtcctggtggtctgtgcttcttcccagacacgggagctgtagaggggacctctgcagcagatgctaggggggccactaggcccaggcagtcttgggacttgggtctgtcctgctgtgcgtccatagtgggtgctttagaaacgggaggcccacccgaagcccctgttgcaagtgaggacaaagtgtgggaaggccgtgagggtctgcagtccgagatggccttgtcctcaacgtacagtgcactgttgatgtggggcctagaggcctgggatctgggggagcctcccctgggggcgagtgtctgccctggtgctgtacctgccttgttttcacagcggtgacccgaagagacagcctgaggtccgtcctcactcactgtgtttgaggaactgtgggccagctggcagtgggatgaggctggccccctcctccgctttagttcctggaggccttccgtagagctgtgggagctggagctggagctggcatttcgtttgaggcaggatctggtccgggaggtctgggatctctggttatatctcacttctgacctctgggcacgtgctgcagctgtggctgaggccaagaaatgtgaggggcctccatccactgcattgagtagtgaccccgacgtgttgttcaatgtggaggggggaggggctgctgtggcagctgcaggagccgaccttgttcttctcatgccggcatccctgcttgcagctgtgaaggtggcaggaatcagcgaggtgacctgtgctgtgtcccgggagtggtaagaggtggcaggaaggggatctgaggaggagaacaggggtcctggtggtctgtgcttcttcccagacacgggagctgtagaggggacctctgcagcagatgctaggggggccagtaggcccagggagtcttgggacttgggtctgtcctgctgtgcatccatagtgggtgctttaga

SEQ ID NO: 11135 - protein, 151 aa, Homo sapiens
MPASLLAAVKVAGISEVTWAESREWEEVAGRGSEEENRGPGGLCFFPDTGAVEGTSAADARGATRPRQSWDLGLSCCASIVGALETGGPPEAPVASEDKVWEGREGLQSEMALSSTYSALLMWGLEAWDLGEPPLGASVCPGAVPALFSQR

SEQ ID NO: 11136 - DNA, 5269 bp, Homo sapiens
atctggagactgagttttgcactcgttgcccaggctggagtgcaatggtgcgatctcagctcactgcagtctccacctcagcaggagagcaggaatcttcagtgatccacgggcaaatatgcagccattgtgggcacctgttcctcccgcgacctttgtgcccacgtctctccctccagtacctactgcacgaccccccacgtccgcctcctgccattgccagcaggtgccttgcgcgggtacctggctgcgcttattcatccattatggtcgctctgtcactggtgccattatgtgctcacatgcccactccctcaggtttagaagtcgcgttgcccggcaacagaacaatctgctggcttagcctttggccaagttggcagctggacgaggacgctcagagcccagctcttgagagttcaagtatccgacagttccccactgctcccaggagcggttacccgggcactctgtgcccctcattcctgtttgggccaaggccgaggacctgcgagtaccacagtaagccagtgctgtgtgctccgagttccagggcatcccccagctcagccactacactgagcacaaggactctgtggggcccaggagcaggtagtcacccctttggggtccacaacacccggctgtccccagacttgtgtccagggaagatagtgttgagggccctcaaggagagcggggcagggatgcctgagcaggacaaggaccccagagtccaagaaaatcctgatgatcagagaacggtccccgaggtcaccggggatgcacggtctgcattttggcccctgcgggacaatggaggcccctctccctttgtgcccaggcccgggcctctgcagacagacctccacgcccagagctcagaaatcagatataaccacacatcccagacatcctggacgagctcgagcaccaaacgaaatgccatctccagctcctacagctccacgggaggcttgccggggctaaagcagaggagggggccagcctcatcccgctgccagctgaccctcagttactcaaagacagtgagtgaggacaggcctcaggctgtctcttcgggtcacacacggtgtgaaaagggggcagatacagcaccagggcagacaatcgccccaacgggtggctcccccagatcccaggactctaggccccgtagacgcaagattcccctgctgccacgcaggcgaggggagcctttgatgctgccacctcccttagagctggggtaccgggtcacggctgaagacctgcacctggaaaaagagacggcattccagcgcatcaacagtgcactgcacgttgaggacaaggccatcccggactgcagaccctcacggccttcccacactttgtcctcacttgcaacaggggcttcgggtgggcctcccgtttctaaagcacccactatggatgcacagcaggacagacccaagtcccaagactgcctgggcctagtggcccccctagcatctgctgcagaggtccccgctacagctcccgtgtctgggaagaagcacagaccaccaggacccctgttctcctcctcagatccccttcctgccaactcttcccactcccgggactcagcccaggtcacctcgatgattcctgcccccttcacagctgcaagcagggatgccggcatgagaagaacaaggtcggctcctgcagctgccgcagcagcccctcccccctccacattgaaccccacgtcggggtcactactcaatgcagtggatggaggcccctcacatttcttggcctcagccacagctgcagcacgtgcccagaggtcagaagtgagatataaccagagatcccagacctcccggaccagatcctgcctcaaacgaaatgccagctccagctcccacagctctacggaaggcctccaggaagtaaagcggaggagggggccagcctcatcccactgccagctggccctcagttcctcaaacacagtgagtgaggacggacctcaggctgtctcttcgggtcaccgctgtgaaaacaaggcaggtacagcaccagggcagacacttgcccccaggggtggctcccccagatcccaggcctctaggccccacatcaacactgcactgcacgttgaggacaaggccatctcggactgcagaccctcacggccttcccacactttgtcctcacttgcaacaggggcttcgggtgggcctcccgtttctaaagcacccactatggatgcacagcaggacagacccaagtcccaagactccctgggcctactggcccccctagcatctgctgcagaggtcccctctacagctcccgtgtctgggaagaagcacagaccaccaggacccctgttctcctcctcagatccccttcctgccacctcttaccactcccgggacacagcacaggtcacctcgctgattcctgccaccttcacagctgcaagcagggatgccggcatgagaagaacaaggtcggctcctgcagctgccacagcagcccctcccccctccacattgaacaacacgtcggggtcactactcaatgcagtggatggaggcccctcacatttcttggcctcagccacagctgcagcacgtgcccagaggtcagaagtgagatataaccagagatcccagacctcccggaccagatcctgcctcaaacgaaatgccagctccagctccagctcccacagctctacggaaggcctccaggaactaaagcggaggagggggccagcctcatcccactgccagctggcccacagttcctcaaacacagtgagtgaggacggacctcaggctgtctcttcgggtcaccgctgtgaaaacaaggcaggtacagcaccagggcagacactcgcccccaggggaggctcccccagatcccaggcctctaggccccacatcaacagtgcactgtacgttgaggacaaggccatctcggactgcagaccctcacggccttcccacactttgtcctcacttgcaacaggggcttcgggtgggcctcccgtttctaaagcacccactatggacgcacagcaggacagacccaagtcccaagactgcctgggcctagtggcccccctagcatctgctgcagaggtcccctctacagctcccgtgtctgggaagaagcacagaccaccaggacccctgttctcctcctcagatccccttcctgccacctcttcccactcccgggactcagcccaggtcacctcgctgattcctgccaccttcacagctgcaagcagggatgccggcatgagaagaacaaggcctggcacctcggctcctgcagctgccgcagcagcccttcccccctccacattgaaccccacgtcggggtcgctactcaatgcagtggatggaggcccctcacatttcttggcctcagccacagctgcagcacgtgcccagaggtcagaagtgagatataaccagagatcccagacctcccggaccagatcctgcctcaaacgaaatgccagctccagctcccacagctctacggaaggcctccaggaactaaagcggaggagggggccagcctcatcccactgccagctggcccacagttcctcaaacacagtgagtgaggacggacctcaggctgtctcttcgggtcaccgctgtgaaaacaaggcaggtacagcaccagggcagacactcgcccccaggggtggctaccccagatcccaggcctctaggccccgcatcaacagtgcactgcacgttgaggacaaggccatctcggactgcagaccctcacggccttcccacactttgtcctcacttgcaacaggggcttcgggtgggcctcccgtttctaaagcacccactatggatgcacagcaggacagacccaagtcccaagactgcctgggcctactggcccccctagcatctgctgcagaggtctcctctacagctcccgtgtctgggaagaagcacagaccaccaggacccctgttctcctcctcagatccccttcctgccacctcttcccactccggggactcagcccaggacacctcgctgattcctgcccccttcacacctgcaagcagggatgccggcatcagaagaatgtttcgtgttcgaaactgtttgaggggtttgggtttatttttgttggttttttcttttttttttttgcttacgtgggcatccttcagcttttaataatctgaaaaattctatttacccattgtcaatgtgtataaattaatctcagtcaattttatacaataaaaggtgaacttttatccatcaaacaataatttaacaaaaaatgtaccggaagaagaatgttcattacaaatataggaaacataaatattaccaaatattggcaagcactaaaatgttcagaaatataagtctattacagttatagctctctcaagcaaaaaaacagcagagaaaaacttagttttcctgaggggctatttatttacttagggatttgttaaaaggtcaaatggggtcacacagaatactaagaagagctgttcacccaggcctcactaagaactcttcttcatgcagtagctatatagtaatatgacaactgctcctacgacccaaagaggaactacagcaactactctttagcatctgttgctcccaactctgctttgcaattatatgactcaagcattctggctccgttaactattactgctgttactcccaagtaaattccctctaaaaaataaaaatttttaaagctgtaatttaagctctctgctgcctcatgacttcaattccatcagagttacgcattgtttcctctgtacatctttgctctgcttccattgctaattccctagtaaagtgttgtatattcaaagttccaaagaaacagaatatccaagacatcaccaatcatccaaaacacagtgtaggaggccacagttaagagaagcaacaccattagctctttttataggctcgagaacaacaggatgctttggtcctgtatcagcaggacgctttttgggtagatcctactgccaccctactatcgggtagatcctactgtcaccctagctatgggcacatgtcagagtcccatgtaataaaggagacaaaaggaaaccaccacgagtataaactaagaaaagtactccaaggtttctaagaatggagctgtataactcactttgccccatttgttacttctccacggtacttaccaccacctattacatatattttgtttatagtcagtcttcccccat

SEQ ID NO: 11137 - protein, 1387 aa, Homo sapiens
MVRSQLTAVSTSAGEQESSVIHGQICSHCGHLFLPRPLCPRLSLQYLLHDPPRPPPAIASRCLARVPGCAYSSIMVALSLVPLCAHMPTPSGLEVALPGNRTICWLSLWPSWQLDEDAQSPALESSSIRQFPTAPRSGYPGTLCPSFLFGPRPRTCEYHSKPVLCAPSSRASPSSATTLSTRTLWGPGAGSHPFGVHNTRLSPDLCPGKIVLRALKESGAGMPEQDKDPRVQENPDDQRTVPEVTGDARSAFWPLRDNGGPSPFVPRPGPLQTDLHAQSSEIRYNHTSQTSWTSSSTKRNAISSSYSSTGGLPGLKQRRGPASSRCQLTLSYSKTVSEDRPQAVSSGHTRCEKGADTAPGQTIAPTGGSPRSQDSRPRRRKIPLLPRRRGEPLMLPPPLELGYRVTAEDLHLEKETAFQRINSALHVEDKAIPDCRPSRPSHTLSSLATGASGGPPVSKAPTMDAQQDRPKSQDCLGLVAPLASAAEVPATAPVSGKKHRPPGPLFSSSDPLPANSSHSRDSAQVTSMIPAPFTAASRDAGMRRTRSAPAAAAAAPPPSTLNPTSGSLLNAVDGGPSHFLASATAAARAQRSEVRYNQRSQTSRTRSCLKRNASSSSHSSTEGLQEVKRRRGPASSHCQLALSSSNTVSEDGPQAVSSGHRCENKAGTAPGQTLAPRGGSPRSQASRPHINTALHVEDKAISDCRPSRPSHTLSSLATGASGGPPVSKAPTMDAQQDRPKSQDSLGLLAPLASAAEVPSTAPVSGKKHRPPGPLFSSSDPLPATSYHSRDTAQVTSLIPATFTAASRDAGMRRTRSAPAAATAAPPPSTLNNTSGSLLNAVDGGPSHFLASATAAARAQRSEVRYNQRSQTSRTRSCLKRNASSSSSSHSSTEGLQELKRRRGPASSHCQLAHSSSNTVSEDGPQAVSSGHRCENKAGTAPGQTLAPRGGSPRSQASRPHINSALYVEDKAISDCRPSRPSHTLSSLATGASGGPPVSKAPTMDAQQDRPKSQDCLGLVAPLASAAEVPSTAPVSGKKHRPPGPLFSSSDPLPATSSHSRDSAQVTSLIPATFTAASRDAGMRRTRPGTSAPAAAAAALPPSTLNPTSGSLLNAVDGGPSHFLASATAAARAQRSEVRYNQRSQTSRTRSCLKRNASSSSHSSTEGLQELKRRRGPASSHCQLAHSSSNTVSEDGPQAVSSGHRCENKAGTAPGQTLAPRGGYPRSQASRPRINSALHVEDKAISDCRPSRPSHTLSSLATGASGGPPVSKAPTMDAQQDRPKSQDCLGLLAPLASAAEVSSTAPVSGKKHRPPGPLFSSSDPLPATSSHSGDSAQDTSLIPAPFTPASRDAGIRRMFRVRNCLRGLGLFLLVFSFFFLLTWASFSF

SEQ ID NO: 11138 - DNA, 2340 bp, Homo sapiens
tggagataactgaatcatggaggcagtttcccccatgctgttctcatggtagtgaataagtctcatgaggtctgatggttttataaatggatgttcccctgcacatgctctctcctgcccaccatgtctgactaaattttgtatttttactagagacgggctttcactatgttggccaggctggcctccaactcctgatctcgtgatccgtccaccccgacctcccaaagtgctaggatcataggcataagccaccacacccggcctcttttttttctttttcttttttttatctggagactgagttttgcactcgttgcccaggctggagtgcaatggtgcgatctcagctcactgcagtctccacctcagcaggagagcaggaatcttcagtgatccacgggcaaatatgcagccattgtgggcacctgttcctcccgcgacctttgtgcccacgtctctccctccagtacctactgcacgaccccccacgtccgcctcctgccattgccagcaggtgccttgcgcgggtacctggctgcgcttattcatccattatggtcgctctgtcactggtgccattatgtgctcacatgcccactccctcaggtttagaagtcgcgttgcccggcaacagaacaatctgctggcttagcctttggccaagttggcagctggacgaggacgctcagagcccagctcttgagagttcaagtatccgacagttccccactgctcccaggagcggttacccgggcactctgtgcccctcattcctgtttgggccaaggccgaggacctgcgagtagggctcagttgcctggagccccttcagcccatcccccagttcactttgcttgtgggatctccccgttgctcctgcccctggactgagtggcaggccatcctacaaacacccgcacactcgacatcactggtgtcaagacaactctaagaaggttttccgtgatcctgcaagacctgtgttccatcctggtgattctgtcttcaatttcactgcacaggtaccacagtaagccagtgctgtgtgctccgagttccagggcatcccccagctcagccactacactgagcacaaggactctgtggggcccaggagcaggtagtcacccctttggggtccacaacacccggctgtccccagacttgtgtccagggaagatagtgttgagggccctcaaggagagcggggcagggatgcctgagcaggacaaggaccccagagtccaagaaaatcctgatgatcagagaacggtccccgaggtcaccggggatgcacggtctgcattttggcccctgcgggacaatggaggcccctctccctttgtgcccaggcccgggcctctgcagacagacctccacgcccagagctcagaaatcagatataaccacacatcccagacatcctggacgagctcgagcaccaaacgaaatgccatctccagctcctacagctccacgggaggcttgccggggctaaagcagaggagggggccagcctcatcccgctgccagctgaccctcagttactcaaagacagtgagtgaggacaggcctcaggctgtctcttcgggtcacacacggtgtgaaaagggggcagatacagcaccagggcagacaatcgccccaacgggtggctcccccagatcccaggactctaggccccgtagacgcaagattcccctgctgccacgcaggcgaggggagcctttgatgctgccacctcccttagagctggggtaccgggtcacggctgaagacctgcacctggaaaaagagacggcattccagcgcatcaacagtgcactgcacgttgaggacaaggccatcccggactgcagaccctcacggccttcccacactttgtcctcacttgcaacaggggcttcgggtgggcctcccgtttctaaagcacccactatggatgcacagcaggacagacccaagtcccaagactgcctgggcctagtggcccccctagcatctgctgcagaggtccccgctacagctcccgtgtctgggaagaagcacagaccaccaggacccctgttctcctcctcagatccccttcctgccaactcttcccactcccgggactcagcccaggtcacctcgatgattcctgcccccttcacagctgcaagcagggatgccggcatgagaagaacaaggtcggctcctgcagctgccgcagcagcccctcccccctccacattgaaccccacgtcggggtcactactcaatgcagtggatggaggcccctcacatttcttggcctcagccacagctgcagcacgtgcccagaggtcagaagtgaga

SEQ ID NO: 11139 - protein, 373 aa, Homo sapiens
MPEQDKDPRVQENPDDQRTVPEVTGDARSAFWPLRDNGGPSPFVPRPGPLQTDLHAQSSEIRYNHTSQTSWTSSSTKRNAISSSYSSTGGLPGLKQRRGPASSRCQLTLSYSKTVSEDRPQAVSSGHTRCEKGADTAPGQTIAPTGGSPRSQDSRPRRRKIPLLPRRRGEPLMLPPPLELGYRVTAEDLHLEKETAFQRINSALHVEDKAIPDCRPSRPSHTLSSLATGASGGPPVSKAPTMDAQQDRPKSQDCLGLVAPLASAAEVPATAPVSGKKHRPPGPLFSSSDPLPANSSHSRDSAQVTSMIPAPFTAASRDAGMRRTRSAPAAAAAAPPPSTLNPTSGSLLNAVDGGPSHFLASATAAARAQRSEV

SEQ ID NO: 11140 - DNA, 4493 bp, Homo sapiens
agatcccacaagcaaagtgaactgggggatgggctgaaggggctccaggcaactgagccctactcgcaggtcctcggccttggcccaaacaggaatgaggggcacagagtgcccgggtaaccgctcctgggagcagtggggaactgtcggatacttgaactctcaagagctgggctctgagcgtcctcgtccagctgccaacttggccaaaggctaagccagcagattgttctgttgccgggcaacgcgacttctaaacctgagggagtgggcatgtgagcacataatggcaccagtgacagagcgaccataatggatgaataagcgcagccaggtacccgcgcaaggcacctgctggcaatggcaggaggcggacgtggggggtcgtgcagtaggtactggagggagagacgtgggcacaaaggtcgcgggaggaacaggtgcccacaatggctgcatatttgcccgtggatcactgaagattcctgctctcctgctgaggtggagactgcagtgagctgagatcgcaccattgcactccagcctgggcaacgagtgcaaaactcagtctccagataaaaaaaagaaaaagaaaaaaaagaggccgggtgtggtggcttatgcctatgatcctagcactttgggaggtcggggtggacggatcacgagatcaggagttggaggccagcctggccaacatagtgaaagcccgtctctagtaaaaatacaaaatttagtcagacatggtgggcaggagagagcatgtgcaggggaacatccatttataaaaccatcagacctcatgagacttattcactaccatgagaacagcatgggggaaactgcctccatgattcagttatctccacctggccccacccttgacacatgggaattgttacaattcaagatgagatttgggtgcggacagagccaaaccatataattcttccccggcccctcccaaatctcatgtcctcatatttcaaaagcaatcgtgccttcccctaagtcccccaaactcttatttcagcattaactcaaaattccgtagtccaaagtctcatctgagacaaggcaagtcccttccacctatgagcctgtaaaatcaaaagcaagttagttattttctagatacacagggatacaggcattgggtaaatacactcgtttcaaatgggagaaattggccaaagcgaaagagctacaggccccatgcaagtccaaaacccagcaggcaaatcttaaagctccaaaatgacctcctttgactccatgtgtcacatctaggtgatgcaagaagtgggttcccagggtcttgggcagccccgcccctgtggctttgcagggtacagccccccttctggctgcattgagtgtctgcagcttttccaggcacacagtgcaagctgtcagtggatctaccattctggggtctggaggatggtggcccttttctcacagctctgcttggcagtaccccagtggggactctgtgtgggagctccaaccccatatttctctttgacactgccctagcagaggttatccatgagggcccccccctcccctcccccccacagcaaacttttgcctggatttccaggcattttcatacatcttctgaaatgtaggcggaggttcatgaacgttaattcttgactttggtgcatctgcaggcttaacaccacctagaacctgaaaggcttggaacttgcaccctctgaagccatggcctgaggtgtaccttggccccttttacctatggcaggagcagctgggatgcagggccccaagttcctaggctgcacacagcagggggttctggacccacaaaaccatttttccttctaagcctcctggcctgtgatgggagggtctgctgtgagggtctctaacatgccctggagacatttgccccattgtcttggtgattaacatttggctcctcattacttatgcaaatttctacaacccagtctcctgagaaaatagatttttcttttctgttgcatcatcaggctacaaattttctgaacttttatgctctgcttcttctcgaatgctttgctgcttagaaatttcttctgtcagataccttaaatcatctctctcaagttcaaagttccacagatctgtagggaactctagaaagaaattcttattttccctctttcccgcctatcttatgcccgtttctaatacaggtgcacaatgcctgcagtgtctttgcatagtaagagtgactttactccatttcccaacaaattcctcatctccctctgagaccacctccgcctggaccttgttgtccatatcactattaacattttggtcaaagccattcaacaagtctctaggaagttccaaactttcccacattttcctatcctcttctgagccttccaaactgttccagcctctccctgttacccatttccaaagttgcttccacattttcgggtatctttacagcagcaccccactctactggtatcaacttattgtattagtctgttctcacaccgcaaataaagacatacctgagactgggtaatttataaaggaaagaggttgaattgactcacagttctgcatggctggggaggcctcacaatcatggtggaaggcaaggaggtgcaaaagcatgtctcacatagtggcaggcaggagagagcatgtgcaggggagctcccatttataaaaccatcagatctcatgagacttagtcactaccgcgagaacagtatggggggaaccatccccatgattcagttatctgcacccggccccacccttgacacgtgggaattattacaatgcaagggctggtgaattaccagatctccgtcaagtgcagtaaccagttcaagttggaagtgtgtcttttgaatgcagaaaacaaagtcgtggacaaccaggctgggacccagggccagctgaaggtgctgggtgccaacctctggtggccgtacctgatgcacgaacaccccgcctccctgtactcgtgggaggatggtgattgctcacaccaaagccttggacccctcccagcctgtgacctttgtgaccaactccacctacgcagcagacaagggggctctgtatgtggatgtgatccgtgtgaacagctactactcttggtatcgcaactacgggcacctggagttgattcagctgcagctggccgcccagtttgagaattggtgtaagacatcacaatcccattattcagagcgcgtatggagtggaaacgcttgtaaggcttcaccaggatccacctctgatgttcagtgaagaggaccggaaaagtctgctagagcagtaccatctgggtctggatcaaaaacgcagaaaatacgtggttggagagctcatctggaattttgccgatttcatgactaaccagtccaaggatgaaggaaaaactggacctcattatggatttacttttgggatacactcattattccagaggagggtaaaaggctgagaagcttaagacttgctataattctgtgagagagctataaaagtctgctcagaaacattataatgtaaaatggacagagaaggacaatgagatatttaatttgccacggcaaagccattgctgtgaagaatggataatatatgtcaatggtaatatatgaagaaataacacagatggagctggcttgaaatcctcttgtttatggcagtacatatcggttatgattcaaaaaatatagcccatttccaaaaacctgcaacaaagagatactttctcagtcctgcaggctgtacaggaagcacagtggcatcttcttctggagaggcctcagggagcttttactcatgacagaaggcaaagcaggagcaggcacttcacatggtgaaagcaggaacaagagagagagagtgtgttggggtaggtgcactaccatggagacagcaccaagtcacgaaggattcgacctcatgatccaaacacttcccaccaagctccaccttcagcactggggatctggtttcaacatgagatttgggcgggacatccaaactatatcatctgtctccctcatccaagaccatgtgatccgtagctcacttttgtctagcaacagattaaatacagcattttctgtgtgatatctttgttgaggtctttgcagatggctgtttctttgtcctgaaactttcttcatctgctctttcaaaatgagtgactcttcatcctcgaagtctatgcttatatattgcttttcagaggaatcttttctgaactgggcattctgccttcaaccaactattttctattatagtttcctgtttgtgagttaatagtccttttgaaaatttgactactcatttaccttcttgggttatttgaaattatctcctcttcactagattctatagaagcatagccatgcctgccctctttactgtttctctactgacttgttgcaatgaatattgtcagtaaacatggaaataaatcagttattcag

SEQ ID NO: 11141 - protein, 126 aa, Homo sapiens
MQGLVNYQISVKCSNQFKLEVCLLNAENKVVDNQAGTQGQLKVLGANLWWPYLMHEHPASLYSWEDGDCSHQSLGPLPACDLCDQLHLRSRQGGSVCGCDPCEQLLLLVSQLRAPGVDSAAAGRPV

SEQ ID NO: 11142 - DNA, 4905 bp, Homo sapiens
agatcccacaagcaaagtgaactgggggatgggctgaaggggctccaggcaactgagccctactcgcaggtcctcggccttggcccaaacaggaatgaggggcacagagtgcccgggtaaccgctcctgggagcagtggggaactgtcggatacttgaactctcaagagctgggctctgagcgtcctcgtccagctgccaacttggccaaaggctaagccagcagattgttctgttgccgggcaacgcgacttctaaacctgagggagtgggcatgtgagcacataatggcaccagtgacagagcgaccataatggatgaataagcgcagccaggtacccgcgcaaggcacctgctggcaatggcaggaggcggacgtggggggtcgtgcagtaggtactggagggagagacgtgggcacaaaggtcgcgggaggaacaggtgcccacaatggctgcatatttgcccgtggatcactgaagattcctgctctcctgctgaggtggagactgcagtgagctgagatcgcaccattgcactccagcctgggcaacgagtgcaaaactcagtctccagataaaaaaaagaaaaagaaaaaaaagaggccgggtgtggtggcttatgcctatgatcctagcactttgggaggtcggggtggacggatcacgagatcaggagttggaggccagcctggccaacatagtgaaagcccgtctctagtaaaaatacaaaatttagtcagacatggtgggcaggagagagcatgtgcaggggaacatccatttataaaaccatcagacctcatgagacttattcactaccatgagaacagcatgggggaaactgcctccatgattcagttatctccacctggccccacccttgacacatgggaattgttacaattcaagatgagatttgggtgcggacagagccaaaccatataattcttccccggcccctcccaaatctcatgtcctcatatttcaaaagcaatcgtgccttcccctaagtcccccaaactcttatttcagcattaactcaaaattccgtagtccaaagtctcatctgagacaaggcaagtcccttccacctatgagcctgtaaaatcaaaagcaagttagttattttctagatacacagggatacaggcattgggtaaatacactcgtttcaaatgggagaaattggccaaagcgaaagagctacaggccccatgcaagtccaaaacccagcaggcaaatcttaaagctccaaaatgacctcctttgactccatgtgtcacatctaggtgatgcaagaagtgggttcccagggtcttgggcagccccgcccctgtggctttgcagggtacagccccccttctggctgcattgagtgtctgcagcttttccaggcacacagtgcaagctgtcagtggatctaccattctggggtctggaggatggtggcccttttctcacagctctgcttggcagtaccccagtggggactctgtgtgggagctccaaccccatatttctctttgacactgccctagcagaggttatccatgagggcccccccctcccctcccccccacagcaaacttttgcctggatttccaggcattttcatacatcttctgaaatgtaggcggaggttcatgaacgttaattcttgactttggtgcatctgcaggcttaacaccacctagaacctgaaaggcttggaacttgcaccctctgaagccatggcctgaggtgtaccttggccccttttacctatggcaggagcagctgggatgcagggccccaagttcctaggctgcacacagcagggggttctggacccacaaaaccatttttccttctaagcctcctggcctgtgatgggagggtctgctgtgagggtctctaacatgccctggagacatttgccccattgtcttggtgattaacatttggctcctcattacttatgcaaatttctacaacccagtctcctgagaaaatagatttttcttttctgttgcatcatcaggctacaaattttctgaacttttatgctctgcttcttctcgaatgctttgctgcttagaaatttcttctgtcagataccttaaatcatctctctcaagttcaaagttccacagatctgtagggaactctagaaagaaattcttattttccctctttcccgcctatcttatgcccgtttctaatacaggtgcacaatgcctgcagtgtctttgcatagtaagagtgactttactccatttcccaacaaattcctcatctccctctgagaccacctccgcctggaccttgttgtccatatcactattaacattttggtcaaagccattcaacaagtctctaggaagttccaaactttcccacattttcctatcctcttctgagccttccaaactgttccagcctctccctgttacccatttccaaagttgcttccacattttcgggtatctttacagcagcaccccactctactggtatcaacttattgtattagtctgttctcacaccgcaaataaagacatacctgagactgggtaatttataaaggaaagaggttgaattgactcacagttctgcatggctggggaggcctcacaatcatggtggaaggcaaggaggtgcaaaagcatgtctcacatagtggcaggcaggagagagcatgtgcaggggagctcccatttataaaaccatcagatctcatgagacttagtcactaccgcgagaacagtatggggggaaccatccccatgattcagttatctgcacccggccccacccttgacacgtgggaattattacaatgcaagggctggtgaattaccagatctccgtcaagtgcagtaaccagttcaagttggaagtgtgtcttttgaatgcagaaaacaaagtcgtggacaaccaggctgggacccagggccagctgaaggtgctgggtgccaacctctggtggccgtacctgatgcacgaacaccccgcctccctgtactcgtgggaggatggtgattgctcacaccaaagccttggacccctcccagcctgtgacctttgtgaccaactccacctacgcagcagacaagggggctctgtatgtggatgtgatccgtgtgaacagctactactcttggtatcgcaactacgggcacctggagttgattcagctgcagctggccgcccagtttgagaattggtgtaagacatcacaatcccattattcagagcgcgtatggagtggaaacgcttgtaaggcttcaccaggatccacctctgatgttcagtgaagaggaccggaaaagtctgctagagcagtaccatctgggtctggatcaaaaacgcagaaaatacgtggttggagagctcatctggaattttgccgatttcatgactaaccagtccaaggatgaaggaaaaactggacctcattatggatttacttttgggatacactcattattccagaggagggtaaaaggctgagaagcttaagacttgctataattctgtgagagagctataaaagtctgctcagaaacattataatgtaaaatggacagagaaggacaatgagatatttaatttgccacggcaaagccattgctgtgaagaatggataatatatgtcaatggtaatatatgaagaaataacacagatggagctggcttgaaatcctcttgtttatggcagtacatatcggttatgattcaaaaaatatagcccatttccaaaaacctgcaacaaagagatactttctcaggtgtcagtttcttggtcgggaatgaaaatagtgccaacctgtgataccttcactctaattttactttctgaggaagttttctgtaatagttatttggtgataattattaatactggtgagaaaatcaatgtaaaagaggagaaataacccacacaaccacatacaactaggaaatgatagatggatctgaaaaaaaggatatgcactcttaacaagttcaacacccaagtactattgcaagtaccagctgtatttcatggaaaaaaaaaaaagaataactcaaaaggcagaacgaagagcctagaggtcagagatgagaggcatgaataattattcacaggcgttgaatataatcaaatgacttgcaacatttaccactgggattttaaaatgtggtggaccaatcattcttttagtctgtgcattttcccatttttttcaacaggaatgtctagagacattattcctgttttgccactgtatttttggtgaatgtgtagtaagtaactggcctctttagtatcacaaagctggatgaagaaaatgtggtacatatacaccatgaaatactatgccgccacaaaaaggaaatgagatcatgtcctctgcagggacatggatgaagctggaagccattatccttagcaaagtaacgcaggaacagaaaaccaaacaccacatgttgtctcttagaagtgggagctgaacgatgggctttgcagagattaaagcttcagaaaaaaatatgggaaaatatgttaaaatgttgacctgaaaatgaagtggatgactataaaactcttgagagaattagactttttgtagcagtttattacatgataataccttaaaggagatcacattcagtgacctgcgttgacaggtaatatttaaaattaagtattaatgctgattaattcaggcagatgggtggtagcctaaagtatagacatttttccaatattaattttgatattaaataaatgacatcggctcttgttggatattgtaaaatttcctttacttcaactgtaaaataatttcaacagtgaaaggtataaagtaagatgaaaatttccatcatgatcttacctagagataacttctctttttttgagtcggagtatcgctctc

SEQ ID NO: 11143 - protein, 126 aa, Homo sapiens; identical to SEQ ID NO: 11141

SEQ ID NO: 11144 - DNA, 1262 bp, Homo sapiens; identical to SEQ ID NO: 11008

SEQ ID NO: 11145 - protein, 93 aa, Homo sapiens; identical to SEQ ID NO: 11009

SEQ ID NO: 11146 - DNA, 1328 bp, Homo sapiens; identical to SEQ ID NO: 11010

SEQ ID NO: 11147 - protein, 48 aa, Homo sapiens [sequence omitted]

SEQ ID NO: 11148 - DNA, 780 bp, Homo sapiens
ctttagataattccattgatacattacatatgaaagttctcgttaaataggatatagcatattttacttaaaaatccaaattataaaataaagagggattttaagttgagtctaaaatttttgtttcaattttgtttttatttaaagacttgctataattctgtgagagagctataaaagtctgctcagaaacattataatgtaaaatggacagagaaggacaatgagatatttaatttgccacggcaaagccattgctgtgaagaatggataatatatgtcaatggtaatatatgaagaaataacacagatggagctggcttgaaatcctcttgtttatggcagtacatatcggttatgattcaaaaaatatagcccatttccaaaaacctgcaacaaagagatactttctcagatgcctacagtattcagcacagtaacatgctgtataggtttgtagcctaggatcaataggctgtaccacataacctagggcggagtctcactctgttcaccaagctggagtgcagtggtgcagtctcagctcactgcaatttctgcctcaccctcccaagtaattgggattacagttgttgagatcatgacctcttctggaatggtgttctcagaagtccttggacaatcagggtgtactaggagaaaacatgctgtgagatgggatgaaagtcttcaggatggacactatactttctgttattggaggattcggtagtttgaataagcgtttgaatgaataaaatatttgagttgaggactaaa

SEQ ID NO: 11149 - protein, 33 aa, Homo sapiens; identical to SEQ ID NO: 11017

SEQ ID NO: 11150 - DNA, 790 bp, Homo sapiens; identical to SEQ ID NO: 11020

SEQ ID NO: 11151 - protein, 88 aa, Homo sapiens [sequence omitted]

SEQ ID NO: 11152 - DNA, 241 bp, Homo sapiens; identical to SEQ ID NO: 11086

SEQ ID NO: 11153 - protein, 52 aa, Homo sapiens; identical to SEQ ID NO: 11087

SEQ ID NO: 11154 - DNA, 2235 bp, Homo sapiens
atagaacataatgaggagagtacagaattgcttctgggatatttctgacaaagatgtatatgcttcattcatacatgaggaaacatcacacatactcaagatgggagagccattctaaaaaataactaggcagaaatcttcaaaaatattaaagtcacggaaaccaagaaaaaatatgaacctgtttcagattaaaggaaactaaacagacctaacattttaatacaatgtttgattttgaacttgaactttttgttatataagacactattgagacaagtgctaatgcttgaatagggctgaaggattagattataataatacattaatgcaaatttcctgattttaaacattgtagtttgattgcacaaggagaatgtctttatgtgtggaaaataaatagtcaacattctgtcttcaagcttctgaaaaaactctgcttttagggcatagatagaagtggatgataattcacctgttcctctgctactaattgagctgctctctgtttccatggctggctcatgggatgagagaatatatctagttttttatgtttcaatttgtctctctatggcatttttgtgaaaataaggaagtgtggagacttatatatgtttctaaattataatagttcattaatgtaaagtacagacacagtcttcacttttccttcttagaccgtttaaatatggccacgaaacaagtagtctctggttggctgggcactgtggctcatgtccttaacaccaacactttgggaggccgaggctggtctcaaaccccttacctcaaataatccgcccgcctcagcctcccaaagggctgggattatcggcatgagccactgcgccctgccttctttgttaattttatatgtttcggttatgtaaatatataactgaaagggtaaatatatataaatacatatttactgcacatttatattgatatatatttctctgcttgtatctatctatatacacactttataaataaatgagtcaagatttttaaaacaaaataccaaatttttcagtatcatttgaaatttttcaaaattacttttttaaaatttctgcatattcattcagtgaagttgaatgatccagtgggcactctgtattccttcataaactgtgtggtgaatgtgcgtgtgtgtatgtatgtatatgcacgtgtttatgtgttttctggggttaatttccttaaaataaaaaggcaactgtcaagactaaagctataataatttttatgaatcttagaaaatgttgaatttttagtgattccagaaattgatctctatcgatgaaactgctttctcaaatacgtcagcaatgggattcaggctttgcttacaatgtgaaggaagttcttagtctcatttgcacaaagaaggaaggagggctaaagataaaaagaactcatagtcttttccatagttttgggtcatgttcactgtaaaaaaaaatcacaagatgccatttttacacagcctttttaatctacacatacggcaagctaataattccaaaaaaataatttctttcctttgtagccatttaaaactaacagctagaaatatttcttcttccaattattaaaaataagctgtttctgagtcggtgctgactacatttactgattgaagcagccaactccaaatataccatcttttagtattgacacttaaaataaaacttctccccagaaaaagagttctataaatgatggctgtagaaataggcactgtccaggcagttgttttgtggaagtagtgttgttattttctggtgttttccaagtcatctcagatggtgcgtgaaaatgagatgccaaagaaggcttaaaaaagataccctgcaccagcttcagaatgtaagcaaatctttcattccagcgcttaaaagttttgagaaagctaatctaaagttaaatgtttactagcatctctccgattatattttagaaactactgcacaaaaataaaacaaatttcttattttctctgggttgaaaagtgcacataaaatggaaaatgctttttataccactatttccagcagggattttattttcatttgtcatttgccagcctggggtatgttgggagaaggaacaattgatttttgaaaaggtgcatttgtgtgaaaaccaaaaattgtgttcaacaaatactactactaacccatatgtggatatatgtgttttatacatgagtaaaaaaaaaaaaaa

SEQ ID NO: 11155 - protein, 51 aa, Homo sapiens; identical to SEQ ID NO: 11031

SEQ ID NO: 11156 - DNA, 701 bp, Homo sapiens; identical to SEQ ID NO: 11034

SEQ ID NO: 11157 - protein, 62 aa, Homo sapiens; identical to SEQ ID NO: 11035

SEQ ID NO: 11158 - DNA, 1234 bp, Homo sapiens
agcgggcggggccgttggcggagcagaggggaggcgcagccgggcggagggcccacgagggctcagccttcccggtcagcggtggtgacggtatcccagagtgccagagaaccgttgcttttccgagttgctcttcttccaggctccgttggtggtcggcatggcccgtggaaatcaacgagaacttgcccgccagaaaaacatgaagaaaacccaggaaattagcaagggaaagaggaaagaggatagcttgactgcctctcagagaaagcagagggactctgagatcatgcaagaaaagcagaaggcagctaatgagaagaagtctatgcagacaagagaaaagtgatgactggctatttggaaaacctgggtgctactgccaactgggtgtatcataagctctaagatcaagattttgtagagtggacagtcattacatatgttataacttatcctttaaaaactattttaaactttatcctttcagctttacttagtgcgatgttttagaagcagtcttcaaagaataaaacactaaccatgcatgtgacatattggtgaacattatttttattattgaacattcatatataatttattaggtaatatgatcagataataggatctcttatataataaagaatctttgtcatcagctttgttaacatagtttttttttcctcacagtttctaaggataaggataaaatagatctttgaagtaaacttaaatatataatagaagttagggtccatttgtataattttgctttgaaatcaagttaaagggccaggtgcggtggcttatgcccacaatcccagcactttgggaggccgaggcgggcggatcacttgaggtcaggagtttgagaccagcctgaccaacatgatgaaacctcatctttactaaaaatacaaaaaaaaaaaaaaaaaaaaaatagccaggtgtgtggtggcacatgcctgtaatctcagctactcgggaggctgaggcaggaaaatcgcttgaacccaaggcagaggttgcagtcagcagatattgcaccactgcactccagcctgggcaacaaagcaagactctgcctcaaaaaaaaaaaaaaatcaacttacaaagcttgcttgaacaatttacaacagatacttcaaaccactggaatagaaactaagtggatgtaaactgaggtctcagttctacttatagctttaacattttttggaatgagtaccatatt

SEQ ID NO: 11159 - protein, 62 aa, Homo sapiens; identical to SEQ ID NO: 11035

SEQ ID NO: 11160 - DNA, 535 bp, Homo sapiens
gcggagcagaggggaggcgcagccgggcggagggcccacgagggctcagccttcccggtcagcggtggtgacggtatcccagagtgccagagaaccgttgcttttccgagttgctcttcttccaggctccgttggtggtcggcatggcccgtggaaatcaacgagaacttgcccgccagaaaaacatgaagaaaacccaggaaattagcaagggaaagaggaaagaggatagcttgactgcctctcagagaaagcagagggactctgagatcatgcaagaaaagcagaaggcagctaatgagaagaagtctatgcagacaagagaaaagtgatgactggctatttggaaaacctgggtgctactgccaactgggtgtatcataagctctaagatcaagattttgtagagtggacagtcattacatatgttataacttatcctttaaaaactattttaaactttatcctttcagctttacttagtgcgatgttttagaagcagtcttcaaagaataaaacactaaccatgcatgtg

SEQ ID NO: 11161 - protein, 62 aa, Homo sapiens; identical to SEQ ID NO: 11035

SEQ ID NO: 11162 - DNA, 745 bp, Homo sapiens
gcggagcagaggggaggcgcagccgggcggagggcccacgagggctcagccttcccggtcagcggtggtgacggtatcccagagtgccagagaaccgttgcttttccgagttgctcttcttccaggctccgttggtggtcggcatggcccgtggaaatcaacgagaacttgcccgccagaaaaacatgaagaaaacccaggaaattagcaagggaaagaggaaagaggatagcttgactgcctctcagagaaagcagagttctggaggccagaaatctgagagcaagatgtcagctgggccacacctccctctgaaggctccaagggagaatccttgctttcctcttccagctgctggtggctccaggtattacttggcttatggcagcataactcctatctctgcctttgtctttgtggtcttcttttctgtcttcttcccttctttttatgaggacttttgctgttggatttaggttccattctaacctaggatgatctcatttggaaatccttaatttcatctacaaaaactgttttcccaaataggtcacattcacgcatatcagatggacagatgtatcattttggggtccaccattcaacccactacaaggagttttttaaacaaaaataggaaacttagatgtaacttagcactttttttttttttttttgagatggagtctcactctgtcaccagactggagtgcagtggtgccatctcagctccatgcaacctctg

SEQ ID NO: 11163 - protein, 110 aa, Homo sapiens; identical to SEQ ID NO: 1014

SEQ ID NO: 11164 - DNA, 721 bp, Homo sapiens
ggagtccggctggagaatccccctgggtcgcgcagtgcggggatccccgcttcagtcggcagagagagagctcgcgggtggttccggtccggcttttcaggccggacgggtgcctgcccctcaggtgcgagtttgtgcggtaaagaacacaccccggagatgtggacacggccgccccaggagggtccttgtttggaggtggaaatcaacgagaacttgcccgccagaaaaacatgaagaaaacccaggaaattagcaagggaaagaggaaagaggatagcttgactgcctctcagagaaagcagagttctggaggccagaaatctgagagcaagatgtcagctgggccacacctccctctgaaggctccaagggagaatccttgctttcctcttccagctgctggtggctccaggtattacttggcttatggcagcataactcctatctctgcctttgtctttgtggtcttcttttctgtcttcttcccttctttttatgaggacttttgctgttggatttaggttccattctaacctaggatgatctcatttggaaatccttaatttcatctacaaaaactgttttcccaaataggtcacattcacgcatatcagatggacagatgtatcattttggggtccaccattcaacccactacaaggagttttttaaacaaaaataggaaacttagatgtaacttagcacttttttttttttt

SEQ ID NO: 11165 - protein, 96 aa, Homo sapiens; identical to SEQ ID NO: 11043

SEQ ID NO: 11166 - DNA, 559 bp, Homo sapiens; identical to SEQ ID NO: 11044

SEQ ID NO: 11167 - protein, 48 aa, Homo sapiens; identical to SEQ ID NO: 11045

SEQ ID NO: 11168 - DNA, 665 bp, Homo sapiens; identical to SEQ ID NO: 11046

SEQ ID NO: 11169 - protein, 48 aa, Homo sapiens; identical to SEQ ID NO: 11045

SEQ ID NO: 11170 - DNA, 1239 bp, Homo sapiens; identical to SEQ ID NO: 11048

SEQ ID NO: 11171 - protein, 48 aa, Homo sapiens; identical to SEQ ID NO: 11045

SEQ ID NO: 11172 - DNA, 635 bp, Homo sapiens; identical to SEQ ID NO: 11050

SEQ ID NO: 11173 - protein, 48 aa, Homo sapiens; identical to SEQ ID NO: 11045

SEQ ID NO: 11174 - DNA, 1210 bp, Homo sapiens; identical to SEQ ID NO: 11052

SEQ ID NO: 11175 - protein, 48 aa, Homo sapiens; identical to SEQ ID NO: 11045

SEQ ID NO: 11176 - DNA, 800 bp, Homo sapiens; identical to SEQ ID NO: 11054

SEQ ID NO: 11177 - protein, 41 aa, Homo sapiens; identical to SEQ ID NO: 11055

SEQ ID NO: 11178 - DNA, 1532 bp, Homo sapiens
ccacaaatgtgggagggcgataaccactcgtagaaagcgtgagaagttactacaagcggtcctcccggccaccgtactgttccgctcccagaagccccgggcggcggaagtcgtcactcttaagaagggacggggccccacgctgcgcacccgcgggtttgctatggcgatgagcagcggcggcagtggtggcggcgtcccggagcaggaggattccgtgctgttccggcgcggcacaggccagagcgatgattctgacatttgggatgatacagcactgataaaagcatatgataaagctgtggcttcatttaagcatgctctaaagaatggtgacatttgtgaaacttcgggtaaaccaaaaaccacacctaaaagaaaacctgctaagaagaataaaagccaaaagaagaatactgcagcttccttacaacagtggaaagttggggacaaatgttctgccatttggtcagaagacggttgcatttacccagctaccattgcttcaattgattttaagagagaaacctgtgttgtggtttacactggatatggaaatagagaggagcaaaatctgtccgatctactttccccaatctgtgaagtagctaataatatagaacaaaatgctcaagagaatgaaaatgaaagccaagtttcaacagatgaaagtgagaactccaggtctcctggaaataaatcagataacatcaagcccaaatctgctccatggaactcttttctccctccaccaccccccatgccagggccaagactgggaccaggaaagataattcccccaccacctcccatatgtccagattctcttgatgatgctgatgctttgggaagtatgttaatttcatggtacatgagtggctatcatactggctattatatgggtttcagacaaaatcaaaaagaaggaaggtgctcacattccttaaattaaggagaaatgctggcatagagcagcactaaatgacaccactaaagaaacgatcagacagatctggaatgtgaagcgttatagaagataactggcctcatttcttcaaaatatcaagtgttgggaaagaaaaaaggaagtggaatgggtaactcttcttgattaaaagttatgtaataaccaaatgcaatgtgaaatattttactggactctattttgaaaaaccatctgtaaaagactggggtgggggtgggaggccagcacggtggtgaggcagttgagaaaatttgaatgtggattagattttgaatgatattggataattattggtaattttatgagctgtgagaagggtgttgtagtttataaaagactgtcttaatttgcatacttaagcatttaggaatgaagtgttagagtgtcttaaaatgtttcaaatggtttaacaaaatgtatgtgaggcgtatgtggcaaaatgttacagaatctaactggtggacatggctgttcattgtactgtttttttctatcttctatatgtttaaaagtatataataaaaatatttaatttttttttaaatta

SEQ ID NO: 11179 - protein, 262 aa, Homo sapiens; identical to SEQ ID NO: 1018

SEQ ID NO: 11180 - DNA, 1628 bp, Homo sapiens
ccacaaatgtgggagggcgataaccactcgtagaaagcgtgagaagttactacaagcggtcctcccggccaccgtactgttccgctcccagaagccccgggcggcggaagtcgtcactcttaagaagggacggggccccacgctgcgcacccgcgggtttgctatggcgatgagcagcggcggcagtggtggcggcgtcccggagcaggaggattccgtgctgttccggcgcggcacaggccagagcgatgattctgacatttgggatgatacagcactgataaaagcatatgataaagctgtggcttcatttaagcatgctctaaagaatggtgacatttgtgaaacttcgggtaaaccaaaaaccacacctaaaagaaaacctgctaagaagaataaaagccaaaagaagaatactgcagcttccttacaacagtggaaagttggggacaaatgttctgccatttggtcagaagacggttgcatttacccagctaccattgcttcaattgattttaagagagaaacctgtgttgtggtttacactggatatggaaatagagaggagcaaaatctgtccgatctactttccccaatctgtgaagtagctaataatatagaacaaaatgctcaagagaatgaaaatgaaagccaagtttcaacagatgaaagtgagaactccaggtctcctggaaataaatcagataacatcaagcccaaatctgctccatggaactcttttctccctccaccaccccccatgccagggccaagactgggaccaggaaagccaggtctaaaattcaatggcccaccaccgccaccgccaccaccaccaccccacttactatcatgctggctgcctccatttccttctggaccaccaataattcccccaccacctcccatatgtccagattctcttgatgatgctgatgctttgggaagtatgttaatttcatggtacatgagtggctatcatactggctattatatgggtttcagacaaaatcaaaaagaaggaaggtgctcacattccttaaattaaggagaaatgctggcatagagcagcactaaatgacaccactaaagaaacgatcagacagatctggaatgtgaagcgttatagaagataactggcctcatttcttcaaaatatcaagtgttgggaaagaaaaaaggaagtggaatgggtaactcttcttgattaaaagttatgtaataaccaaatgcaatgtgaaatattttactggactctattttgaaaaaccatctgtaaaagactggggtgggggtgggaggccagcacggtggtgaggcagttgagaaaatttgaatgtggattagattttgaatgatattggataattattggtaattttatgagctgtgagaagggtgttgtagtttataaaagactgtcttaatttgcatacttaagcatttaggaatgaagtgttagagtgtcttaaaatgtttcaaatggtttaacaaaatgtatgtgaggcgtatgtggcaaaatgttacagaatctaactggtggacatggctgttcattgtactgtttttttctatcttctatatgtttaaaagtatataataaaaatatttaatttttttttaaatta

SEQ ID NO: 11181 - protein, 294 aa, Homo sapiens; identical to SEQ ID NO: 1016

SEQ ID NO: 11182 - DNA, 433 bp, Homo sapiens; identical to SEQ ID NO: 11064

SEQ ID NO: 11183 - protein, 128 aa, Homo sapiens; identical to SEQ ID NO: 11065

SEQ ID NO: 11184 - DNA, 6411 bp, Homo sapiens
tgcatgaagacaaaaggtcctgtgctcacctgggacccttctggacgttgccctgtgtacctcttcgactgcctgttcatctacgacgaaccccgggtattgaccccagacaacaatgccacttcatattggggacttcgtctgggattccaaggtgcattcattgcaaagttccttaaatattttctcactgcttcctactaaaggacggacagagcatttgttcttcagccacatactttccttccactggccagcattctcctctattagactagaactgtggataaacctcagaaaatggccacccagcagaaagcctctgacgagaggatctcccagtttgatcacaatttgctgccagagctgtctgctcttctgggcctagatgcagttcagttggcaaaggaactagaagaagaggagcagaaggagcgagcaaaaatgcagaaaggctacaactctcaaatgcgcagtgaagcaaaaaggttaaagacttttgtgacttatgagccgtacagctcatggataccacaggagatggcggccgctgggttttacttcactggggtaaaatctgggattcagtgcttctgctgtagcctaatcctctttggtgccggcctcacgagactccccatagaagaccacaagaggtttcatccagattgtgggttccttttgaacaaggatgttggtaacattgccaagtacgacataagggtgaagaatctgaagagcaggctgagaggaggtaaaatgaggtaccaagaagaggaggctagacttgcgtccttcaggaactggccattttatgtccaagggatatccccttgtgtgctctcagaggctggctttgtctttacaggtaaacaggacacggtacagtgtttttcctgtggtggatgtttaggaaattgggaagaaggagatgatccttggaaggaacatgccaaatggttccccaaatgtgaatttcttcggagtaagaaatcctcagaggaaattacccagtatattcaaagctacaagggatttgttgacataacgggagaacattttgtgaattcctgggtccagagagaattacctatggcatcagcttattgcaatgacagcatctttgcttacgaagaactacggctggactcttttaaggactggccccgggaatcagctgtgggagttgcagcactggccaaagcaggtcttttctacacaggtataaaggacatcgtccagtgcttttcctgtggagggtgtttagagaaatggcaggaaggtgatgacccattagacgatcacaccagatgttttcccaattgtccatttctccaaaatatgaagtcctctgcggaagtgactccagaccttcagagccgtggtgaactttgtgaattactggaaaccacaagtgaaagcaatcttgaagattcaatagcagttggtcctatagtgccagaaatggcacagggtgaagcccagtggtttcaagaggcaaagaatctgaatgagcagctgagagcagcttataccagcgccagtttccgccacatgtctttgcttgatatctcttccgatctggccacggaccacttgctgggctgtgatctgtctattgcttcaaaacacatcagcaaacctgtgcaagaacctctggtgctgcctgaggtctttggcaacttgaactctgtcatgtgtgtggagggtgaagctggaagtggaaagacggtcctcctgaagaaaatagcttttctgtgggcatctggatgctgtcccctgttaaacaggttccagctggttttctacctctcccttagttccaccagaccagacgaggggctggccagtatcatctgtgaccagctcctagagaaagaaggatctgttactgaaatgtgcgtgaggaacattatccagcagttaaagaatcaggtcttattccttttagatgactacaaagaaatatgttcaatccctcaagtcataggaaaactgattcaaaaaaaccacttatcccggacctgcctattgattgctgtccgtacaaacagggccagggacatccgccgatacctagagaccattctagagatcaaagcatttcccttttataatactgtctgtatattacggaagctcttttcacataatatgactcgtctgcgaaagtttatggtttactttggaaagaaccaaagtttgcagaagatacagaaaactcctctctttgtggcggcgatctgtgctcattggtttcagtatccttttgacccatcctttgatgatgtggctgttttcaagtcctatatggaacgcctttccttaaggaacaaagcgacagctgaaattctcaaagcaactgtgtcctcctgtggtgagctggccttgaaagggtttttttcatgttgctttgagtttaatgatgatgatctcgcagaagcaggggttgatgaagatgaagatctaaccatgtgcttgatgagcaaatttacagcccagagactaagaccattctaccggtttttaagtcctgccttccaagaatttcttgcggggatgaggctgattgaactcctggattcagataggcaggaacatcaagatttgggactgtatcatttgaaacaaatcaactcacccatgatgactgtaagcgcctacaacaattttttgaactatgtctccagcctcccttcaacaaaagcagggcccaaaattgtgtctcatttgctccatttagtggataacaaagagtcattggagaatatatctgaaaatgatgactacttaaagcaccagccagaaatttcactgcagatgcagttacttaggggattgtggcaaatttgtccacaagcttacttttcaatggtttcagaacatttactggttcttgccctgaaaactgcttatcaaagcaacactgttgctgcgtgttctccatttgttttgcaattccttcaagggagaacactgactttgggtgcgcttaacttacagtactttttcgaccacccagaaagcttgtcattgttgaggagcatccacttcccaatacgaggaaataagacatcacccagagcacatttttcagttctggaaacatgttttgacaaatcacaggtgccaactatagatcaggactatgcttctgcctttgaacctatgaatgaatgggagcgaaatttagctgaaaaagaggataatgtaaagagctatatggatatgcagcgcagggcatcaccagaccttagtactggctattggaaactttctccaaagcagtacaagattccctgtctagaagtcgatgtgaatgatattgatgttgtaggccaggatatgcttgagattctaatgacagttttctcagcttcacagcgcatcgaactccatttaaaccacagcagaggctttatagaaagcatccgcccagctcttgagctgtctaaggcctctgtcaccaagtgctccataagcaagttggaactcagcgcagccgaacaggaactgcttctcaccctgccttccctggaatctcttgaagtctcagggacaatccagtcacaagaccaaatctttcctaatctggataagttcctgtgcctgaaagaactgtctgtggatctggagggcaatataaatgttttttcagtcattcctgaagaatttccaaacttccaccatatggagaaattattgatccaaatttcagctgagtatgatccttccaaactagtaaaattaattcaaaattctccaaaccttcatgttttccatctgaagtgtaacttcttttcggattttgggtctctcatgactatgcttgtttcctgtaagaaactcacagaaattaagttttcggattcattttttcaagccgtcccatttgttgccagtttgccaaattttatttctctgaagatattaaatcttgaaggccagcaatttcctgatgaggaaacatcagaaaaatttgcctacattttaggttctcttagtaacctggaagaattgatccttcctactggggatggaatttatcgagtggccaaactgatcatccagcagtgtcagcagcttcattgtctccgagtcctctcatttttcaagactttgaatgatgacagcgtggtggaaattgccaaagtagcaatcagtggaggtttccagaaacttgagaacctaaagctttcaatcaatcacaagattacagaggaaggatacagaaatttctttcaagcactggacaacatgccaaacttgcaggagttggacatctccaggcatttcacagagtgtatcaaagctcaggccacaacagtcaagtctttgagtcaatgtgtgttacgactaccaaggctcattagactgaacatgttaagttggctcttggatgcagatgatattgcattgcttaatgtcatgaaagaaagacatcctcaatctaagtacttaactattctccagaaatggatactgccgttctctccaatcattcagaaataaaagattcagctaaaaactgctgaatcaataatttgtcttggggcatattgaggatgtaaaaaaagttgttgattaatgctaaaaaccaaattatccaaaattattttattaaatattgcatacaaaagaaaatgtgtaaggcttgctaaaaaacaaaacaaaacaaaacacagtcctgcatactcaccaccaagctcaagaaataaatcatcaccaatacctttgaggtccctgagtaatccaccccagctaaaggcaaacccttcaatcaagtttatacagcaaaccctccattgtccatggtcaacagggaaggggttggggacaggtctgccaatctatctaaaagccacaatatggaagaagtattcaatttatataataaatggctaacttaacggttgaatcactttcatacatggatgaaacgggtttaacacaggatccacatgaatcttctgtgggccaagagatgttccttaatccttgtagaacctgttttctatattgaactagctttggtacagtagagttaacttactttccatttatccactgccaatataaagaggaaacaggggttagggaaaaatgacttcattccagaggcttctcagagttcaacatatgctataatttagaattttcttatgaatccactctacttgggtagaaaatattttatctctagtgattgcatattatttccatatcatagtatttcatagtattatatttgatatgagtgtctatatcaatgtcagtgtccagaatttcgttcctaccagttaagtagttttctgaacggccagaagaccattcgaaattcatgatactactataagttggtaaacaaccatacttttatcctcatttttattctcactaagaaaaaagtcaactcccctccccttgcccaagtatgaaatatagggacagtatgtatggtgtggtctcatttgtttagaaaaccacttatgactgggtgcggtggctcacacctgtaatcccagcactttgggaggctgaggcgggcgaatcatttgaggtgaggaattcgagaccagcctggccagcatggtgaaaccccatctctactaaaaatacaaaaattagccaggtgtggtggcacatgcctgtagtcccagccactagggcggctgagacgcaagacttgcttgaacccgggaggcagaggttgcagtgagccaagatggcgccactgcattccagcctgggcaacagagcaagaccctgtctgtctcaaaacaaaaaacaaaaccacttatattgctagctacattaagaatttctgaatatgttactgagcttgcttgtggtaaccatttataatatcagaaagtatatgtacaccaaaacatgttgaacatccatgttgtacaactgaaatataaataattttgtcaattatacctaaataaaactggaaaaaaatttctggaagtttatatctaaaaatgttaatagtgcgtacctctaggaagtgggcctggaagccattcttacttttcagtctctcccattctgtactgttttttgttttactttcgtgcctgcattatttttctatttaaaacaaaaataaatctagtttagcactaaaatattaactggagctacctctggagggcaagagtactagaaggtgggatggattgtcttcttgcttgtctgattttatatgtaatacctttgtaattagaaaggttgttaagcattatatcagaatccagtcaggagacagaaaccacacagaaatttgaatggggaaagtttaatatacagatgctcggcctgacgcagtggctcacgcctgtaattccagcactttgggaggccgaggtgggcagatcacttgaggtcaggagttcgagacca

SEQ ID NO: 11185 - protein, 1403 aa, Homo sapiens
MATQQKASDERISQFDHNLLPELSALLGLDAVQLAKELEEEEQKERAKMQKGYNSQMRSEAKRLKTFVTYEPYSSWIPQEMAAAGFYFTGVKSGIQCFCCSLILFGAGLTRLPIEDHKRFHPDCGFLLNKDVGNIAKYDIRVKNLKSRLRGGKMRYQEEEARLASFRNWPFYVQGISPCVLSEAGFVFTGKQDTVQCFSCGGCLGNWEEGDDPWKEHAKWFPKCEFLRSKKSSEEITQYIQSYKGFVDITGEHFVNSWVQRELPMASAYCNDSIFAYEELRLDSFKDWPRESAVGVAALAKAGLFYTGIKDIVQCFSCGGCLEKWQEGDDPLDDHTRCFPNCPFLQNMKSSAEVTPDLQSRGELCELLETTSESNLEDSIAVGPIVPEMAQGEAQWFQEAKNLNEQLRAAYTSASFRHMSLLDISSDLATDHLLGCDLSIASKHISKPVQEPLVLPEVFGNLNSVMCVEGEAGSGKTVLLKKIAFLWASGCCPLLNRFQLVFYLSLSSTRPDEGLASIICDQLLEKEGSVTEMCVRNIIQQLKNQVLFLLDDYKEICSIPQVIGKLIQKNHLSRTCLLIAVRTNRARDIRRYLETILEIKAFPFYNTVCILRKLFSHNMTRLRKFMVYFGKNQSLQKIQKTPLFVAAICAHWFQYPFDPSFDDVAVFKSYMERLSLRNKATAEILKATVSSCGELALKGFFSCCFEFNDDDLAEAGVDEDEDLTMCLMSKFTAQRLRPFYRFLSPAFQEFLAGMRLIELLDSDRQEHQDLGLYHLKQINSPMMTVSAYNNFLNYVSSLPSTKAGPKIVSHLLHLVDNKESLENISENDDYLKHQPEISLQMQLLRGLWQICPQAYFSMVSEHLLVLALKTAYQSNTVAACSPFVLQFLQGRTLTLGALNLQYFFDHPESLSLLRSIHFPIRGNKTSPRAHFSVLETCFDKSQVPTIDQDYASAFEPMNEWERNLAEKEDNVKSYMDMQRRASPDLSTGYWKLSPKQYKIPCLEVDVNDIDVVGQDMLEILMTVFSASQRIELHLNHSRGFIESIRPALELSKASVTKCSISKLELSAAEQELLLTLPSLESLEVSGTIQSQDQIFPNLDKFLCLKELSVDLEGNINVFSVIPEEFPNFHHMEKLLIQISAEYDPSKLVKLIQNSPNLHVFHLKCNFFSDFGSLMTMLVSCKKLTEIKFSDSFFQAVPFVASLPNFISLKILNLEGQQFPDEETSEKFAYILGSLSNLEELILPTGDGIYRVAKLIIQQCQQLHCLRVLSFFKTLNDDSVVEIAKVAISGGFQKLENLKLSINHKITEEGYRNFFQALDNMPNLQELDISRHFTECIKAQATTVKSLSQCVLRLPRLIRLNMLSWLLDADDIALLNVMKERHPQSKYLTILQKWILPFSPIIQK

SEQ ID NO: 11186 - DNA, 728 bp, Homo sapiens; identical to SEQ ID NO: 11074

SEQ ID NO: 11187 - protein, 186 aa, Homo sapiens; identical to SEQ ID NO: 11075

SEQ ID NO: 11188 - DNA, 532 bp, Homo sapiens
aatgtaaacatgtaatgtgaatatatgaatctagccaaaactatgccataactataaagaggggaaggctagtacaggaagggggtcatggagcaaagggatgaaagacatgaagactcatccttcatagcctgaatccgaggagtggataaagactcaatctaaagataaaataaggcaggaaatgaggaaaaagaaaaaaactgttgaagtgcatccaaagttgcagatggttaacattcattccactcacttgggaaaacatctggtgtgatcgtctaatgggtcatcaccttcctgccatttctctaaacaccctccacaggaaaagcactggacgatgtcctttatacctaaaagtaaggaaacttgatcagtgccactggcatgggcatctgtccattaacatgcagataataaccaccagacctgtaatagtgaaagctaaaaatacaaaaattagctgggcatggtggcacatgcctgtaatgccagctactcaggaggctgaggcacaagaatcgcttgaacc

SEQ ID NO: 11189 - protein, 82 aa, Homo sapiens [sequence omitted]

SEQ ID NO: 11190 - DNA, 1356 bp, Homo sapiens
cactcaggaaagcctaaagcttgaagactccatttatttatagtgcatcccaatccagatacgtaacaattaacgagttatttttactataagcaaagttgcctaaaatcatagttgatactaatcatggttaacagagctctaaagtttgacagaaagtgagattcaaatcctttcactctcatatgctaaaccttttgccttactctgggtcatcagagaaatttaggtgagaatgtatgatgaagtctgtgttttagattcaatgcagatatatcattgtgcgcagaactctttctggttatatccagttaagagtaaatcaggctttcagccgggcgcggtggctcacgcctgtaatcctagcactttgggaggccgagacggggtttcaccttgttgatcaggctgatctccaactcctgacctcaggtcatccacccacctccgccaccgtgcccggccgaaatttgtgattttataactaagaatttttagttaagaacattatcagtaaagacaacgtaatcccaccctggagagtttattgggagcccaggaatattcatttttaatacacacacacacacacacacacacacacacacacacactgatcagagtaacaggagtttctctcaggagtcatactccatgagcctggacccagtggttctttacgtggaaacaaatttcacctataggtaacctggtaactgctattttcttctgtgtgctctgtcaacaaagttatcagtggcttgcaagagatgcctttaatactcagagcattctatctccccctatctggtttagaaggaaggccttcattagttaccttttgagaagttactagaactctctattagagacttaccctcctgacctgataaaaagggatacccatgtctctattaacagctttatctctttctacagttttgggtatttgataaggttaaggcaaaattttagttatgcttaaggaggagttcttttttcacaattacagagaaaattttggtttgttgaagattgcagaaacagcaatggtaatgtaagacagttttggcctttaatttttttcttgaaactctacagtatactacaatagtgaaggaaactattaacatgagagatccttctgaataggatgtctttctgagttccactattcagttacaaaactccttaatgcttaaaattcattatgaaaattagatttattttaaatactttcaagtgtatacatttttatttcataatttttattgtcttttaactaaagcatttagttcatttatatttactgtgtaccttttatatttaataaatatatttacttattaaaagatt

SEQ ID NO: 11191 - protein, 55 aa, Homo sapiens
MYDEVCVLDSMQIYHCAQNSFWLYPVKSKSGFQPGAVAHACNPSTLGGRDGVSPC

SEQ ID NO: 11192 - DNA, 1979 bp, Homo sapiens
gagagtccttctagcggcgccggtgagtccgcgtgtggaagtctgtgaggcgcagaggtggggcaggccgtctggctagctaggcggctgggagcgttttcgtggcggggaacggaggttgaattgccctgcctgggctcatagggaaggaggatgtgaaggagcttgtgaaggcagaggaagattattgaataataaaatacagttttgaaaaaaatggatgaagaacctgaaagaactaagcgatgggaaggaggctatgaaagaacatgggagattcttaaagaagatgaatctggatcacttaaagctacaatagaagacattctattcaaggcaaagagaaaaagagtatttgagcaccatggacaagttcgacttggaatgatgcgccacctttatgtggtagtagatggatcaagaacaatggaagaccaagatttaaagcctaatagactgacgtgtactttaaagttgttggaatactttgtagaggaatattttgatcaaaatcctattagtcagattggaataattgtaactaagagtaaaagagctgaaaaattgactgaactttcaggaaacccaagaaaacatataacgtctttgaagaaagctgtggatatgacctgccatggagagccatctctttataattccctaagcatagctatgcagactctaaaacacatgcctggacatacaagtcgagaagtactaatcatctttagcagccttacaacttgcgatccatctaatatttatgatctaatcaagaccctaaaggcagctaaaattagagtatctgttattggattgtctgcagaagttcgcgtttgcactgtacttgctcgtgaaactggtggcacgtaccatgttattttagatgaaagccattacaaagagttgctcacacatcatgttagtcctcctcctgctagctcaagttctgaatgctcacttattcgtatgggatttcctcagcacaccattgcttctttatctgaccaggatgcaaaaccctctttcagcatggcgcatttggatggcaatactgagccagggcttacattaggaggctatttctgcccacagtgtcgggcaaagtactgtgagctacctgttgagtgtaaaatctgtggtcttactttggtgtctgctccccacttggcacggtcttaccatcatttgtttcctttggatgcttttcaagaaattcccctagaagaatataatggagaaagattttgttatggatgtcagggggaattgaaagaccaacatgtttatgtttgtgctgtgtgccaaaatgttttctgtgtggactgtgatgtttttgttcatgattctctacactgttgccctggctgtattcataagattccagctccttcaggtgtttgattccagcatgtagtatacattgtatgtgttaaaaagaaatttgcaactgtgaataaaaggacttctttagaagaagcttcatttaaaacatgaaaggataatctgacttaagaaactttttgctaagaaaaggtaatattttattaaattttaaatttgtgttgtcacagaaatacctgaaattcagtagtacttcattcaattaattttgttttctattattttgagttatactgttttcaaagtcattatgcagtatgtataaacttataagaattaaattgatgtgataattttatgtttttataattaaatatagaatctttatgatttatgttaattcattaatttagtgtaagaagaaagttaagtctgaatgtaaattcagtgtaagatgaaaatttatcaatacttatgaaattaggctgggcgctgtggctcacacctgtaatcccaacactttgggaggctgaggtgggcagatcacctgaggtcaggagttcgagaccagcctggccaacatggtgaaaccccgtcactactaaaaatacaaaaaataattagccgggcatggt

SEQ ID NO: 11193 - protein, 395 aa, Homo sapiens; identical to SEQ ID NO: 1036

SEQ ID NO: 11194 - DNA, 983 bp, Homo sapiens
gagagtccttctagcggcgccggtgagtccgcgtgtggaagtctgtgaggcgcagaggtggggcaggccgtctggctagctaggcggctgggagcgttttcgtggcggggaacggaggttgaattgccctgcctgggctcatagggaaggaggatgtgaaggagcttgtgaaggcagaggaagattattgaataataaaatacagttttgaaaaaaatggatgaagaacctgaaagaactaagcgatgggaaggaggctatgaaagaacatgggagattcttaaagaagatgaatctggatcacttaaagctacaatagaagacattctattcaaggcaaagagaaaaagagtatttgagcaccatggacaagttcgacttggaatgatgcgccacctttatgtggtagtagatggatcaagaacaatggaagaccaagatttaaagcctaatagactgacgtgtactttaaagttgttggaatactttgtagaggaatattttgatcaaaatcctattagtcagattggaataattgtaactaagagtaaaagagctgaaaaattgactgaactttcaggaaacccaagaaaacatataacgtctttgaagaaagctgtggatatgacctgccatggagagccatctctttataattccctaagcatagctatgcagactctaaagttagtattatacattatgtataattgaattagaagttttttaaatgagttaagctgaagtgatgtgttaatatggggcccataaacccagctataacaaaattgttaagtacaagaattatgtagtgttatttatgatgtttagtgtggtgttggttagtaatctttattttacattttagtaagatattgttaaaggttttataaaaatataatttaaaactgtcggcagtatcaatagtacaaaaatatgttgatgaaaaaatattttattaaaatgagatttaatatagtata

SEQ ID NO: 11195 - protein, 165 aa, Homo sapiens
MDEEPERTKRWEGGYERTWEILKEDESGSLKATIEDILFKAKRKRVFEHHGQVRLGMMRHLYVVVDGSRTMEDQDLKPNRLTCTLKLLEYFVEEYFDQNPISQIGIIVTKSKRAEKLTELSGNPRKHITSLKKAVDMTCHGEPSLYNSLSIAMQTLKLVLYIMYN

SEQ ID NO: 11196 - DNA, 835 bp, Homo sapiens
ggagtttccggctgagagtccttctagcggcgccgattattgaataataaaatacagttttgaaaaaaatggatgaagaacctgaaagaactaagcgatgggaaggaggctatgaaagaacatgggagattcttaaagaagatgaatctggatcacttaaagctacaatagaagacattctattcaaggcaaagagaaaaagagtatttgagcaccatggacaagttcgacttggaatgatgcgccacctttatgtggtagtagatggatcaagaacaatggaagaccaagatttaaagcctaatagactgacgtgtactttaaagttgttggaatactttgtagaggaatattttgatcaaaatcctattagtcagattggaataattgtaactaagagtaaaagagctgaaaaattgactgaactttcaggaaacccaagaaaacatataacgtctttgaagaaagctgtggatatgacctgccatggagagccatctctttataattccctaagcatagctatgcagactctaaagttagtattatacattatgtataattgaattagaagttttttaaatgagttaagctgaagtgatgtgttaatatggggcccataaacccagctataacaaaattgttaagtacaagaattatgtagtgttatttatgatgtttagtgtggtgttggttagtaatctttattttacattttagtaagatattgttaaaggttttataaaaatataatttaaaactgtcggcagtatcaatagtacaaaaatatgttgatgaaaaaatattttattaaaatgagatttaatatagtata

SEQ ID NO: 11197 - protein, 165 aa, Homo sapiens; identical to SEQ ID NO: 11195

SEQ ID NO: 11198 - DNA, 1324 bp, Homo sapiens
atggatgaagaacctgaaagaactaagcgatgggaaggaggctatgaaagaacatgggagattcttaaagaagatgaatctggatcacttaaagctacaatagaagacattctattcaaggcaaagagaaaaaggtatgtaaccttcctatgtatcttaaaaaggtaaaatatattcattttaagcctttctatctataaatactcctcagtacttcattttagctgtgtttcagggtaactgacctattgccttctgactatggggaaagaactagccacctacccttgccccagcaggaaatggtctttagagactgtctacaatacctataattgtgtgtattgtattccataagttaattatttactccactaaaaatgcacgttatgacattcttactcagaattagaaaaaaagaaaaacaaaggaggtcaattggaaagttgtattttttttgtggggggggatagtatatggaattacattaaaatgtttgtataattttaacagagtatttgagcaccatggacaagttcgacttggaatggtatgtcattattttttcttttactagtacagaactagtttaggttagagaaacattctgtcttgctagaaaaaacaatagcaaaacaacaaagtttttaaaagaatatgttaaaaatacgtgcatagaatatgtaattattaaatgccatttttactagtcaaaatggcacttgaggctgggcacagtggctcatgcctataatcccagcactttgggaggccaaggcaggaggattgcttgagcccaggagtttgagaccaacctgggcaacagaacgagacccagtttctacaaaacaaaacaagtacttgaaattggccctttcttttttccgatagatgcgccacctttatgtggtagtagatggatcaagaacaatggaagaccaagatttaaagcctaatagactgacgtgtactttaaaggtaaaatttaagtttatactaaatcatttaaatttgtaccaaaatcacttaaacttttactaaaaaagtggggaagaacactggattctaaaggatatttttaaagaatgcaatattttttattttttgccttgtatttttagttaatgctaatgatagctaagtagaagtactgccaggttatttagggaaattttaaaccaacatagctaattatttgtgtttttaatttctatcctcccaccccacatcaggatcttggtttatcagttatcccttttctttcttgaatcttcattctcctttgccttacttaactctgtctcctcagattacaaatatgttc

SEQ ID NO: 11199 - protein, 55 aa, Homo sapiens; identical to SEQ ID NO: 11115

SEQ ID NO: 11200 - DNA, 706 bp, Homo sapiens
aatgagatcacctatgcaaacaaatacatgtaggtatgaagacatcgtctggggtgtgaaagtttagttcacaccagaaccttcctttaaggcttaaaaacctcaaacagtatttcattcttaatacaagaaccaatgtttaaagcataaaatccttaattggagtgttcagcccagttgattatcaaaagcgatttataaaatgcttcaatactgatgatattaaagcaaccaaaactgtgatgctcacagaggtttggcttccggggttatggtccaaagtcatttgccttctgagaagattgcagagatgtcagatacttaatttctcaaacaacttggcatcagccttctatgttttctgtctatcatagtctccaaccatcttcttgatgtgtgacaatttgctgtttaactgcttgcaatgattcttcttacttttgtaatctgcagatcccttcacttgcttcagtctattgtattcatcagcagcagccatgtactcttcactttcttctctatagtcatccaattctttatccaaacgggagagttctttattgatctcatcaagttctgattgtaagctcttgtattcctgtaggccagtgtcaaaattcctcttgtacagttgtctttgttgatctgaagtgataggtggatattccctgatccagtcctcctccagctcatcacaggactcgcc

SEQ ID NO: 11201 - protein, 51 aa, Homo sapiens
MILLTFVICRSLHLLQSIVFISSSHVLFTFFSIVIQFFIQTGEFFIDLIKF

SEQ ID NO: 11202 - DNA, 1364 bp, Homo sapiens
ggatgtgtaatattaaaaatgtagttaaccaaggacagaggctgcacctaatgacttttggaggaaccttcttgctcaagacactatgattctcgttacctggatagtatcacccatggattgtatcatatatgaaccactgaggaacacacattcctgcagatgtttgcagattattaattgctttatatttggagcacccctcccttcaatcagcataaatatttgagggtgggctgtgtttagaagatgtttagtctccaatgattacaacatgatgcaccactctcctatacaaattttgatttaagaaaagattttatttttcaaaggaaaccacaagtgaaagcaatcttgaagattcaatagcagttggtcctatagtgccaggtaagaactttgaagtagcacgtgggattatatgtatttgtaaatatatttgtatacagggcagttgcaaaaaaaagagtatttataattgtccaaagagcttccaaagaggagcagcattgcaacagtgtcgtgtatgagcaaaagtcaagattcttgtggcttctccagagtgcaggcaggaccaaactgatagtaggcaacgtgtctcaggtacaagcaaaccagtccttagaagcaccaatcagtaaacttctttcctgagatttttatttttattcattttattttattttattttattccagcctgggcaacagagcaagaccctgtctgtctcaaaacaaaaaacaaaaccacttatattgctagctacattaagaatttctgaatatgttactgagcttgcttgtggtaaccatttataatatcagaaagtatatgtacaccaaaacatgttgaacatccatgttgtacaactgaaatataaataattttgtcaattatacctaaataaaactggaaaaaaatttctggaagtttatatctaaaaatgttaatagtgcgtacctctaggaagtgggcctggaagccattcttacttttcagtctctcccattctgtactgttttttgttttactttcgtgcctgcattatttttctatttaaaacaaaaataaatctagtttagcactaaaatattaactggagctacctctggagggcaagagtactagaaggtgggatggattgtcttcttgcttgtctgattttatatgtaatacctttgtaattagaaaggttgttaagcattatatcagaatccagtcaggagacagaaaccacacagaaatttgaatggggaaagtttaatatacagatgctcggcctgacgcagtggctcacgcctgtaattccagcactttgggaggccgaggtgggcagatcacttgaggtcaggagttcgagacca

SEQ ID NO: 11203 - protein, 47 aa, Homo sapiens
MILVTWIVSPMDCIIYEPLRNTHSCRCLQIINCFIFGAPLPSISINI

SEQ ID NO: 11204 - DNA, 698 bp, Homo sapiens
cagatgtgaatttcttcggagtaagaaatcctcagaggaaattacccagtatattcaaagctacaagggatttgttgacataacgggagaacattttgtgaattcctgggtccagagagaattacctatggcatcagcttattgcaatgacagcatctttgcttacgaagaactacggctggactcttttaaggactggccccgggaatcagctgtgggagttgcagcactggccaaagcaggtcttttctacacaggtataaaggacatcgtccagtgcttttcctgtggagggtgtttagagaaatggcaggaaggtgatgacccattagacgatcacaccagatgttttcccaaacggagtctggctctgtcacccaggctggagtgcagtggcatgatctcggctcactgcagactctgcctcccaggttcaagcaattcttcctgcctcagcatcccaagtagctgggactacaggcatgcaccactatgcctggctaatttttgtatttttaatagagatggagttttgccacgttggccaggctagtttcaaactcctgacctcaagtgatccgcctgcctcagcctcccaaagtgctggtattacaggcgtgagccactgcggctggtccattttcatcttgaaatgagtttccctggaagtcttctggcctgctggattatgaacaact

SEQ ID NO: 11205 - protein, 141 aa, Homo sapiens
MASAYCNDSIFAYEELRLDSFKDWPRESAVGVAALAKAGLFYTGIKDIVQCFSCGGCLEKWQEGDDPLDDHTRCFPKRSLALSPRLECSGMISAHCRLCLPGSSNSSCLSIPSSWDYRHAPLCLANFCIFNRDGVLPRWPG

SEQ ID NO: 11206 - DNA, 1029 bp, Homo sapiens
cacttcagcctgggcaacagagtgagactctgcctcaaaaaaaaaaaaaaaaaaaaaaaaagtcagataatcaacaacttgaattttaatttccctcagggagaacattttgtgaattcctgggtccagagagaattacctatggcatcagcttattgcaatgacagcatctttgcttacgaagaactacggctggactcttttaaggactggccccgggaatcagctgtgggagttgcagcactggccaaagcaggtcttttctacacaggtataaaggacatcgtccagtgcttttcctgtggagggtgtttagagaaatggcaggaaggtgatgacccattagacgatcacaccagatgttttcccaagtgagtggaatgaatgttaaccatctgcaactttggatgcacttcaacagtttttttctttttcctcatttcctgccttattttatctttagattgagtctttatccactcctcggattcaggctatgaaggatgagtcttcatgtctttcatccctttgctccatgacccccttcctgtactagccttcccctctttatagttatggcatagttttggctagattcatatattcacattacatgtttacattatcatgactatacaaatgctatgtggagctgaagcttgtggtaaatttttatttatttttcccttcctgtatatccttttatttttttaggaagtaataactgtcctgttggtatgttagcttatttttttttcctgaggtaaaattcaggtagtaaccattttatttatttatttattattttttgtgacaggttctctctcttgcccaggttggagtgcagtggtgcaatcatggctcactgcagccttgacctctctggctcaagcaatcttcctcgctcagcctcccaagtagctgggactacaggcacatgtcttcacacccagctaatttttttttttttttttttaagagacagggtctctctatgttgcccaggctgctctcagacttctaggctca

SEQ ID NO: 11207 - protein, 77 aa, Homo sapiens; identical to SEQ ID NO: 10985

SEQ ID NO: 11208 - DNA, 545 bp, Homo sapiens
cagatgtgaatttcttcggagtaagaaatcctcagaggaaattacccagtatattcaaagctacaagggatttgttgacataacgggagaacattttgtgaattcctgggtccagagagaattacctatggcatcagcttattgcaatgacagcatctttgcttacgaagaactacggctggactcttttaaggactggccccgggaatcagctgtgggagttgcagcactggccaaagcaggtcttttctacacaggtataaaggacatcgtccagtgcttttcctgtggagggtgtttagagaaatggcaggaaggtgatgacccattagacgatcacaccagatgttttcccaagttctctctcttgcccaggttggagtgcagtggtgcaatcatggctcactgcagccttgacctctctggctcaagcaatcttcctcgctcagcctcccaagtagctgggactacaggcacatgtcttcacacccagctaatttttttttttttttttttaagagacagggtctctctatgttgcccag

SEQ ID NO: 11209 - protein, 138 aa, Homo sapiens
MASAYCNDSIFAYEELRLDSFKDWPRESAVGVAALAKAGLFYTGIKDIVQCFSCGGCLEKWQEGDDPLDDHTRCFPKFSLLPRLECSGAIMAHCSLDLSGSSNLPRSASQVAGTTGTCLHTQLIFFFFFLRDRVSLCC

SEQ ID NO: 11210 - DNA, 729 bp, Homo sapiens
atgtgaatttcttcggagtaagaaatcctcagaggaaattacccagtatattcaaagctacaagggatttgttgacataacgggctggcttctgacgggctctgcttgccttcctgatagtcttcccctttatgaatgaagccacttgccccagcttccctctgctgcccctatctgcaggcttgctaagatctcctgacctaggcgctgtcacccacagtgggctgcagagctggctcttcctagctggctaactatcctgaatcagtaaaaatttcctagtggagagtgatgggaaatcgaatccaaactggcttaaacaaaaatgagaatttattgattaacatgactcaggagaccagaactctatagagaacatggcctgacagtgggggaagagaggtgtttcctcaaaaagaaactgggtgcagctttcccagaagaatcagttgctcaatatataataccctgatgaatttagttaccattctatgtctcttacttcctcattcgtcaaagtacatctgtgatatttaaatgcaggtctgttttcaaggtcagtttccggaaacagtgaccctgagaaggcttcctcctgagtatgcataaacattcacagcttgcatgcgtgtgtgtgtgtgtgtgtgtgtgtgtgtgtgtgtgtgtgtatgtttgcttgcactgcataaaaacaattgcaacatcaacagaaataaaaattaaaggaat

SEQ ID NO: 11211 - protein, 41 aa, Homo sapiens
MHKHSQLACVCVCVCVCVCVCVYVCLHCIKTIATSTEIKIK

SEQ ID NO: 11212 - DNA, 241 bp, Homo sapiens; identical to SEQ ID NO: 11086

SEQ ID NO: 11213 - protein, 52 aa, Homo sapiens; identical to SEQ ID NO: 11087

SEQ ID NO: 11214 - DNA, 314 bp, Homo sapiens
gcattgactagtatgagaaatacaaggcacagagagtgatgtgcctgcttccctctttatagcaatgtgaaaatggattaatacagagagtctacacatttctttatataagatatacttgttttctgtttatagttagcatttacaaagtttacagtaaaatttttacttacattcatataacatttaagttattctcaaaattttatgcaaccattttagatctaaagtggactttgtttttttccatagaataagtattttgtaggacttctcttcaatattggtgtgtagaaaaaaaaatgtgaacttca

SEQ ID NO: 11215 - protein, 64 aa, Homo sapiens
QCENGLIQRVYTFLYIRYTCFLFIVSIYKVYSKIFTYIHITFKLFSKFYATILDLKWTLFFSIE

SEQ ID NO: 11216 - DNA, 790 bp, Homo sapiens; identical to SEQ ID NO: 11020

SEQ ID NO: 11217 - protein, 88 aa, Homo sapiens [sequence omitted]

SEQ ID NO: 11218 - DNA, 802 bp, Homo sapiens
gatcaagtgaccctcctgcctcaggctcacaaagcgctgggatttacaggtgtgagccactgtgcccggccacaaatcaaaatttttgagtcctgtcattggctcccccaggcccataggacaaagtcctaacccctagtcaggacactcagtgtcctctgctctctcctgggttttcatcctcttctcttctcactcctggccactgatctgtttccactgccctcatttgctctcctgctcttgcttgagctattctttctgcctggaatgcccaagttggcaccataatcaccaactaaaagatccttttctttttatttttttagagatagggtcttgctatgttgcccaggctggtctcaaactcctggactcaattgatctttttgccttggcctcccaaagttctgggattaacaggtgtgatccactgtgctagcctttttttattttttatttttttcctgacaggcaggagaatcgcttgaactggggaggtggaggttgcagtgagccgagattgtgccactgcactccagcctgggcgacagagcaagagtccgtctcaaaaaaaaaaaaaaaaaaaagaaagggtcttcaaagacaataagatctgtgctctcacgtagggtggatgaggggctgccaagttagcaatgaatgtttcccatttcttcttagtttatggactttccataaactcaggatggcagtttggttggttggagaaggatatggtgatggcgggagttacaatacattacttataggggaagataggcttttgaaaggttaaagc

SEQ ID NO: 11219 - protein, 48 aa, Homo sapiens [sequence omitted]

SEQ ID NO: 11220 - DNA, 524 bp, Homo sapiens
gagaattggtgtaagacatcacaatcccattattcagagcgcgtatggagtggaaacgcttgtagggcttcaccagggctggtgaattaccagatctccgtcaagtgcagtaaccagttcaagttggaagtgtgtcttttgaatgcagaaaacaaagtcgtggacaaccaggctgggacccagggccagctgaaggtgctgggtgccaacctctggtggccgtacctgatgcacgaacaccccgcctacctgtactcgtgggaggatggtgattgctcacaccaaagccttggacccctcccagcctgtgacctttgggaccaactccacctacgcagcagacaagggggctctgtatgtggatgtgatccgtgtgaacagctactactcttggtatcgcaactacgggcacctggagttgattcggctgcagctggccgcccagtttgagaattggtgtaagacatcacaatcccattattcagagcgcgtatggagtggaaacgcttgtagggcttcaccag

SEQ ID NO: 11221 - protein, 85 aa, Homo sapiens
MVIAHTKALDPSQPVTFGTNSTYAADKGALYVDVIRVNSYYSWYRNYGHLELIRLQLAAQFENWCKTSQSHYSERVWSGNACRAS

SEQ ID NO: 11222 - DNA, 3280 bp, Homo sapiens
aacaaacggggcaaagtgagttatacagctccattcttagaaaccttggagtacttttcttagtttatactcgtggtggtttccttttgtctcctttattacatgggactctgacatgtgcccatagctagggtgacagtaggatctacccgatagtagggtggcagtaggatctacccaaaaagcatcctgctgatacaggaccaaagcatcctgttgttctcgagcctataaaaagagctaatggtcttgcttctcttaactgtggcctcctacactgtgttttggatgattggtgatgtcttggatattctgtttctttggaactttgaatatacaacactttactagggaattagcaatggaagcagagcaaagatgtacagaggaaacaatgcgtaactctgatggaattgaagtcatgaggcagcagagagcttaaattacagctttaaaaatttttattttttagagggaatttacttgggagtaacagcagtaatagttaacggagccagaatgcttgagtcatataattgcaaagcagagttgggagcaacagatgctaaagagtagttgctgtagttcctctgtgggtcgtaggagcagttgtcatattactatatagctactgcatgaagaagagttcttagtgaggcctgggtgaacagctcttcttagtattctgtgtgaccccatttgaccttttaacaaatccctaagtaaataaatagcccctcaggaaaactaagtttttctctgctgtttttttgcttgagagagctataactgtaatagacttatatttctgaacattttagtgcttgccaatatttggtaatatttatgtttcctatatttgtaatgaacattcttcttccggtacattttttgttaaattattgtttgatggataaaagttcaccttttattgtataaaattgactgagattaatttatacacattgacaatgggtaaatagaatttttcagattattaaaagctgaaggatgcccacgtaagcaaaaaaaaaaaagaaaaaaccaacaaaaataaacccaaacccctcaaacaatttcgaacacgaaacattcttctgatgccggcatccctgcttgcaggtgtgaagggggcaggaatcagcgaggtgtcctgggctgagtccccggagtgggaagaggtggcaggaaggggatctgaggaggagaacaggggtcctggtggtctgtgcttcttcccagacacgggagctgtagaggagacctctgcagcagatgctaggggggccagtaggcccaggcagtcttgggacttgggtctgtcctgctgtgcatccatagtgggtgctttagaaacgggaggcccacccgaagcccctgttgcaagtgaggacaaagtgtgggaaggccgtgagggtctgcagtccgggatggccttgtcctcaacgtgcagtgcactgttgatgcgctggaatgccgtctctttttccaggtgcaggtcttcagccgtgacccggtaccccagctctaagggaggtggcagcatcaaaggctcccctcgcctgcgtggcagcaggggaatcttgcgtctacggggcctagagtcctgggatctgggggagccacccgttggggcgattgtctgccctggtgctgtatctgcccccttttcacaccgtgtgtgacccgaagagacagcctgaggcctgtcctcactcactgtctttgagtaactgagggtcagctggcagcgggatgaggctggccccctcctctgctttagccccggcaagcctcccgtggagctgtaggagctggagatggcatttcgtttggtgttcgagctcgtccaggatgtctgggatgtgtggttatatctgatttctgagctctgggcgtggaggtctgtctgcagaggcccgggcctgggcacaaagggagaggggcctccattgtcccgcaggggccaaaatgcagaccgtgcatccccggtgacctcggggaccgttctctgatcatcaggattttcttggactctggggtccttgtcctgctcaggcatccctgccccgctctccttgagggccctcaacactatcttccctggacacaagtctggggacagccgggtgttgtggaccccaaaggggtgactacctgctcctgggccccacagagtccttgtgctcagtgtagtggctgagctgggggatgccctggaactcggagcacacagcactggcttactgtggtacctgtgcagtgaaattgaagacagaatcaccaggatggaacacaggtcttgcaggatcacttgaaaccttcttagagttgtcttgacaccagtgatgtcgagtgtccgggtgtttgtaggatggcctgccactcagtccaggggcaggagcaacggggagatcccacaagcaaagtgaactgggggatgggctgaaggggctccaggcaactgagccctactcgcaggtcctcggccttggcccaaacaggaatgaggggcacagagtgcccgggtaaccgctcctgggagcagtggggaactgtcggatacttgaactctcaagagctgggctctgagcgtcctcgtccagctgccaacttggccaaaggctaagccagcagattgttctgttgccgggcaacgcgacttctaaacctgagggagtgggcatgtgagcacataatggcaccagtgacagagcgaccataatggatgaataagcgcagccaggtacccgcgcaaggcacctgctggcaatggcaggaggcggacgtggggggtcgtgcagtaggtactggagggagagacgtgggcacaaaggtcgcgggaggaacaggtgcccacaatggctgcatatttgcccgtggatcactgaagattcctgctctcctgctgaggtggagactgcagtgagctgagatcgcaccattgcactccagcctgggcaacgagtgcaaaactcagtctccagataaaaaaaagaaaaagaaaaaaaagaggccgggtgtggtggcttatgcctatgatcctagcactttgggaggtcggggtggacggatcacgagatcaggagttggaggccagcctggccaacatagtgaaagcccgtctctagtaaaaatacaaaatttagtcagacatggtgggcaggagagagcatgtgcaggggaacatccatttataaaaccatcagacctcatgagacttattcactaccatgagaacagcatgggggaaactgcctccatgattcagttatctcca

SEQ ID NO: 11223 - protein, 194 aa, Homo sapiens; identical to SEQ ID NO: 4617

SEQ ID NO: 11224 - DNA, 2767 bp, Homo sapiens
aaattcattttacttcgacaaaggttgaagtatgtagcaggcgagcgtcagggacaagtgcagctatctctttgatcacatcgctttaaacatttttcagctttaagcttgtcttacaagtcagctctatcagtctattaattgtttcactgtacctaatatcttacacgaaggcaccttgaaaaacagcaggagaaagcacatttgtttaagtcctgcgatggctagcacggcagctaatctccttgcaaattataatcatagttgtagttcatccattaggctggaaaagacaagattcccaagtggccttggtgccttttccagttcccgggagacccaccaaccctcggcgtgtgttgcctgcgcacccggagcgttcttgctaatcaggtcaatgattagcgcctggctccagggacctgccaagagtgttagggagcctccaaacggagcacgctcacggagaatctcccgttcagaaacatcgcttagtcctcatttactcactgggaacctcggaggatttcagctgatgtttttctctccttagacagtgaggagctcaacataacagggaaaaggagcacaggatgcagctacttagagggtgttgattgaaaacttcgatctccccaccccatcacggttgatttgacggatttctcacctcgttcacagagaaaatttcaattaaggcacatggagacggacctctacctgcaatgccccccttgcacttggacagaaccatgtgactatttataagctatgacacatgagcagacatgacatgacgggattgatggagcaatgacctcatcttttctcctgccaaatattatgaaagaggactcaagtcactcacctgagggacactgggtgaaagtcagtaatgaagctgaaaggtcgctaaatgctggcaagtgagatggattatagtgtctagactttttcctgaggtcattctatatccagcagatatctttcagtatatagtctattcagaacaatgtgctagtgactattgagtgtggttacattcttttttttttttttttttgagatggagtctcactctgtcccctaggctggagtgcagtggcacaatcttggctcactgcaacctctgcctcctgggttcaagcaattctcctgagtcagcctcctgagtagctgagactacaggcacccaccatcacggccaactaatttttgtatttttagtagagatggggtttcaccatattggccaggctggtcttaaactcctgaccttgtaatctgcccaccttggcttcccaaagtgctgggattacaggagtgagccaccaagcccagccagttacattctttaaacaaggagtggacgtaccctgaaacaagagattagtcaaagagattttgctattcatgggacctaaaaggtggctgtacttccctttactgcttttccatacacagcaatgcacgctgtatgggttcttataggtcagagagtgaaagagaaccaggacctataaaagaatacaagtctctaaaatcagaaagtttattatttaaaaaaatagttacgtgccagtctgcttataatttatttttatgactgagagtgcctttcataagcacattctggcaaactataaaacaaataaattgaaattgaataaaacctttagacattagaagtgtagcaccagatttagtacataactgcaaaacttaaacatgcaattttacatctgcaagcacattaaattgaaagaaactttaacttaatttagatacattaattgatacaaacttttctggtatatagcacttcttggcgcattgagtattcttaatctttaaggcacatgaatataataccttaggaaagatctgttctccacacatttcctctataaagtgccaaaaaaaaaaataacgaagagccagtttgtcttccgcatcagtgtgatttagcatacataaataagtatcttttcacacaaaataaaaggttcagaacccaaagtgtctgatttttatagtgctttttctttccttttaaaaagatagcaagatgagggtaagaggtaatttaagagaagtaatcatcttctaacagccagcttgcagaaactaaaacaaatatcaatgatgtaaaaatgttgttttgacactttggtaaatgaaagtgtgagatgagtaagaatatattataggtgcttgtatatcaaaggcctgtgaaaatggctgattataaaggagaaagttaatgatctctaattgtgttgtaatgtaaatgcagtatcaccgtaatgaagagaacagatttgcatgttaacaaaagaaatattagaggagtgagtgtaggatgtttgggataattaattccatcctccactcctacatacatatgcatatacaaactcaattcaattttaaagagaacccgaagaaccaaaaatagactgaacacacttgatgttgtatgggagcttaaattactatttttgttgttctctgtgactatctcatttagtttctattgtgtttgcagtttcttccaaggtgatttttaatggattgagtaatgcataaaaatttgcagaagtatgcagaaagtttgtatgcagggccatgtagagcttttatcctacagtaaatcctagtagtttgctggtgctgtgtgattttttttgtttgtttagggtttttgtgtgtgtgtgtgtgtgtgtgtgtgtgtgtgtgtgtgtgtgaagcttatttattccatttc

SEQ ID NO: 11225 - protein, 110 aa, Homo sapiens
MASTAANLLANYNHSCSSSIRLEKTRFPSGLGAFSSSRETHQPSACVACAPGAFLLIRSMISAWLQGPAKSVREPPNGARSRRISRSETSLSPHLLTGNLGGFQLMFFSP

SEQ ID NO: 11226 - DNA, 627 bp, Homo sapiens
agtctcactaaagaactaaggatgctcttctctcctaatgaagttgtgtttacttctcaggtagggacagtgagagagaatcatgccattcaaatagaagttttattctcagcatccagcacatcaattcaccatagtagaagctcaaaggaaggatacgtctattgagaaattgcacgccaagtaaaatcctgagataaacaacttcatacaagagaaactgacagtttaccatacatttttggaatttaaagagttgttgtggtgtgctttctttttgtgcaaattatggaatagatgaaagtgacagagtgatgacaccacctaaatggaagcataatgtagacggttattgcagatgccttaccacacagctctgccagcgcacatgcttcctgcaaacctcctgcaatttaaacccttgggctccttcaactaatgacgctaatttgccaatggagcaatggctttcttcgctaaacactcacctacaaaggagtatgtattagccgacaatgtatgtgctcagtaaaaactggcaatataacatgcacattttaaatataaagaccactttcatcactacattaaatcatagggattgatttaataaatcacagtgtaaat

SEQ ID NO: 11227 - protein, 48 aa, Homo sapiens
MLFSPNEVVFTSQVGTVRENHAIQIEVLFSASSTSIHHSRSSKEGYVY

SEQ ID NO: 11228 - DNA, 1822 bp, Homo sapiens
gggtagtagaacaatgggattatgctgtcacaaaaaacaaagaaaaaacataatttcttaaatcatggtctgtcactgaatctggttataaaaccttatcttgcactagaaggatctgtagcttttccagctgagaatggggttcaggataccgaatcaacactagaaaagagagaaactggggatgaagaaaactcagctaaatttcctataggaaggagagattttgacacactcagatgtatgctgggaagagtctaccaacgttgctggcaagtctgattctttttttgatatggacctgttggtccatatcatcttttcagaagaaaagcatttaattgccaatgggaggagaagcccataatgttactgtaacttgggtattatgttaactgtctgttttaaaagaaagtagcgttaagatagatcagtaaccaaaatcataggctttttctgtgcattgaactttgtgaaaatgctgtataattttgacttactagtatttttgaacaatgcttaacatactaaccttacatacactctagaccaaaataaggcatcataatttacaccttaatctcaaaaattaagcatgtctttggtgaatggttttatatatacataaacctaaaacatataagacaaaaatttatgtttggagcctgtgttctgtaaagagaaggttgatttgtcttttagctatcgtatttggagtggaactataatacaaatgtataatattctttttttttttttttttgagatggagtctcactctgttgcccaggctggagtgcaatggcacgatctcggctcactgaaacctctgcctcccgggttcaagcaattccctgcctcagcctcatgaatagctgggattacaggtgcccaccaccatgcctggctggtttttgtatttttagtagaggcaaggtttcaccatcttggtcaagttggtctggaactcctgaccctgtgatccacctgccttggcttcccaaagtgctgggattacaggcgtgcaccactgagtccagcctatattcttgtttatcagttcaaaaatgctctgcactgtttttgactctttaaaaataacttagattcaaatttatagtagaagaaaaaaaatctttcagataagaggtgttctccagaatggaagaacgacttggcatgtaagaaatagcgtcagtgtcctaatgcatattgtgactgtttgcatatacttctgtttgtaaaaatatcggttttattttcagaggatttgtaagaaacatttaaattttcattgaaataaatgacaagtcatactgtcacttaaaaaaaaaaaaaagacctttgtcaaggagagtgcagtcaaccagtaaactgcagattctcagaatgtttattgacgtactgattattcattctgttatactctaacatctgtatatttttaccagtattctcagaccacttctaccaaaacataaatctgtgattgtgatctctgaaagtcagtccttttatctactcaataactgatctgataatgtcaacttttgaaaacagatagttatgactcaaggctttgagaatgtaaagagacgcccttcacatgttgagaaatggcacgatttcacgttatcagtgcagttcggttctcagggggaaagcccatccgtactaccaggagactggatccgcaaagtagacacttggtctcatgaagccactgctgggctccagagagaaggaaaaactaagcggttttaaaacccccgccctccttggtttacctccatcattaaaaaacaacaatgacaacgacaac

SEQ ID NO: 11229 - protein, 86 aa, Homo sapiens
MLSQKTKKKHNFLNHGLSLNLVIKPYLALEGSVAFPAENGVQDTESTLEKRETGDEENSAKFPIGRRDFDTLRCMLGRVYQRCWQV

SEQ ID NO: 11230 - DNA, 1842 bp, Homo sapiens
gggtagtagaacaatgggattatgctgtcacaaaaaacaaagaaaaaacataatttcttaaatcatggtctgtcactgaatctggttataaaaccttatcttgcactagaaggatctgtagcttttccagctgagaatggggttcaggataccgaatcaacactagaaaagagagaaactggggatgaagaaaactcagctaaatttcctataggaaggagagattttgacacactcagatgtatgctgggaagagtctaccaacgttgctggcaagtctgattctttttttgatatggacctgttggtccatatcatcttttcagaagaaaagcatttaattgccaatgggaggagaagcccataatgttactgtaacttgggtattatgttaactgtctgttttaaaagaaagtagcgttaagatagatcagtaaccaaaatcataggctttttctgtgcattgaactttgtgaaaatgctgtataattttgacttactagtatttttgaacaatgcttaacatactaaccttacatacactctagaccaaaataaggcatcataatttacaccttaatctcaaaaattaagcatgtctttggtgaatggttttatatatacataaacctaaaacatataagacaaaaatttatgtttggagcctgtgttctgtaaagagaaggttgatttgtcttttagctatcgtatttggagtggaactataatacaaatgtataatattctttttttttttttttttgagatggagtctcactctgttgcccaggctggagtgcaatggcacgatctcggctcactgaaacctctgcctcccgggttcaagcaattccctgcctcagcctcatgaatagctgggattacaggtgcccaccaccatgcctggctggtttttgtatttttagtagaggcaaggtttcaccatcttggtcaagttggtctggaactcctgaccctgtgatccacctgccttggcttcccaaagtgctgggattacaggcgtgcaccactgagtccagcctatattcttgtttatcagttcaaaaatgctctgcactgtttttgactctttaaaaataacttagattcaaatttatagtagaagaaaaaaaatctttcagataagaggtgttctccagaatggaagaacgacttggcatgtaagaaatagcgtcagtgtcctaatgcatattgtgactgtttgcatatacttctgtttgtaaaaatatcggttttattttcagaggatttgtaagaaacatttaaattttcattgaaataaatgacaagtcatactgtcacttaaaaaaaaaaaaaagacctttgtcaaggagagtgcagtcaaccagtaaactgcagattctcagaatgtttattgacgtactgattattcattctgttatactctaacatctgtatatttttaccagtattctcagaccacttctaccaaaacataaatctgtgattgtgatctctgaaagtcagtccttttatctactcaataactgatctgataatgtcaacttttgaaaacagatagttatgactcaaggctttgagaatgtaaagagacgcccttcacatgttgagaaatggcacgatttcacgttatcagtgcagttcggttctcagggggaaagaagtgtgaaactgtcaggaagacagatgaaatgatttgcctgaggccgtatcatcaaacaagaaattcatattcacctttctggaattcttaggataatgattacatgtgttcaattgttaaaaattggcagataaaattttatgtatttaccacgtacaacatgaaattttgaaaca

SEQ ID NO: 11231 - protein, 86 aa, Homo sapiens; identical to SEQ ID NO: 11229

SEQ ID NO: 11232 - DNA, 830 bp, Homo sapiens
ccagtattctcagaccacttctaccaaaacataaatctgtgattgtgatctctgaaagtcagtccttttatctactcaaaagaagacactaaggttttcagaaattaaattgctttttggaaaaggtgggagattctgggaacatagaaacttgaatccagttttcttcaactccacgtcaagacagttgcattgtgtgagaaaatagctacggccatttgtggtaaaatcacatatatgcaattatgtgaaactaattgtgtatatgtatctgtgtatgtgtgcgtgtacaatatataaactatcaatatttatcaaagtccgtatagctgctagcaatgagggggatctaggattctatcacatgatacctttttatgaggcctttgttctttccagtacatttgtcagctcgttcatgaaagagattcttaattatttactgaaatatcacaaaagtgatggtgagctaggttgccacattgatcctgataggtccttgacaaattcatattgactctccacaaataaaactataaggcagtttttcccattgtgatgcttttgtctacaatcttaattgttaactcttccaaagaataaacacacaatatatcaattttttaacccatttaggtagaaatatgggtatatagaaaggaagaaagcaaggttaacggtgagcagtggctaaatgaacaagagaacattcagttaagtatctcatctccaaaatggtataaactgtggcagaaagtactttgttgaatcaatagtttcgagacagacatacagtagggacatcgaaggtacaaaatagagcactgatg

SEQ ID NO: 11233 - protein, 83 aa, Homo sapiens [sequence omitted]

SEQ ID NO: 11234 - DNA, 766 bp, Homo sapiens
tctccttagacagtgaggagctcaacataacagggaaaaggagcacaggatgcagctacttagagggtgttgattgaaaacttcgatctccccaccccatcacggttgatttgacggatttctcacctcgttcacagagaaaatttcaattaaggattgagagaagctacagcagctaaaatgcagcgatggaggaacacagtcatacagagaagcctgtgccaatttagaaggaagtttggaatgggacaggaataggaaaggaaaactattacattacttcagaaagatatcacgatattcccacattgaggcaatggagcgaaatacatagtggtgggagttgagtaacatttaaagagaaaagtgaacttcatttggcaacagattggcatgcgccagttgtgggagtgtgcagtcagggatgagtctgagaccctgatttacggagctgattgatcctttcattgagaagattaattgaagacaacaggcttctgagagggatctgcagagacaagagctctggcaggtctgcttggcactgttggctttggatgtcttttcgcaacacactcctaccagatgacattctaggagtcacagatatggacagtatgtggaaagagtagagacaagaggaggaactcacagccaaaccataagaaattctaacatctgtggcttttttgtagacaagagaagggagaggggtcaacttcagtttgtttatatgtatttgtttttatgatatggtaaatttttg

SEQ ID NO: 11235 - protein, 33 aa, Homo sapiens
KLRSPHPITVDLTDFSPRSQRKFQLRIERSYSS

SEQ ID NO: 11236 - DNA, 161 bp, Homo sapiens
gaggaagtgctgagaaggtgatcagtggcagaaagagcggatgacggatggggaccagcagtgaggagctcaacataacagggaaaaggagcacaggatgcagctacttagagggtgttgattgaaaacttcgatctccccaccccatcacggttgatttg

SEQ ID NO: 11237 - DNA, 512 bp, Homo sapiens
atgctgggaggagggtgaaatttagccatcggtgtgtggcagggtcatgaaaaagcggcggcggcgggagagaggaggaggcggcggcggggcagtgaaactacggtagctgccccctgagctggtggtgtggctttgtggggagggcgtagttcctaatcccctttccgggcagccgccggggctcggggctgtgagcggccgtgaggctgcctccccgggccccctgcctccgccatgttccgcagggcacgccttagcgtgaagccgaatgtcaggcctggtgtaggcgccaggggctccacaatcttcctctactgtttcacagagaagaaagcgaatatcaagtacttctagcctggttaagtctagtgtcagtgttccttcagaatctcatcccttatctacaattaatcaagaggctccacagccaactgccacttcaacaaaagagaaacagccatgctcagacagataccgaatatacaaagcccagaaactgagggaaatgt

SEQ ID NO: 11238 - protein, 39 aa, Homo sapiens
MFRRARLSVKPNVRPGVGARGSTIFLYCFTEKKANIKYF

SEQ ID NO: 11239 - DNA, 4408 bp, Homo sapiens
ggtgaaatttagccatcggtgtgtggcagggtcatgaaaaagcggcggcggcgggagagaggaggaggcggcggcggggcagtgaaactacggtagctgccccctgagctggtggtgtggctttgtggggagggcgtagttcctaatcccctttccgggcagccgccggggctcggggctgtgagcggccgtgaggctgcctccccgggccccctgcctccgccatgttccgcagggcacgccttagcgtgaagccgaatgtcaggcctggtgtaggcgccaggggctccacagcttccaatccccagcgtggacgggagtctcccaggccgccggatcctgccacggactctgcttccaagcccgcggagcccacagatgtgcccacagtcgatttcggtggagcggagccccaagaaaaggctcctaggagcagtactgaaaagactggtggtgacaatgatgttgaagaatccagtagatcttcctctactgtttcacagagaagaaagcgaatatcaagtacttctagcctggttaagtctagtgtcagtgttccttcagaatctcatcccttatctacaattaatcaagaggctccacagccaactgccacttcaacaaaagagaaacagccatgctcagacagataccgaatatacaaagcccagaaactgagggaaatgttaaaagaagaattgagaaaagagaagaaacaatggaaaaacaaatatgctataaatgaaagtcagaggccaccagatcgttcaaaaatgactatgagagacttcatatattatctaccagataataatccaatgacttcttcactggaacaagaaaagaaaactgaaaagccatcgactccagtccagacaagagagcaagaaggtaagagtactcctaatgctgaagataatgaaatggaagaagagacagatgatgggccattactggttcctcgagtaaaagtggcagaagatggttccattattttggatgaagaaagtttaactgtagaagttttaagaacaaaaggcccttgtgttgttgaagaaaatgaccccatatttgagcgcggttctacaactacatactccagctttaggaaaaactattactctaaaccatggtcaaataaagaaacagatatgttttttttagccatcagcatggtaggaactgacttttctatgatcggacaactttttcctcacagagcaaggatagaaattaagaataaatttaaacgggaagagaaaacaaatggatggagaatagacaaagcattccaggaaaagcgcccttttgacttcgatttttttgctcatttgcttcagaaagttcttgctgaagaagagaaaagaaaacaaaaatctgttaaaaatcacagtttaaaggagaagaaatccaccaaaccacggaaaaatgtaaaagtgaaaaaagttgcctgtgaaggagtgaataatgatccagatgagtctatgagttctagaatttcagacacggaaagatctcagaaggatgctcagacagttgaagaagagtctctgaccttatcaagggaggatgcagagcaggttgcattagaagtagacctaaatcaaaagaaaagaaggaggaagaagcaagatggagctaatgaactgggagtaaacaatcttttagaaaatgccactgttcaggcgggtccttctaaaggagaaaaacacaagaataaatgtcaggctataaggcctgagctaaaggaaggtgaatgcagtaaggagcagatgctttcctgcacacaaaacatagatggcattgtgggttttgcctccactgaaaaagttgagaaaagaactgaccccatcctttcattaagtaatcaacaagatgccacatcagtagcaactgagtcttcagaatcaagcacttcagatttgccttcattcgaagttggaattagagcattgtgtgaggtgaataatgctgagggtagttgtatagaagaaagaaatgttgacctaaaaaataattcactggaaattgatcaaacagaaaatgttaaaccaatgttgagaggtcgcttccaaagacctaaacccaatttgtcaagggctgggaagaaatcagttctttcacaaggcaaaacagagtcagagagcaagaattcacattcaaaaacttcagttgaaaagaaccacgtggaaaaagataaaatgaatacattggacattttgagaatggagactacagagagagagaatccagaagctgaaactgtatctgttttgggtgaaaaaaattgtctgcaggaagggagtcaactaaaggctttaagacctgtacaagtgaggggccgattgcaaaagccaaagccaaatgcaggtaaagctgctgaaagaaaagaaattctcatatcacaggaagaaattggggccaatgtagagaagaatgaaaatgaatcctgtgctgatagagatactcctcaacacatggaagatcaatcgcgtaaagattttgaagaggaagatgtcatattacagcctgagaaaaatgattcttttcaaaatgtgcagccagatgagcccaaggttcttaatgaatgtctaagcgttcaagagaataataaggcaaataaacttaaccaagtcccaattctaaggactcgatttcagaaaccaaagccaaatataggaagaggaactggaaggagagaaatttcctcaaaggaagaggtactagagaagattcttgtctctggggaaatggcggcagcattgagagaaactgtaagactagacacctcaccaaaggagatggtaccagcagagattaatactaaagaaatgcagtcagatttaaaagaaactggaagaagagccatttctcccagggagaagattctagatgtgattgatgacaccatagaaatggagacaggtctgaaagcaatgggaagagagatttgtctaagggagaagacgccagaggtgattgatgccactgaggaaatagacaaagatttggaagaagctggaagaagagaaatatccccacagaaaaatggcccagaggaggttaagcctctaggtgaagtggagacagatttgaaagcaactggaaatgagagttccccaagggagaagacaccagaggtgactgatgccactgaggaaatagacaaaaatttggaagaaactggaagaagaaaaatatccccaagggaaaatggcccagaggaggtcaagcctgtagatgaaatggagacagatttgaacgcaactggaagagagagttctccaagggagaagacaccagaggtgattgatgctactgaggaaatagatttggaagaaactgaaagagaagtatccccacaggaaaatggactagaggaggtcaagcctctaggtgaaatggagacggatttgaaagcaactggaagagacagtttcccaagggggaagacaccagaggtgattgatgccattgaggaaatagagatagatttggaagaaactgaaagagaaatatccccacaggaaaatggcctagaggaggttaagcctctaggtgaaatgcaaacagatttgaaagcaaccggaagggagatttccccaagggagaagacaccagaggtgattgatgccactgaggaaatagacaaagatctggaagaaactggaagaagagaaatatccccagaggaaaatggcccagaggaggtcaagcctgtagatgaaatggagacagacttgaaaacaactggaagagagggttcctcaagggagaagacacgagaggtgattgatgctgctgaggtaatagagacagatttggaagaaactgaaagagaaatatcgccacaggaaaatggcccagaggaggtcaagcctgtaggtaaaatggagacagatttgaaagaaattagagaagaaatttcccaaagggaaaaggtgctagcagagttcagtgctataagggaaaaggagattgatttgaaagaaactggaaaaagagacattcccatcatggagaaagtatcaggaaagatggctgttgttgaagaaatggaggcagatttgaaagaaactggaaaagaaaattttagagagagaggatctgaagagatctgtgttactgaggaaaaggtggcagaattgaaacaaactggaaaaacagacatttctccaagggaaaacgagctagaggagaccagtacctcaagacaaactgacacacatttaatgcagagcggtagcaatgacttcagtgctgtgccttcactagatattcaggtatgtatttttctgtcctttaaaagttttttgaatgcttttttcagaggaaataaataattccatgattattttgtccttaagtccaacaacacttaaaaatctctaaaagtctaaagtctttt

SEQ ID NO: 11240 - protein, 1372 aa, Homo sapiens
MFRRARLSVKPNVRPGVGARGSTASNPQRGRESPRPPDPATDSASKPAEPTDVPTVDFGGAEPQEKAPRSSTEKTGGDNDVEESSRSSSTVSQRRKRISSTSSLVKSSVSVPSESHPLSTINQEAPQPTATSTKEKQPCSDRYRIYKAQKLREMLKEELRKEKKQWKNKYAINESQRPPDRSKMTMRDFIYYLPDNNPMTSSLEQEKKTEKPSTPVQTREQEGKSTPNAEDNEMEEETDDGPLLVPRVKVAEDGSIILDEESLTVEVLRTKGPCVVEENDPIFERGSTTTYSSFRKNYYSKPWSNKETDMFFLAISMVGTDFSMIGQLFPHRARIEIKNKFKREEKTNGWRIDKAFQEKRPFDFDFFAHLLQKVLAEEEKRKQKSVKNHSLKEKKSTKPRKNVKVKKVACEGVNNDPDESMSSRISDTERSQKDAQTVEEESLTLSREDAEQVALEVDLNQKKRRRKKQDGANELGVNNLLENATVQAGPSKGEKHKNKCQAIRPELKEGECSKEQMLSCTQNIDGIVGFASTEKVEKRTDPILSLSNQQDATSVATESSESSTSDLPSFEVGIRALCEVNNAEGSCIEERNVDLKNNSLEIDQTENVKPMLRGRFQRPKPNLSRAGKKSVLSQGKTESESKNSHSKTSVEKNHVEKDKMNTLDILRMETTERENPEAETVSVLGEKNCLQEGSQLKALRPVQVRGRLQKPKPNAGKAAERKEILISQEEIGANVEKNENESCADRDTPQHMEDQSRKDFEEEDVILQPEKNDSFQNVQPDEPKVLNECLSVQENNKANKLNQVPILRTRFQKPKPNIGRGTGRREISSKEEVLEKILVSGEMAAALRETVRLDTSPKEMVPAEINTKEMQSDLKETGRRAISPREKILDVIDDTIEMETGLKAMGREICLREKTPEVIDATEEIDKDLEEAGRREISPQKNGPEEVKPLGEVETDLKATGNESSPREKTPEVTDATEEIDKNLEETGRRKISPRENGPEEVKPVDEMETDLNATGRESSPREKTPEVIDATEEIDLEETEREVSPQENGLEEVKPLGEMETDLKATGRDSFPRGKTPEVIDAIEEIEIDLEETEREISPQENGLEEVKPLGEMQTDLKATGREISPREKTPEVIDATEEIDKDLEETGRREISPEENGPEEVKPVDEMETDLKTTGREGSSREKTREVIDAAEVIETDLEETEREISPQENGPEEVKPVGKMETDLKEIREEISQREKVLAEFSAIREKEIDLKETGKRDIPIMEKVSGKMAVVEEMEADLKETGKENFRERGSEEICVTEEKVAELKQTGKTDISPRENELEETSTSRQTDTHLMQSGSNDFSAVPSLDIQVCIFLSFKSFLNAFFRGNK

SEQ ID NO: 11241 - DNA, 7226 bp, Homo sapiens
ggtgaaatttagccatcggtgtgtggcagggtcatgaaaaagcggcggcggcgggagagaggaggaggcggcggcggggcagtgaaactacggtagctgccccctgagctggtggtgtggctttgtggggagggcgtagttcctaatcccctttccgggcagccgccggggctcggggctgtgagcggccgtgaggctgcctccccgggccccctgcctccgccatgttccgcagggcacgccttagcgtgaagccgaatgtcaggcctggtgtaggcgccaggggctccacagcttccaatccccagcgtggacgggagtctcccaggccgccggatcctgccacggactctgcttccaagcccgcggagcccacagatgtgcccacagtcgatttcggtggagcggagccccaagaaaaggctcctaggagcagtactgaaaagactggtggtgacaatgatgttgaagaatccagtagatcttcctctactgtttcacagagaagaaagcgaatatcaagtacttctagcctggttaagtctagtgtcagtgttccttcagaatctcatcccttatctacaattaatcaagaggctccacagccaactgccacttcaacaaaagagaaacagccatgctcagacagataccgaatatacaaagcccagaaactgagggaaatgttaaaagaagaattgagaaaagagaagaaacaatggaaaaacaaatatgctataaatgaaagtcagaggccaccagatcgttcaaaaatgactatgagagacttcatatattatctaccagataataatccaatgacttcttcactggaacaagaaaagaaaactgaaaagccatcgactccagtccagacaagagagcaagaaggtaagagtactcctaatgctgaagataatgaaatggaagaagagacagatgatgggccattactggttcctcgagtaaaagtggcagaagatggttccattattttggatgaagaaagtttaactgtagaagttttaagaacaaaaggcccttgtgttgttgaagaaaatgaccccatatttgagcgcggttctacaactacatactccagctttaggaaaaactattactctaaaccatggtcaaataaagaaacagatatgttttttttagccatcagcatggtaggaactgacttttctatgatcggacaactttttcctcacagagcaaggatagaaattaagaataaatttaaacgggaagagaaaacaaatggatggagaatagacaaagcattccaggaaaagcgcccttttgacttcgatttttttgctcatttgcttcagaaagttcttgctgaagaagagaaaagaaaacaaaaatctgttaaaaatcacagtttaaaggagaagaaatccaccaaaccacggaaaaatgtaaaagtgaaaaaagttgcctgtgaaggagtgaataatgatccagatgagtctatgagttctagaatttcagacacggaaagatctcagaaggatgctcagacagttgaagaagagtctctgaccttatcaagggaggatgcagagcaggttgcattagaagtagacctaaatcaaaagaaaagaaggaggaagaagcaagatggagctaatgaactgggagtaaacaatcttttagaaaatgccactgttcaggcgggtccttctaaaggagaaaaacacaagaataaatgtcaggctataaggcctgagctaaaggaaggtgaatgcagtaaggagcagatgctttcctgcacacaaaacatagatggcattgtgggttttgcctccactgaaaaagttgagaaaagaactgaccccatcctttcattaagtaatcaacaagatgccacatcagtagcaactgagtcttcagaatcaagcacttcagatttgccttcattcgaagttggaattagagcattgtgtgaggtgaataatgctgagggtagttgtatagaagaaagaaatgttgacctaaaaaataattcactggaaattgatcaaacagaaaatgttaaaccaatgttgagaggtcgcttccaaagacctaaacccaatttgtcaagggctgggaagaaatcagttctttcacaaggcaaaacagagtcagagagcaagaattcacattcaaaaacttcagttgaaaagaaccacgtggaaaaagataaaatgaatacattggacattttgagaatggagactacagagagagagaatccagaagctgaaactgtatctgttttgggtgaaaaaaattgtctgcaggaagggagtcaactaaaggctttaagacctgtacaagtgaggggccgattgcaaaagccaaagccaaatgcaggtaaagctgctgaaagaaaagaaattctcatatcacaggaagaaattggggccaatgtagagaagaatgaaaatgaatcctgtgctgatagagatactcctcaacacatggaagatcaatcgcgtaaagattttgaagaggaagatgtcatattacagcctgagaaaaatgattcttttcaaaatgtgcagccagatgagcccaaggttcttaatgaatgtctaagcgttcaagagaataataaggcaaataaacttaaccaagtcccaattctaaggactcgatttcagaaaccaaagccaaatataggaagaggaactggaaggagagaaatttcctcaaaggaagaggtactagagaagattcttgtctctggggaaatggcggcagcattgagagaaactgtaagactagacacctcaccaaaggagatggtaccagcagagattaatactaaagaaatgcagtcagatttaaaagaaactggaagaagagccatttctcccagggagaagattctagatgtgattgatgacaccatagaaatggagacaggtctgaaagcaatgggaagagagatttgtctaagggagaagacgccagaggtgattgatgccactgaggaaatagacaaagatttggaagaagctggaagaagagaaatatccccacagaaaaatggcccagaggaggttaagcctctaggtgaagtggagacagatttgaaagcaactggaaatgagagttccccaagggagaagacaccagaggtgactgatgccactgaggaaatagacaaaaatttggaagaaactggaagaagaaaaatatccccaagggaaaatggcccagaggaggtcaagcctgtagatgaaatggagacagatttgaacgcaactggaagagagagttctccaagggagaagacaccagaggtgattgatgctactgaggaaatagatttggaagaaactgaaagagaagtatccccacaggaaaatggactagaggaggtcaagcctctaggtgaaatggagacggatttgaaagcaactggaagagacagtttcccaagggggaagacaccagaggtgattgatgccattgaggaaatagagatagatttggaagaaactgaaagagaaatatccccacaggaaaatggcctagaggaggttaagcctctaggtgaaatgcaaacagatttgaaagcaaccggaagggagatttccccaagggagaagacaccagaggtgattgatgccactgaggaaatagacaaagatctggaagaaactggaagaagagaaatatccccagaggaaaatggcccagaggaggtcaagcctgtagatgaaatggagacagacttgaaaacaactggaagagagggttcctcaagggagaagacacgagaggtgattgatgctgctgaggtaatagagacagatttggaagaaactgaaagagaaatatcgccacaggaaaatggcccagaggaggtcaagcctgtaggtaaaatggagacagatttgaaagaaattagagaagaaatttcccaaagggaaaaggtgctagcagagttcagtgctataagggaaaaggagattgatttgaaagaaactggaaaaagagacattcccatcatggagaaagtatcaggaaagatggctgttgttgaagaaatggaggcagatttgaaagaaactggaaaagaaaattttagagagagaggatctgaagagatctgtgttactgaggaaaaggtggcagaattgaaacaaactggaaaaacagacatttctccaagggaaaacgagctagaggagaccagtacctcaagacaaactgacacacatttaatgcagagcggtagcaatgacttcagtgctgtgccttcactagatattcagaacattagcagtgaagtactgtcgatgatgcatacacctgtagaagaaaaaagaaattctgaaaaagaagtatcaagtcacttcagtcatttcaagatttcttcacagactcatgaatctgataaaacagaagtccaggggattcaatctccagatgttccagagcagttttcagatattaatttaagcaaatctcttcctcaagaacagaagccacttgaaattaaaccagcaccttttgtgaggagccgattcaaaagaccaaaaccaaacttagcaagagcagctttgaagagagagactacagaatcagaaaaatatatatatgagaagaaatcagaaaccaagaaaatggagactattgtgatgcaagaaaataatgaacaaactgatactctcccttctcaacatgatgaagcttccctaatgatatcaagagaaaaagacacattaggtcacaggaatgaggaggctgtgatattgccatgtacacagactgaaaggaacctttcaccttcaaattcttgtgaacctaaagaggagtctcagtcagcaccagtccagaaaaatgactcagttgtttctgtggggactaataatgtaaacactttccagcaagaaatgaaggaaagtgttatccaaactgctcgacaagtaaggggccgacttcagagaccgagaccaaatataagaaagacaggacagaggcaaatagtagacaaaggtgaagccaaaggcataattaaggaaggaagaacgatattaccaaaagatgaaactgaaaagaaagtcttaactgtgtcaaattctcaaattgaaactgaaattgaagttccatcgtccgcagttccagaacacagaatgtatgaaaatcaaagtcaggtggttcttgtagaaaaccttcatgttaacaaaacaaatgaaacaatcagacatgaaaataaaccgtatgttcctagttcagcacaaatgacaagaaggaaattccaaaaggctaagccaaatttgggaagagcacacagtaagaaagaggaaccagttttagaaaaagtcacaacagatcagagcaaggaaggcaagccagaagatcatttgctgcagaaaggagcttccaacacccagctccttctaaaagaaaaagctgagcttctgacatctctggaggtttcagcaagaaaagattgtgtaggttccaaagagtctgctttggcaaaaatagatgcggaattagaagaagttggaccatcaagaagggttggagaggaaactgtaggagataattcaccatcttcagttgttgaagagcaatatctcaataaactaacaagctgtccacaaccgttaaacgaaacaagttactctaaaattgccctggatgggaaaacaactatctcttctacatctgagtatgagagaaatcgtggtgaaaggagaagtcataaaaagttcaaaccaaatgtcaccagaggtcgtggatcaaaacgagttcggggtaagacctctaagaaggaacctagagcttccaaggccatgctggtgactcttcgggcttcccaggaagaagatgatgatgctgacgattttgagtctgactatgaggaagaaagctatcatcttgctcccgaagaagtaaacaaagctccagtatttgtacctgttggtctcagatctcctgaacctgtttctgctcagattgaggaaacaatggaagagcttgaaataactgtgaatgtcccagatgtaggatgcatagctgttgttgaacatgagctaccaaacacagatgtgactactgaagaaatgaaacaagaagaaaatttgagtgtaccgtttgaaatgaccacaagtgaacatatccaagatgaaccaggtaccaatgatggaagcaccgaagctgcaataactttacttacaatgggagatctagtattgcagtcagagatcagtagtgaacagggtgatgtaggagtatgtataattcctcatgttcattcaaaggataaaagccatattccttctagcctagataatgtaaatcacaaaattgttcatgaatgtcaggaactttcttcacctgtcattactacatctcctgcatcatttgaagaaaacaagattgtattggaggaacaaagttccagagaagaaataagtttaatggagaaagtaaaggagaatgctacaccaaccaggaatacaatttctaaagtgaccagtaatttgagaataagaagtaggcttgctaagcctaaaccaaatcttgagaagactttagggaccaacaggcttgatgattatcaggaagtttccagtttgtgtgtaaccaaaggggcagaaatggaaactcaaagagaaacagagaaaaatgcttccaaagcaacagaattggaaaataaaaacctcggaccagttacaacagcagagaataaggatcagagcaaattggcatgtgtacatggtatcaaagggaccagtatttcttcagaagtaaacctaactgaaagaaacgaaaatcaagaagagagctctcaggaggttcacatgttgtcagttgctccagttgcttcctctgagacagggccctgcacacttggtttggataggggtcttggtgaaaattctgttgaagagccccagataaaggactctaaaggagacagtgtgcttacacttcctgtgccagaggtaaaagaatgtacagtataataagggatagcaaggtgttttcctccatttaaaaaaaaaaaggtataatttacatacaataaacttcacctcttttatcttcatttttctttatttcttcttttttttttggagacagtcttgttctgttgcccaggcaagagtgcagtggtatgatctcagctcactgcaacctctgccacccagattcaacagattctcctgcctcagcctgccaagtagctgggactacaggca

SEQ ID NO: 11242 - protein, 2254 aa, Homo sapiens
MFRRARLSVKPNVRPGVGARGSTASNPQRGRESPRPPDPATDSASKPAEPTDVPTVDFGGAEPQEKAPRSSTEKTGGDNDVEESSRSSSTVSQRRKRISSTSSLVKSSVSVPSESHPLSTINQEAPQPTATSTKEKQPCSDRYRIYKAQKLREMLKEELRKEKKQWKNKYAINESQRPPDRSKMTMRDFIYYLPDNNPMTSSLEQEKKTEKPSTPVQTREQEGKSTPNAEDNEMEEETDDGPLLVPRVKVAEDGSIILDEESLTVEVLRTKGPCVVEENDPIFERGSTTTYSSFRKNYYSKPWSNKETDMFFLAISMVGTDFSMIGQLFPHRARIEIKNKFKREEKTNGWRIDKAFQEKRPFDFDFFAHLLQKVLAEEEKRKQKSVKNHSLKEKKSTKPRKNVKVKKVACEGVNNDPDESMSSRISDTERSQKDAQTVEEESLTLSREDAEQVALEVDLNQKKRRRKKQDGANELGVNNLLENATVQAGPSKGEKHKNKCQAIRPELKEGECSKEQMLSCTQNIDGIVGFASTEKVEKRTDPILSLSNQQDATSVATESSESSTSDLPSFEVGIRALCEVNNAEGSCIEERNVDLKNNSLEIDQTENVKPMLRGRFQRPKPNLSRAGKKSVLSQGKTESESKNSHSKTSVEKNHVEKDKMNTLDILRMETTERENPEAETVSVLGEKNCLQEGSQLKALRPVQVRGRLQKPKPNAGKAAERKEILISQEEIGANVEKNENESCADRDTPQHMEDQSRKDFEEEDVILQPEKNDSFQNVQPDEPKVLNECLSVQENNKANKLNQVPILRTRFQKPKPNIGRGTGRREISSKEEVLEKILVSGEMAAALRETVRLDTSPKEMVPAEINTKEMQSDLKETGRRAISPREKILDVIDDTIEMETGLKAMGREICLREKTPEVIDATEEIDKDLEEAGRREISPQKNGPEEVKPLGEVETDLKATGNESSPREKTPEVTDATEEIDKNLEETGRRKISPRENGPEEVKPVDEMETDLNATGRESSPREKTPEVIDATEEIDLEETEREVSPQENGLEEVKPLGEMETDLKATGRDSFPRGKTPEVIDAIEEIEIDLEETEREISPQENGLEEVKPLGEMQTDLKATGREISPREKTPEVIDATEEIDKDLEETGRREISPEENGPEEVKPVDEMETDLKTTGREGSSREKTREVIDAAEVIETDLEETEREISPQENGPEEVKPVGKMETDLKEIREEISQREKVLAEFSAIREKEIDLKETGKRDIPIMEKVSGKMAVVEEMEADLKETGKENFRERGSEEICVTEEKVAELKQTGKTDISPRENELEETSTSRQTDTHLMQSGSNDFSAVPSLDIQNISSEVLSMMHTPVEEKRNSEKEVSSHFSHFKISSQTHESDKTEVQGIQSPDVPEQFSDINLSKSLPQEQKPLEIKPAPFVRSRFKRPKPNLARAALKRETTESEKYIYEKKSETKKMETIVMQENNEQTDTLPSQHDEASLMISREKDTLGHRNEEAVILPCTQTERNLSPSNSCEPKEESQSAPVQKNDSVVSVGTNNVNTFQQEMKESVIQTARQVRGRLQRPRPNIRKTGQRQIVDKGEAKGIIKEGRTILPKDETEKKVLTVSNSQIETEIEVPSSAVPEHRMYENQSQVVLVENLHVNKTNETIRHENKPYVPSSAQMTRRKFQKAKPNLGRAHSKKEEPVLEKVTTDQSKEGKPEDHLLQKGASNTQLLLKEKAELLTSLEVSARKDCVGSKESALAKIDAELEEVGPSRRVGEETVGDNSPSSVVEEQYLNKLTSCPQPLNETSYSKIALDGKTTISSTSEYERNRGERRSHKKFKPNVTRGRGSKRVRGKTSKKEPRASKAMLVTLRASQEEDDDADDFESDYEEESYHLAPEEVNKAPVFVPVGLRSPEPVSAQIEETMEELEITVNVPDVGCIAVVEHELPNTDVTTEEMKQEENLSVPFEMTTSEHIQDEPGTNDGSTEAAITLLTMGDLVLQSEISSEQGDVGVCIIPHVHSKDKSHIPSSLDNVNHKIVHECQELSSPVITTSPASFEENKIVLEEQSSREEISLMEKVKENATPTRNTISKVTSNLRIRSRLAKPKPNLEKTLGTNRLDDYQEVSSLCVTKGAEMETQRETEKNASKATELENKNLGPVTTAENKDQSKLACVHGIKGTSISSEVNLTERNENQEESSQEVHMLSVAPVASSETGPCTLGLDRGLGENSVEEPQIKDSKGDSVLTLPVPEVKECTV

SEQ ID NO: 11243 - DNA, 8192 bp, Homo sapiens
ggtgaaatttagccatcggtgtgtggcagggtcatgaaaaagcggcggcggcgggagagaggaggaggcggcggcggggcagtgaaactacggtagctgccccctgagctggtggtgtggctttgtggggagggcgtagttcctaatcccctttccgggcagccgccggggctcggggctgtgagcggccgtgaggctgcctccccgggccccctgcctccgccatgttccgcagggcacgccttagcgtgaagccgaatgtcaggcctggtgtaggcgccaggggctccacagcttccaatccccagcgtggacgggagtctcccaggccgccggatcctgccacggactctgcttccaagcccgcggagcccacagatgtgcccacagtcgatttcggtggagcggagccccaagaaaaggctcctaggagcagtactgaaaagactggtggtgacaatgatgttgaagaatccagtagatcttcctctactgtttcacagagaagaaagcgaatatcaagtacttctagcctggttaagtctagtgtcagtgttccttcagaatctcatcccttatctacaattaatcaagaggctccacagccaactgccacttcaacaaaagagaaacagccatgctcagacagataccgaatatacaaagcccagaaactgagggaaatgttaaaagaagaattgagaaaagagaagaaacaatggaaaaacaaatatgctataaatgaaagtcagaggccaccagatcgttcaaaaatgactatgagagacttcatatattatctaccagataataatccaatgacttcttcactggaacaagaaaagaaaactgaaaagccatcgactccagtccagacaagagagcaagaaggtaagagtactcctaatgctgaagataatgaaatggaagaagagacagatgatgggccattactggttcctcgagtaaaagtggcagaagatggttccattattttggatgaagaaagtttaactgtagaagttttaagaacaaaaggcccttgtgttgttgaagaaaatgaccccatatttgagcgcggttctacaactacatactccagctttaggaaaaactattactctaaaccatggtcaaataaagaaacagatatgttttttttagccatcagcatggtaggaactgacttttctatgatcggacaactttttcctcacagagcaaggatagaaattaagaataaatttaaacgggaagagaaaacaaatggatggagaatagacaaagcattccaggaaaagcgcccttttgacttcgatttttttgctcatttgcttcagaaagttcttgctgaagaagagaaaagaaaacaaaaatctgttaaaaatcacagtttaaaggagaagaaatccaccaaaccacggaaaaatgtaaaagtgaaaaaagttgcctgtgaaggagtgaataatgatccagatgagtctatgagttctagaatttcagacacggaaagatctcagaaggatgctcagacagttgaagaagagtctctgaccttatcaagggaggatgcagagcaggttgcattagaagtagacctaaatcaaaagaaaagaaggaggaagaagcaagatggagctaatgaactgggagtaaacaatcttttagaaaatgccactgttcaggcgggtccttctaaaggagaaaaacacaagaataaatgtcaggctataaggcctgagctaaaggaaggtgaatgcagtaaggagcagatgctttcctgcacacaaaacatagatggcattgtgggttttgcctccactgaaaaagttgagaaaagaactgaccccatcctttcattaagtaatcaacaagatgccacatcagtagcaactgagtcttcagaatcaagcacttcagatttgccttcattcgaagttggaattagagcattgtgtgaggtgaataatgctgagggtagttgtatagaagaaagaaatgttgacctaaaaaataattcactggaaattgatcaaacagaaaatgttaaaccaatgttgagaggtcgcttccaaagacctaaacccaatttgtcaagggctgggaagaaatcagttctttcacaaggcaaaacagagtcagagagcaagaattcacattcaaaaacttcagttgaaaagaaccacgtggaaaaagataaaatgaatacattggacattttgagaatggagactacagagagagagaatccagaagctgaaactgtatctgttttgggtgaaaaaaattgtctgcaggaagggagtcaactaaaggctttaagacctgtacaagtgaggggccgattgcaaaagccaaagccaaatgcaggtaaagctgctgaaagaaaagaaattctcatatcacaggaagaaattggggccaatgtagagaagaatgaaaatgaatcctgtgctgatagagatactcctcaacacatggaagatcaatcgcgtaaagattttgaagaggaagatgtcatattacagcctgagaaaaatgattcttttcaaaatgtgcagccagatgagcccaaggttcttaatgaatgtctaagcgttcaagagaataataaggcaaataaacttaaccaagtcccaattctaaggactcgatttcagaaaccaaagccaaatataggaagaggaactggaaggagagaaatttcctcaaaggaagaggtactagagaagattcttgtctctggggaaatggcggcagcattgagagaaactgtaagactagacacctcaccaaaggagatggtaccagcagagattaatactaaagaaatgcagtcagatttaaaagaaactggaagaagagccatttctcccagggagaagattctagatgtgattgatgacaccatagaaatggagacaggtctgaaagcaatgggaagagagatttgtctaagggagaagacgccagaggtgattgatgccactgaggaaatagacaaagatttggaagaagctggaagaagagaaatatccccacagaaaaatggcccagaggaggttaagcctctaggtgaagtggagacagatttgaaagcaactggaaatgagagttccccaagggagaagacaccagaggtgactgatgccactgaggaaatagacaaaaatttggaagaaactggaagaagaaaaatatccccaagggaaaatggcccagaggaggtcaagcctgtagatgaaatggagacagatttgaacgcaactggaagagagagttctccaagggagaagacaccagaggtgattgatgctactgaggaaatagatttggaagaaactgaaagagaagtatccccacaggaaaatggactagaggaggtcaagcctctaggtgaaatggagacggatttgaaagcaactggaagagacagtttcccaagggggaagacaccagaggtgattgatgccattgaggaaatagagatagatttggaagaaactgaaagagaaatatccccacaggaaaatggcctagaggaggttaagcctctaggtgaaatgcaaacagatttgaaagcaaccggaagggagatttccccaagggagaagacaccagaggtgattgatgccactgaggaaatagacaaagatctggaagaaactggaagaagagaaatatccccagaggaaaatggcccagaggaggtcaagcctgtagatgaaatggagacagacttgaaaacaactggaagagagggttcctcaagggagaagacacgagaggtgattgatgctgctgaggtaatagagacagatttggaagaaactgaaagagaaatatcgccacaggaaaatggcccagaggaggtcaagcctgtaggtaaaatggagacagatttgaaagaaattagagaagaaatttcccaaagggaaaaggtgctagcagagttcagtgctataagggaaaaggagattgatttgaaagaaactggaaaaagagacattcccatcatggagaaagtatcaggaaagatggctgttgttgaagaaatggaggcagatttgaaagaaactggaaaagaaaattttagagagagaggatctgaagagatctgtgttactgaggaaaaggtggcagaattgaaacaaactggaaaaacagacatttctccaagggaaaacgagctagaggagaccagtacctcaagacaaactgacacacatttaatgcagagcggtagcaatgacttcagtgctgtgccttcactagatattcagaacattagcagtgaagtactgtcgatgatgcatacacctgtagaagaaaaaagaaattctgaaaaagaagtatcaagtcacttcagtcatttcaagatttcttcacagactcatgaatctgataaaacagaagtccaggggattcaatctccagatgttccagagcagttttcagatattaatttaagcaaatctcttcctcaagaacagaagccacttgaaattaaaccagcaccttttgtgaggagccgattcaaaagaccaaaaccaaacttagcaagagcagctttgaagagagagactacagaatcagaaaaatatatatatgagaagaaatcagaaaccaagaaaatggagactattgtgatgcaagaaaataatgaacaaactgatactctcccttctcaacatgatgaagcttccctaatgatatcaagagaaaaagacacattaggtcacaggaatgaggaggctgtgatattgccatgtacacagactgaaaggaacctttcaccttcaaattcttgtgaacctaaagaggagtctcagtcagcaccagtccagaaaaatgactcagttgtttctgtggggactaataatgtaaacactttccagcaagaaatgaaggaaagtgttatccaaactgctcgacaagtaaggggccgacttcagagaccgagaccaaatataagaaagacaggacagaggcaaatagtagacaaaggtgaagccaaaggcataattaaggaaggaagaacgatattaccaaaagatgaaactgaaaagaaagtcttaactgtgtcaaattctcaaattgaaactgaaattgaagttccatcgtccgcagttccagaacacagaatgtatgaaaatcaaagtcaggtggttcttgtagaaaaccttcatgttaacaaaacaaatgaaacaatcagacatgaaaataaaccgtatgttcctagttcagcacaaatgacaagaaggaaattccaaaaggctaagccaaatttgggaagagcacacagtaagaaagaggaaccagttttagaaaaagtcacaacagatcagagcaaggaaggcaagccagaagatcatttgctgcagaaaggagcttccaacacccagctccttctaaaagaaaaagctgagcttctgacatctctggaggtttcagcaagaaaagattgtgtaggttccaaagagtctgctttggcaaaaatagatgcggaattagaagaagttggaccatcaagaagggttggagaggaaactgtaggagataattcaccatcttcagttgttgaagagcaatatctcaataaactaacaagctgtccacaaccgttaaacgaaacaagttactctaaaattgccctggatgggaaaacaactatctcttctacatctgagtatgagagaaatcgtggtgaaaggagaagtcataaaaagttcaaaccaaatgtcaccagaggtcgtggatcaaaacgagttcggggtaagacctctaagaaggaacctagagcttccaaggccatgctggtgactcttcgggcttcccaggaagaagatgatgatgctgacgattttgagtctgactatgaggaagaaagctatcatcttgctcccgaagaagtaaacaaagctccagtatttgtacctgttggtctcagatctcctgaacctgtttctgctcagattgaggaaacaatggaagagcttgaaataactgtgaatgtcccagatgtaggatgcatagctgttgttgaacatgagctaccaaacacagatgtgactactgaagaaatgaaacaagaagaaaatttgagtgtaccgtttgaaatgaccacaagtgaacatatccaagatgaaccaggtaccaatgatggaagcaccgaagctgcaataactttacttacaatgggagatctagtattgcagtcagagatcagtagtgaacagggtgatgtaggagtatgtataattcctcatgttcattcaaaggataaaagccatattccttctagcctagataatgtaaatcacaaaattgttcatgaatgtcaggaactttcttcacctgtcattactacatctcctgcatcatttgaagaaaacaagattgtattggaggaacaaagttccagagaagaaataagtttaatggagaaagtaaaggagaatgctacaccaaccaggaatacaatttctaaagtgaccagtaatttgagaataagaagtaggcttgctaagcctaaaccaaatcttgagaagactttagggaccaacaggcttgatgattatcaggaagtttccagtttgtgtgtaaccaaaggggcagaaatggaaactcaaagagaaacagagaaaaatgcttccaaagcaacagaattggaaaataaaaacctcggaccagttacaacagcagagaataaggatcagagcaaattggcatgtgtacatggtatcaaagggaccagtatttcttcagaagtaaacctaactgaaagaaacgaaaatcaagaagagagctctcaggaggttcacatgttgtcagttgctccagttgcttcctctgagacagggccctgcacacttggtttggataggggtcttggtgaaaattctgttgaagagccccagataaaggactctaaaggagacagtgtgcttacacttcctgtgccagagtatacaccaacaagtattccagaagtccaacaagagaatataatcaatcctcaagacctaacagtgaatctagttgctaatgtacctcaagatggagaagatgaacaagcctttattttaactctggtggaaatcccagccaatgcagtagaagaatttactgatgccactgcacagttcatgccaaaccctttactgccagctcccatattggtcaaatcagtgaataccgaagaaaggggtgacatgagtatttgtttaccagcaacttcagttggtcaagatgccatgggtttatctatttctggaagagataattctaaaaagccgcctgataatttggatcttgtatctaggaagagatttcaatgcaggcttgataaaaatgaccacattcctcctgccaaaaaacgttcactcactttaagagatgactgtcaagaatataccactgaggtgcactcaaaggaattaacaaatgtttttgaggaaacaggggagtctcacaagggacaagatatttttcttacctcaggaagcacactgacaactccagaacctcaaagacagcaagttgaagcagcttttcagagtagaggatctagatctcctgatgcatgcatggacaagaatgtgcctcagttacctcaggatgaaatgattgtgtctgataaggaagaaagaactgatgctgctcctaagtctcagcaaatggatagcagaacatcgtcttctaaagcctcactatccagacctggcagaagacccctgggatttttatctttaatatgctcaaagaatagtttggagtctgatgaacctatgcaagtccatagtaagaaacgcctaaaacctcttatacctggattaagaaagaaattgaaaagatctaatccattcaatgaaagccaggaaaaaaatcgagagtcctctgatctgcttccatctccaagtgttattactactcaatctgagaatattagcagctcagcaactcaggtttcttgtgatcagcccttactgaaagaaggatataaaagtgcccaaaagcgggcccctcaaggggaggcaaccacagtctctgaatatttcttcaatgatatcttcattgaagtggatgaaacagaataaaacaatcttttctctttttcttttttaaattaggtctaggatttccagagtcaattacatcaacaaaacagtatttagagcaaaatatcactg

SEQ ID NO: 11244 - protein, 2624 aa, Homo sapiens; identical to SEQ ID NO: 1038

SEQ ID NO: 11245 - DNA, 683 bp, Homo sapiens
gtgtgtggcagggtcatgaaaaagcggcggcggcgggagagaggaggaggcggcggcggggcagtgaaactacggtagctgccccctgagctggtggtgtggctttgtggggagggcgtagttcctaatcccctttccgggcagccgccggggctcggggctgtgagcggccgtgaggctgcctccccgggccccctgcctccgccatgttccgcagggcacgccttagcgtgaagccgaatgtcaggcctggtgtaggcgccaggggctccacagcttccaatccccagcgtggacgggagtctcccaggccgccggatcctgccacggactctgcttccaagcccgcggagcccacagatgtgcccacagtcgatttcggtggagcggagccccaagaaaaggctcctaggagcagtactgaaaagactggtggtgacaatgatgttgaagaatccagtagatcttcctctactgtttcacagagaagaaagcgaatatcaagtacttctagcctggttaagtctagtgtcagtgttccttcagaatctcatcccttatctacaattaatcaagaggctccacagccaactgccacttcaacaaaagagaaacagccatgctcagacagataccgaatatacaaagcccagaaactgagggaaatgttaaaagaagaattg

SEQ ID NO: 11246 - protein, 158 aa, Homo sapiens
MFRRARLSVKPNVRPGVGARGSTASNPQRGRESPRPPDPATDSASKPAEPTDVPTVDFGGAEPQEKAPRSSTEKTGGDNDVEESSRSSSTVSQRRKRISSTSSLVKSSVSVPSESHPLSTINQEAPQPTATSTKEKQPCSDRYRIYKAQKLREMLKEE

SEQ ID NO: 11247 - DNA, 2225 bp, Homo sapiens
gcatgttgctatccatttgtcctatcaccatttattcgaaaagactattctttccccattgaatagtcttggcacccttatcaaaaatcagctgaccatagatgtatgggtttatttctgaattctcaattctgttgcatagatctatatgtctgttctcatgctggtgatgctatattgattactgttactttgtagtaagttttttttttgttgttgttgttgagatggagtctcgtctgtcgcccaggatggagtgcagtggcatgatctcagctcactgcaagctccgcctcctgggttcacaccattctcctgcctcagcttcccaagtagctgggactacaggcgcccaccacattttgagacggagttttcctcttgttgcccaggctggagtgcaatggcgcgatcttggctcaccacaacctctgtctccctggttcaagcaattctcctgtctcagcttcccgagtagctgggattacaggcatatgccaccaggaggctgaggcaggagcagagcaagactctgttcaaagccaaaaaaccaaaaaaccaaaaaaaaaaaaaaaaaaaaaaagaaccagaaccaaaccatgggaataaaagtaacttaaaaatttcaagacatcagatacaggactgtgactccatattgccagttaatatagtggaatgttaagatgatacccaagacagtcaaagcctcccataattcaatatcgcacactgttttctggttgtaccaaaaaataaacaactggaaaatgatttttacccttaaaagcatgtacacttaaaaaatgggatgaggtgggatttccttcttcttaaaaatgtttctagagttactaaaaaacttgcatttgtgaaatagttgagaaaaatattcctctggaatgtacaagaagggagacaggtactattggtaagacatagtatatgatattaatcagacttggctttttttctctctgggcttcatcagaggctggactttccttggtttttgtttctctgttttctgtaggtaaatctgatttcttggttagccactttggtttgttttccctttgttccccgtttttctcttgtttgcactttttttgtctggagatttatcctttcctgctgccttttttggctttgtttccacttttgcaggagcaggtttagctgacagtcatactaatctcatcttgggctctttccttcaccgcccttctgctgagctgatcttcctcttgggcatcttgtggtcaggagtgtgcatgctgggtgcctgtgagccgcaccatgctgagagccttctcaaagctgggctgcctggctgctaccactcctcccatcctgtcttatcattaagtatgatgttaccatggatttttcataaacgtcctttaccaggctaaagaagttactttctattcctagtttgttgaatgtttctttcattaaagggtgttggaatttgtcatatgctttttctgcatttatggagatgatcatgtgaattttgtttttcattgtattttttggacgttaaaccaaccttgcttccccaggataaattctaggatcataatgtctaatttttattcattgttggattcagcttgctagtattttattggtgatttttatgtccatattcataatagatattggtctgtacttttcttgtgatgtcaggagatgaagtcctactcccctagggaaaaatgctctccaggtgggaccttggggactgggggccttgtatttttgggtgcagcagtttgaggtggagtctctgccatgctgagctgggaggaaggagagagaaagagcagtgttagttcacatagactctcacctttgttagcaaattttcagattttcttgaacagatatttcttcatttgctttttgtcgttaggatcagtttcagaggcttttaaatgttttgtttttaaaatcagtttcactgaggagtgggtcagtgaagcttctcaagctgtcgctctggacattggttctgtaacttcttaatttattaaaatgcatttaagttttaagctacgtagtagtataaaaattttgcaataccctttaggccttggtttccattgggtaaaaattggcagcagatatgactagagttgaaggattatgaaaatgaagaagtaaagtaagaatggtagacgtacataacaaaatgataagagttaaaatttgcacat

SEQ ID NO: 11248 - protein, 94 aa, Homo sapiens [sequence omitted]

SEQ ID NO: 11249 - DNA, 2124 bp, Homo sapiens
acaggcctgagaatcagagaaaccttctctggggctgcaaggacctgagctcagcttccgccccagccagggaagcggcaggggaaagcaccggctccaggccagcgtgggccgctctctcgctcggtgcccgccgccatgtgggccgtcctgaggttagccctgcggccgtgtgcccgcgcctctcccgccgggccgcgcgcctatcacggggactcggtggcctcgctgggcacccagccggacttgggctctgccctctaccaggagaactacaagcagatgaaagcactagtaaatcagctccatgaacgagtggagcatataaaactaggaggtggtgagaaagcccgagcacttcacatatcaagaggaaaactattgcccagagaaagaattgacaatctcatagacccagggtctccatttctggaattatcccagtttgcaggttaccagttatatgacaatgaggaggtgccaggaggtggcattattacaggcattggaagagtatcaggagtagaatgcatgattattgccaatgatgccaccgtcaaaggaggtgcctactacccagtgactgtgaaaaaacaattacgggcccaagaaattgccatgcaaaacaggctcccctgcatctacttagttgattcgggaggagcatacttacctcgacaagcagatgtgtttccagatcgagaccactttggccgtacattctataatcaggcaattatgtcttctaaaaatattgcacaggttaaagcggcaactggggaagaagtatctgctgaggatcttggaggtgctgatcttcattgcagaaagtctggagtaagtgaccactgggctttggatgatcatcatgcccttcacttaactaggaaggttgtgaggaatctaaattatcagaagaaattggatgtcaccattgaaccttctgaagagcctttatttcctgctgatgaattgtatggaatagttggtgctaaccttaagaggagctttgatgtccgagaggtcattgctagaatcgtggatggaagcagattcactgagttcaaagccttttatggagacacattagttacaggtataaagcccttggaaaagcacaagacataaatcttctttgaactttcttttgaggatttgctcgaatatttgggtacccagtaggtatcgttggaaacaacggagttctcttttctgaatctgcaaaaaagggtactcactttgtccagttatgctgccaaagaaatattcctctgctgttccttcaaaacattactggatttatggttggtagagagtatgaagctgaaggaattgccaaggatggtgccaagatggtggccgctgtggcctgtgcccaagtgcctaagataaccctcatcattgggggctcctatggagccggaaactatgggatgtgtggcagagcatatagcccaagatttctctacatttggccaaatgctcgtatctcagtgatgggaggagagcaggcagccaatgtgttggccacgataacaaaggaccaaagagcccgggaaggaaagcagttctccagtgctgatgaagcggctttaaaagagcccatcattaagaagtttgaagaggaaggaaacccttactattccagcgcaagggtatgggatgatgggatcattgatccagcagacaccagactggtcttgggtctcagttttagtgcagccctcaacgcaccaatagagaagactgacttcggtatcttcaggatgtaactggaataaaggatgttttctgttggacatgtactgaaaattaacacatgtagtagccttaaaattttagacttctcgaacatgaggctgttacagtaatttttttaacactgtgcattgtacttttctaccttaaaaaaatcagtgaggatatttatttaatgaacatcaattccttttaaattttcttagagaaatttctctgtggctcagttttaccacccataaagcggagacagtaatttacggttatcctttctgacccacaaagtatgaaaagttctgtaatctgtaaactcagttctgtaatctgtattattgagatgattaatataaagttgtattttcactg

SEQ ID NO: 11250 - protein, 329 aa, Homo sapiens
MWAVLRLALRPCARASPAGPRAYHGDSVASLGTQPDLGSALYQENYKQMKALVNQLHERVEHIKLGGGEKARALHISRGKLLPRERIDNLIDPGSPFLELSQFAGYQLYDNEEVPGGGIITGIGRVSGVECMIIANDATVKGGAYYPVTVKKQLRAQEIAMQNRLPCIYLVDSGGAYLPRQADVFPDRDHFGRTFYNQAIMSSKNIAQVKAATGEEVSAEDLGGADLHCRKSGVSDHWALDDHHALHLTRKVVRNLNYQKKLDVTIEPSEEPLFPADELYGIVGANLKRSFDVREVIARIVDGSRFTEFKAFYGDTLVTGIKPLEKHKT

SEQ ID NO: 11251 - DNA, 2173 bp, Homo sapiens
agaatcagagaaaccttctctggggctgcaaggacctgagctcagcttccgccccagccagggaagcggcaggggaaagcaccggctccaggccagcgtgggccgctctctcgctcggtgcccgccgccatgtgggccgtcctgaggttagccctgcggccgtgtgcccgcgcctctcccgccgggccgcgcgcctatcacggggactcggtggcctcgctgggcacccagccggacttgggctctgccctctaccaggagaactacaagcagatgaaagcactagtaaatcagctccatgaacgagtggagcatataaaactaggaggtggtgagaaagcccgagcacttcacatatcaagaggaaaactattgcccagagaaagaattgacaatctcatagacccagggtctccatttctggaattatcccagtttgcaggttaccagttatatgacaatgaggaggtgccaggaggtggcattattacaggcattggaagagtatcaggagtagaatgcatgattattgccaatgatgccaccgtcaaaggaggtgcctactacccagtgactgtgaaaaaacaattacgggcccaagaaattgccatgcaaaacaggctcccctgcatctacttagttgattcgggaggagcatacttacctcgacaagcagatgtgtttccagatcgagaccactttggccgtacattctataatcaggcaattatgtcttctaaaaatattgcacagatcgcagtggtcatgggctcctgcaccgcaggaggagcctatgtgcctgccatggctgatgaaaacatcattgtacgcaagcagggtaccattttcttggcaggaccccccttggttaaagcggcaactggggaagaagtatctgctgaggatcttggaggtgctgatcttcattgcagaaagtctggagtaagtgaccactgggctttggatgatcatcatgcccttcacttaactaggaaggttgtgaggaatctaaattatcagaagaaattggatgtcaccattgaaccttctgaagagcctttatttcctgctgatgaattgtatggaatagttggtgctaaccttaagaggagctttgatgtccgagaggtcattgctagaatcgtggatggaagcagattcactgagttcaaagccttttatggagacacattagttacaggatttgctcgaatatttgggtacccagtaggtatcgttggaaacaacggagttctcttttctgaatctgcaaaaaagggtactcactttgtccagttatgctgccaaagaaatattcctctgctgttccttcaaaacattactggatttatggttggtagagagtatgaagctgaaggaattgccaaggatggtgccaagatggtggccgctgtggcctgtgcccaagtgcctaagataaccctcatcattgggggctcctatggagccggaaactatgggatgtgtggcagagcatatagcccaagatttctctacatttggccaaatgctcgtatctcagtgatgggaggagagcaggcagccaatgtgttggccacgataacaaaggaccaaagagcccgggaaggaaagcagttctccagtgctgatgaagcggctttaaaagagcccatcattaagaagtttgaagaggaaggaaacccttactattccagcgcaagggtatgggatgatgggatcattgatccagcagacaccagactggtcttgggtctcagttttagtgcagccctcaacgcaccaatagagaagactgacttcggtatcttcaggatgtaactggaataaaggatgttttctgttggacatgtactgaaaattaacacatgtagtagccttaaaattttagacttctcgaacatgaggctgttacagtaatttttttaacactgtgcattgtacttttctaccttaaaaaaatcagtgaggatatttatttaatgaacatcaattccttttaaattttcttagagaaatttctctgtggctcagttttaccacccataaagcggagacagtaatttacggttatcctttctgacccacaaagtatgaaaagttctgtaatctgtaaactcagttctgtaatctgtattattgagatgattaatataaagttgtattttcactg

SEQ ID NO: 11252 - protein, 563 aa, Homo sapiens; identical to SEQ ID NO: 1040

SEQ ID NO: 11253 - DNA, 3667 bp, Homo sapiens
agaatcagagaaaccttctctggggctgcaaggacctgagctcagcttccgccccagccagggaagcggcaggggaaagcaccggctccaggccagcgtgggccgctctctcgctcggtgcccgccgccatgtgggccgtcctgaggttagccctgcggccgtgtgcccgcgcctctcccgccgggccgcgcgcctatcacggggactcggtggcctcgctgggcacccagccggacttgggctctgccctctaccaggagaactacaagcagatgaaagcactagtaaatcagctccatgaacgagtggagcatataaaactaggaggtggtgagaaagcccgagcacttcacatatcaagaggaaaactattgcccagagaaagaattgacaatctcatagacccagggtctccatttctggaattatcccagtttgcaggttaccagttatatgacaatgaggaggtgccaggaggtggcattattacaggcattggaagagtatcaggagtagaatgcatgattattgccaatgatgccaccgtcaaaggaggtgcctactacccagtgactgtgaaaaaacaattacgggcccaagaaattgccatgcaaaacaggctcccctgcatctacttagttgattcgggaggagcatacttacctcgacaagcagatgtgtttccagatcgagaccactttggccgtacattctataatcaggcaattatgtcttctaaaaatattgcacagatcgcagtggtcatgggctcctgcaccgcaggaggagcctatgtgcctgccatggctgatgaaaacatcattgtacgcaagcagggtaccattttcttggcaggaccccccttggttaaagcggcaactggggaagaagtatctgctgaggatcttggaggtgctgatcttcattgcagaaagtctggagtaagtgaccactgggctttggatgatcatcatgcccttcacttaactaggaaggttgtgaggaatctaaattatcagaagaaattggatgtcaccattgaaccttctgaagagcctttatttcctgctgatgaattgtatggaatagttggtgctaaccttaagaggagctttgatgtccgagaggtcattgctagaatcgtggatggaagcagattcactgagttcaaagccttttatggagacacattagttacaggatttgctcgaatatttgggtacccagtaggtatcgttggaaacaacggagttctcttttctgaatctgcaaaaaagggtactcactttgtccagttatgctgccaaagaaatattcctctgctgttccttcaaaacattactggatttatggttggtagagagtatgaagctgaaggaattgccaaggatggtgccaagatggtggccgctgtggcctgtgcccaagtgcctaagataaccctcatcattgggggctcctatggagccggaaactatgggatgtgtggcagagcatatagcccaagatttctctacatttggccaaatgctcgtatctcagtgatgggaggagagcaggcagccaatgtgttggccacgataacaaaggaccaaagagcccgggaaggaaagcagttctccagtgctgatgaagcggctttaaaagagcccatcattaagaagtttgaagaggaaggaaacccttactattccagcgcaagggtatgggatgatgggatcattgatccagcagacaccagactggtcttgggtctcagttttagtgcagccctcaacgcaccaatagagaagactgacttcggtatcttcaggatgtaactggaataaaggatgttttctgttggacatgtactgaaaattaacacatgtagtagccttaaaattttagacttctcgaacatgaggctgttacagtaatttttttaacactgtgcattgtacttttctaccttaaaaaaatcagtgaggatatttatttaatgaacatcaattccttttaaattttcttagagaaatttctctgtggctcagttttaccacccataaagcggagacagtaatttacggttatcctttctgacccacaaagtatgaaaagttctgtaatctgtaaactcagttctgtaatctgtattattgagatgattaatataaagttgtattttcactgaaatgattgttttgctggttatgcttggtgatattttagcgggcttatttttgaaaggcatctgttacttcagtggcataaagtgccctcacactgctgtgcagccatcaccaccattcatctccagaatttgttctcagtcccaaactgaaactataccattcaaacaacagcgctccccatttccccctcccccgagcccatgacatctccttattattattttttttttgagacagggtgtttctctgttgcccaggctggagtgcggtggtgtgatctcggctcactgcagcttccacctcccgggttcaagcgattcttgtgcctcagcctcccaagcagctgggactataggcacgcaccaccacacccagctaagttctgtatttttagcagagacgggatttcactaggttgcccaggctggtctcaaactactgacctcaagtgatccacccgcctcggcctcccaaagtgctgggattacaggtgtgagccaccgcgcctgaccacatctccttattcttaaatgtatgtgtttctcatggtttgatttattcttgctgggccatttcagcccctgtcatggcttcactcgccatctaaatgcagatgattactgccttgacggttcttaacccagctctcccctgagctgcaggcctgcatatccagtaggtctactggacatctgtactggttgttgtggaggaacctctggcttgctcattaagtcctactgattttcactatcccctgaatttccccacttatttttgtctttcactatcgcaggccttagaagaggtctacctgcctccagtcttacctagtccagtctaccccctggagttagaatggccatcctgaagtgaaaagtaatgtcagattactcccttcagtgatttcttgtagaagtgccaatccctgaatgccaccaagatcttaatcttcacatctttaatcttatctctttgactcctctttacaccggagaacggctccagctgttctagctctctttcagttctttgaaccttcccaccttagggtctataaggttccctctgcccaaattgttctactctcccttcttcttcaacacatccttcagtttaagcacttgcttctctcagtttaaactccacttccttagggatgtctctgtgacctccctgtgctggattagcttccctactctatgctcttgtaaaacactatctacttcctttgtcataaactcatcattttcctataaacattaatattgtcctcctgctagaatgtaagctccgtgagagcaaggatcctcctgtttaccctgtacctccaatgtctggcacttgtaggtgctcaaatattcgttgaatgaatgaaaaatccatattgtaattgatgtcctctggccacatagttttaaaattaggtgattgattatatgaccgaatagaactatcaaatgttttcctaataaagtcaatatttcaaaca

SEQ ID NO: 11254 - protein, 563 aa, Homo sapiens; identical to SEQ ID NO: 1040

SEQ ID NO: 11255 - DNA, 791 bp, Homo sapiens
aaaaggaattgctttctaatatttctctcccctgtctcctctatttctgttttaggagaactacaagcagatgaaagcactagtaaatcagctccatgaacgagtggagcatataaaactaggaggtggtgagaaagcccgagcacttcacatatcaagaggaaaactattgcccagagaaagaattgacaatctcatagacccagggtctccatttctggaattatcccagtttgcaggttaccagttatatgacaatgaggaggtgccaggaggtggcattattacaggcattggaagagtatcaggagtagaatgcatgattattgccaatgatgccaccgtcaaaggaggtgcctactacccagtgactgtgaaaaaacaattacgggcccaagaaattgccatgcaaaacaggctcccctgcatctacttaggcaagtcaccagagtggtaaaataaactattattagctggtaaaatgcaagatagtttggaaggctgtatgtattacatttgggatgggtattttataaacctgttgatttctcctgtaattataaaggaaacacaggttctttgctgaaaactctgggggaaagtaaacaagaactgttcatagtactagtgcataatactcatacattttgacgcatgccagtttttttctctatgtgttgtgtggttttttttttttgttctctagatcctgtttttcttttaactttatggatcatactatgaaaaaaatagtagcaagtatttatagatctcttgagtgccaggtactg

SEQ ID NO: 11256 - protein, 128 aa, Homo sapiens
MKALVNQLHERVEHIKLGGGEKARALHISRGKLLPRERIDNLIDPGSPFLELSQFAGYQLYDNEEVPGGGIITGIGRVSGVECMIIANDATVKGGAYYPVTVKKQLRAQEIAMQNRLPCIYLGKSPEW

SEQ ID NO: 11257 - DNA, 466 bp, Homo sapiens
ggatttatggttggtagagagtatgaagctgaaggaattgccaaggatggtgccaagatggtggccgctgtggcctgtgcccaagtgcctaagataaccctcatcattgggggctcctatggagccggaaactatgggatgtgtggcagagcatataggtaggtcttccctactctatgctcttgtaaaacactatctacttcctttgtcataaactcatcattttcctataaacattaatattgtcctcctgctagaatgtaagctccgtgagagcaaggatcctcctgtttaccctgtacctccaatgtctggcacttgtaggtgctcaaatattcgttgaatgaatgaaaaatccatattgtaattgatgtcctctggccacatagttttaaaattaggtgattgattatatgaccgaatagaactatcaaatgttttcctaataaagtcaatatttcaaaca

SEQ ID NO: 11258 - protein, 31 aa, Homo sapiens [sequence omitted]

SEQ ID NO: 11259 - DNA, 527 bp, Homo sapiens
cagactggtcttgggtctcagttttagtgcagccctcaacgcaccaatagagaagactgacttcggtatcttcaggatgtaactggaataaaggatgttttctgttggacatgtactgaaaattaacacatgtagtagccttaaaattttagacttctcgaacatgaggctgttacagtaatttttttaacactgtgcattgtacttttctaccttaaaaaaatcagtgaggatatttatttaatgaacatcaattccttttaaattttcttagagaaatttctctgtggctcagtattaatattgtcctcctgctagaatgtaagctccgtgagagcaaggatcctcctgtttaccctgtacctccaatgtctggcacttgtaggtgctcaaatattcgttgaatgaatgaaaaatccatattgtaattgatgtcctctggccacatagttttaaaattaggtgattgattatatgaccgaatagaactatcaaatgttttcctaataaagtcaatatttcaaaca

SEQ ID NO: 11260 - DNA, 640 bp, Homo sapiens
ggttgacccgggccctcctccacacccccttccttcttcgcctcctccctctttcctgcacgggggctcgggctcactataaaaggtgggagcgcgtggtgccccagcaacgacgagtttcagaacgatggagagctcccgcgtgaggctgctgcccctcctgggcgccgccctgctgctgatgctacctctgttgggtacccgtgcccaggaggacgccgagctccagccccgagccctggacatctactctgccgtggatgatgcctcccacgagaaggagctgatcgaagcgctgcaagaagtcttgaagaagctcaagagtaaacgtgttcccatctatgagaagaagtatggccaagtccccatgtgtgacgccggtgagcagtgtgcagtgaggaaaggggcaaggatcgggaagctgtgtgactgtccccgaggaacctcctgcaattccttcctcctgaagtgcttatgaaggggcgtccattctcctccatacatccccatccctctactttccccagaggaccacaccttcctccctggagtttggcttaagcaacagataaagtttttattttcctctgaagggaaagggctcttttcctgctgtttcaaaaataaaagaacacattag

SEQ ID NO: 11261 - protein, 116 aa, Homo sapiens; identical to SEQ ID NO: 1042

SEQ ID NO: 11262 - DNA, 911 bp, Homo sapiens
ggttgacccgggccctcctccacacccccttccttcttcgcctcctccctctttcctgcacgggggctcgggctcactataaaaggtgggagcgcgtggtgccccagcaacgacgagtttcagaacgatggagagctcccgcgtgaggctgctgcccctcctgggcgccgccctgctgctgatgctacctctgttgggtacccgtgcccaggaggacgccgagctccagccccgagccctggacatctactctgccgtggatgatgcctcccacgagaaggagctgatcgaagcgctgcaagaagtcttgaagaagctcaagagtaaacgtgttcccatctatgagaagaagtatggccaagtccccatgtgtgacgccggtgagcagtgtgcagtgaggaaaggggcaaggatcgggaagctgtgtgactgtccccgaggaacctcctgcaattccttcctcctgaagtgcttatgaaggggcgtccattctcctccatacatccccatccctctactttccccagaggaccacaccttcctccctggagtttggcttaagcaacagataaagtttttattttcctctgaagggaaagggctcttttcctgctgtttcaaaaataaaagaacacattagatgttactgtgtgaagaataatgccttgtatggtgttgatacgtgtgtgaagtattcttattttatttgtctgacaaactcttgtgtacctttgtgtaaagaagggaagctttgtttgaaaattgtatttttgtatgtggcatggcagaatgaaaattagatctagctaatctcggtagatgtcattacaacctggaaaataaatcaccctaagtgacacaaattgaagcatgtacaaattatacataataaagtgtttttaataattgcc

SEQ ID NO: 11263 - protein, 116 aa, Homo sapiens; identical to SEQ ID NO: 1042

SEQ ID NO: 11264 - DNA, 1143 bp, Homo sapiens
gggtacccgtgcccaggaggacgccgagctccagccccgagccctggacatctactctgccgtggatgatgcctcccacgagaaggagctggtcggtattcccctcgctctcgacccccttgagctgtcgccttgtctcttctcttgcacgcctccctcctccccccacccccactcctattcccagagtcagggcgcggggagctgagcgcaacgcccaggcacccactgccatccgaagagcgtctcgagctcacgggctcctggcagtctgttgagcgaatccctcatcccggcccctctgagcaacagggaccccagcggctcagagacccgcggtcagtacctgggacagcgtccgctaagtttccacccctcgaccattccctgtgtccgcggagtcccaccgcagagtgcgtgtgggtccggggctccttataactagggctggaagtgcgcacctgggctgggctcgcagccaaggcggcaacttcaggctccgaagcggtgtgttgcagatcgaagcgctgcaagaagtcttgaagaagctcaagagtaaacgtgttcccatctatgagaagaagtatggccaagtccccatgtgtgacgccggtgagcagtgtgcagtgaggaaaggggcaaggatcgggaagctgtgtgactgtccccgaggaacctcctgcaattccttcctcctgaagtgcttatgaaggggcgtccattctcctccatacatccccatccctctactttccccagaggaccacaccttcctccctggagtttggcttaagcaacagataaagtttttattttcctctgaagggaaagggctcttttcctgctgtttcaaaaataaaagaacacattagatgttactgtgtgaagaataatgccttgtatggtgttgatacgtgtgtgaagtattcttattttatttgtctgacaaactcttgtgtacctttgtgtaaagaagggaagctttgtttgaaaattgtatttttgtatgtggcatggcagaatgaaaattagatctagctaatctcggtagatgtcattacaacctggaaaataaatcaccctaagtgacacaaattgaagcatgtacaaattatacataataaagtgtttttaataattgcc

SEQ ID NO: 11265 - protein, 36 aa, Homo sapiens
MCDAGEQCAVRKGARIGKLCDCPRGTSCNSFLLKCL

SEQ ID NO: 11266 - DNA, 8140 bp, Homo sapiens
gcgcaagatggcggcccccttggaactcagttgctggggaggcggctggggactcccatcggttcacagcgagtccctggtggtgatggcgatgtaccaattttgacaactgaagacgacatggtttctcagccagcaaaaatactaaactttttaagaaaacagaaatataatgctgattatgaactctcagcaaaacaaggggcagatacattggcttatattgctctcctcgaagagaagcttctccctgcagtgcttcacacattctgggttgagagtgacaattactttactgtgacaaagccatggtttgcttcacaaattccttttcctttgagtttgatcctgcctggaagaatgtctaagggagcactgaataggattctcctgaccagaggacagcctcccctctaccacctccgagaagtggaagcacagatatacagagatgccaaggagtgcctaaatcttctatcaaacagattgggaacatctcagtttttctttggagatacgccttctaccttggatgcctatgtttttggttttcttgcacctctttacaaagtacggtttcctaaagttcagctacaagaacatctgaaacagctctccaacctctgtcgcttttgtgatgacatcctgagcagttattttaggcttagtcttggaggcatctctccagctggacaagaaacggtagatgcaaatctgcagaaactcacacaacttgtaaataaggaatccaacttgattgaaaagatggatgacaatcttcgccaaagccctcagcttcctcctcggaaactgccaacacttaaattgactccagcagaagaagaaaataattccttccaacggctttcgccctgagagtagtcatggtttgtggccaaagtcaaacgattgttgcagtaatctcttacaccaagtgtgtgaaggcaaaaagaagataccataataggtattaaggaagactctaaaccaaaaggaactttctatgccatctatttttactattattattaggaagcttgtattctagcttggcactgcatttttaataacaaagagaatgctaaatgaacttggttgggggggcggggaagaaaaacacatcgtactgtatacaaagaactgccttaatcatggcagatttttgcctttggttcacatgttgctgaccaaaggctacaattctgttctgaatgtgcactcctaatttatttgatttaatttattcaatttattaacttagttttcttagaccaggctgaatacctaatatgtggctttttggctgaggctttttacttctgtttagaaatttgatgcctattttaggaaccagaaaaagataaattgcttcagtagaagagaccatatttaactttaaaaagtgaggaggaatgtgctttttaattatgctctcataagtctaatcttttgggggtttagtagcacatagataaatattaaaggtggttacatataataacatctgataatactcatttcagtataacattggtctttgctgatgtgttcgatataggttaggaagagttcttttagtttacttgggcaaatgtggcagttttagacctatgtctttgtagtacatcttcagttgtctttcttgtattaattccagaagaagtgaatgtactggttatcgttactatgctaggctgtaaaattcttactgaaattgcccacttgttagacactactcaggaggagcccatggccagggtagtagaaatactgtgcatctggtccaagttttctatgcttggctcatattctttcataagatgcatattctttcataagatgcatatcatgtagtcaaaagctttctgacaaccaattatttttcatatgtttcacttatagtcgaagaatacaaaggaacaatcagaaatagcagcttttaatgaatattttctatttattggttgctgaactgttaagggatttgctgtgtggtaattttacttataatagaaacttgcttattttagtggttgaggtgcttctgttgtcctaaaactacttctgaggtttttaaaatgtagaaccatgtttttgattagtgtcttaaaagattactgtggtgctcagcaaatcttatcaagtcgtgcaggaacccatatgttaagaaaatgagctttgtagtcaaaagactcatctaatttgagctgagtggagctcagctgtgtttgacccacatcctcccaatttgttctgtatttaggtagttatttatacaagagtctttaagtcattctaaatattttttcttgaaagttttaactaagtgagaaataaggtagtcttcaaaatcttggtcatctgtttggatgagggaaagtacctcatgagttgcacattacttctacaacagggtgtgtgtgtgtgtgtttgtgtgtgtcagtcatcttcaaaggcagattattagattccagcaatctgaaatctattattccagcagtctgaaacctaaatatgttatattggaaatcatgactgtgagactttattgtcctctaggatggatgtatattggagaagggtggttagcacattcatcagacatctgcttatgctgtggtcaaggccagtcatttttaatttatatcagatttatatcagaccctccaaaaagtatttgaaatatattacagttataacgtacaagtacattacatgtatattacaagtatattacatgtaaaacaggacaatttaaaaattttaaattttaaagaattaaaaattttaaaaatttaaattaaaaaaattaaaaatttatagaaccatatcaacactgacagattctaaaattaagtagtaaatttaactccaagtttctccatgggcaaagtcaaaagataatgctaggttatgtcaatttttcttttcaacaaaactgctaatgtctattaggaagaaaaatgtgtttaaagttttacaggaacgtggagctcatgttcttctgatatgtagactttgataaagaagcatactgtaatgttttatgaactgaaattttaatcaaaagaggtcattttagaataacaagtattattcttttttagtagagggaatgactgtcaatatgatttatttgtttttgtgtcatccctactttgaactgctgttagccttacattctcactatagtccataatgcttccagatcaccttttctaagatgcaacatgtgagtttagtgagagtttatatgttgggttacttagttgagctatttatgtataagtaaatgagatgacaggaagctgtaactgagcacaaagtactttagggagcagccacacatacaggaagctcttagaaaagaacttttttttttttttgagacagagtttcactcttgttgcccaggctggagtgcagtagcgcagtctcggctcactgcaacctctacctcctgggttcaagcaagtctcctgtctcagcctcccaagtagctgggattacaggcatgtgccaccatgcccagctaattttgttttttttttagtcgagacggggtttcaccatgttgctcaggctggtcttgaactcctgacctcaagtgattcacctgcctcggcctcccaaagtgctgggattacaggcgtgagccactgcgcccggccaaaaagaacattttgtcaatctgaacagagcacagaacattttttcagactgaacagactgttggaccagcctgtcatgatatgttttagataaagtttgagtgagttcattgggataaatggtccacaatcttaaacagaatactgtgagccaatgccttttggaagtaatggtggaggataatatgattaaagggaacatgcttgtgtttatttttgttggtagtatatgattagaaaaactagataattcccataagatgaagatcttccatgaacaaactaccatcaatcatccatcagattgattttttttttttttttaagtaacactaaagaagctgtaaagaacattgaaggtggtcattccttcaaaactgtgttttgaccacacaaggtgggcattaacaaaccaaatttcaacttaagtttgtttgtattatattgggggtgctgcgagactggagattttataaaagcaagcatttttatttccatttataatttctattcaatattgctagatatattaacatgaaggaatggggaagcttatttcaatcaaagctaaaattttcagaagtctgtaaaaatggaaaaacaccattgaaagaggcagaaacaggtaagggggatagtatcttagaaaacctgttggttaaggcagctgcatgtgataaaagtggtacttgaacttggtagtgtttccttagaacctcctccaaaaatatgcatttaccaggcttgttacaattttttgacagtttttcatcaactgtcaaaaacttcaacccttttaaaacctagatataaatgcttacatgtaaagaaaggaagctaagcagtgggtacctgggatctctctgaactatttttataacttcttgtgagtcttaagtatttcaaaataaaagtggttttaaagtaaattcatagattaaatgtatcattatctatatataaaccatgatttaaaactttaattttctaaacatagtattcaacttagttgaataaatatatgatagaagttaaatagaatttttatttcattcttaagaaaaactcatgtttgtaacaaatgatatctaaagatctattttgccttaccagaaaagaaaaaaaaaaccctaaaaccaaaaactccttttccctaggaagtcaaaaatgctgtgatttaaaatatctaattatatttttttctttctatggtagtggggtttacttctgaggataaaatattttgaaaaagctctgtcccttgacatggtagttctcccgtgccttgtacttgttctctctccatatgcacagtgtgacaagatgctcacctttaatgaagaaggtgtagcttttcgttttaagctgtaattgtctttgtcttgatttggctatttttataactgaaatcctgagcaacagagataatttgggtggtaatgatcatcttttgtatatgttcttgatgttaagaaatattttttgctgccattcagctttgtggaatttatgtttacttttcaatattttcatatttcttaaccagattttaaagaaatttgttgttagttacgtgaaatcaaaggtcaggtcagtaagcccattatcctcaaacttgaagtttcgttggatgttcaaaatgctaatttttgcagagatataaggataaattagttttagtttgtgttcttaagggtttgcaaaataatttggctcccaaactcttgttggggtgtagtgtttgctaggagcccaggatacctgccctggacttaaattgtgattgaagtggagaggtactctaggaatttaaaaagacacaaaattatttttttccagactagtgtgccatggatttctgataagaattaacattcttgaacaaaggtatcagaaagggtaactcgagttgaaggtttgtgaatagaaggggaaatgtgatagaagattattcagaacaaaataagtagacaaaataacaaaagacaggaaaataagtctctttgtatccttattaatcatttgaaattatgctataatattttttaaaactcacctgtttggttctgggtgaagcagttcctgaaggagtgttttgtcagaatatattgttaggagaatagagggttctgtggccaagtaagtttgggaaatagtgggttagacaaagttgagttactgttggcctttcagacctttgatacgctaatgtgcattttaaatctccaagaagcacctctattttatacatcatttccctaatttattttaatatggatttcttgtttttgttttcttgagacggagtcttggtcttgtcacccaggctggagtgcagtggcacgatctcggctcactacaacctccgcctcccaggttcaagcgattctcctgcctcagcctcccaatttactgggattacaggcacctgccaccacgcccagctaatttttgtatttttagtagagatggggtttcaccatgttgaccaggctgattttgaactcctgacctcaggtgattctgcccgcctcaccctcccacagtgctggaattataggtatgagccactgtccccggccagatttttttaaaagtaggtatcttgtgggatttatgttctgagagatacacctaaggaaatgctgccctacagtgtttttgctagttcatactcattacaaaggtttcttgttgttgggtgcccctctagccagtggtagtaaaatgggaagagacaggtcaagactcccttggaccatggcattgagagagggatggctgtcggcatagatatgttggttatttaggcatttgtgagggaggcccctggctcttccagcctgtttccttaggatcccagttggccgggaacagctgtacaagggtctgctgaactggtggtttcagcagactacccagttcctaagcatccatgagacagagggaaccaacttgtatttccagaacaattttccaaaccttttctggctgtactttaaaagtgccaaaaaggcaatgggtgtttatgacactaaagtcacatacaagctagtatgatacatacatcatagaaagcttatagttgctcagtgacaaagcaaaggaagtttaatattttccagttttgttcattaccgaagacagtctacggttcatagttttcactaaattctaagcagattctatatcctaaaacatttaaacctcactaggcctgcaattttgagagggttagctaaatatgtttggtatcacttcagagtctaaaaccagattactaatcgtgtgtaaggaggcattttgtgtgtctttgcaatgtatacaattggattatttggaacaccattttgaatgtgtatttgagagaaagctcgcctgtgggttttgagttgtggtgtaatggtgaacatgtagccacgtgaaaggccgttggatctttgttctgattcttcagtcgtcttcttgcaaattcagagaaatgtcttttaatcatttcgtttacatatcccagatccttggaaatcatgaaaaataacttgccagagtttgcatcagccctcagtaagtcatgaaccatagagaaggtcatggggccatttattctttggaccactggctacttctgaagttctggcttccttctctctaggaggagtcgtgtattcaagcttttaagttaaatgcataaaaatgagttttacttctcttctgacttgatttttaattttatgaaatgggaaataatgtttttccatttttctgttcattttgaagtgggaatttgaggtgtttgtaatgtcatgttactgttctgaaagattgacagtaaagaagacaagaaatatatgtatgtagtatgcatattagttttgtcccaccaagcctatctttgaatggcaaacattttaaaaacatctgttctagttgcacaactactctagcttctttataaagtaaacaatcttaaagtaagcaatgttggccataatttcaatattctagccttgccgagtgtgaatatattttactcagagactatgtacaaatacactaaagtggtgatggtgatcaatattgtaaagaatttattctgataaatgagaaactggatataatgtcaaaatagctattttctcaataaaaatctcaaatctcctgactgcttatgaattctcgatttaatgttatttattctttgaggtaaatcttttcatcgcgaagaattttttgctggttgaatgtggttgttcagggctgggactgagctatagacatagtgggtttttaaaaaatgtccattctttttttttttttttgagacagagttttgctcttatcacccaggctggagtgcaatggtgtgaactcggctcactgcaaccttcgccacctgggttcaagcaattctcctgccttagcctcccaagtagctgggattacaggcacctgccaccttacccggctaa

SEQ ID NO: 11267 - protein, 251 aa, Homo sapiens
MVSQPAKILNFLRKQKYNADYELSAKQGADTLAYIALLEEKLLPAVLHTFWVESDNYFTVTKPWFASQIPFPLSLILPGRMSKGALNRILLTRGQPPLYHLREVEAQIYRDAKECLNLLSNRLGTSQFFFGDTPSTLDAYVFGFLAPLYKVRFPKVQLQEHLKQLSNLCRFCDDILSSYFRLSLGGISPAGQETVDANLQKLTQLVNKESNLIEKMDDNLRQSPQLPPRKLPTLKLTPAEEENNSFQRLSP

SEQ ID NO: 11268 - DNA, 6467 bp, Homo sapiens
atagtaaaggtcggcccgcgcaagatggcggcccccttggaactcagttgctggggaggcggctggggactcccatcggttcacagcgagtccctggtggtgatggcttatgccaaattttctggtgcacccttgaaagtcaatgtgatagataacacctggagaggttcaagaggcgatgtaccaattttgacaactgaagacgacatggtttctcagccagcaaaaatactaaactttttaagaaaacagaaatataatgctgattatgaactctcagcaaaacaaggggcagatacattggcttatattgctctcctcgaagagaagcttctccctgcagtgcttcacacattctgggttgagagtgacaattactttactgtgacaaagccatggtttgcttcacaaattccttttcctttgagtttgatcctgcctggaagaatgtgctcagcaaatcttatcaagtcgtgcaggaacccatatgttaagaaaatgagctttgtagtcaaaagactcatctaatttgagctgagtggagctcagctgtgtttgacccacatcctcccaatttgttctgtatttaggtagttatttatacaagagtctttaagtcattctaaatattttttcttgaaagttttaactaagtgagaaataaggtagtcttcaaaatcttggtcatctgtttggatgagggaaagtacctcatgagttgcacattacttctacaacagggtgtgtgtgtgtgtgtttgtgtgtgtcagtcatcttcaaaggcagattattagattccagcaatctgaaatctattattccagcagtctgaaacctaaatatgttatattggaaatcatgactgtgagactttattgtcctctaggatggatgtatattggagaagggtggttagcacattcatcagacatctgcttatgctgtggtcaaggccagtcatttttaatttatatcagatttatatcagaccctccaaaaagtatttgaaatatattacagttataacgtacaagtacattacatgtatattacaagtatattacatgtaaaacaggacaatttaaaaattttaaattttaaagaattaaaaattttaaaaatttaaattaaaaaaattaaaaatttatagaaccatatcaacactgacagattctaaaattaagtagtaaatttaactccaagtttctccatgggcaaagtcaaaagataatgctaggttatgtcaatttttcttttcaacaaaactgctaatgtctattaggaagaaaaatgtgtttaaagttttacaggaacgtggagctcatgttcttctgatatgtagactttgataaagaagcatactgtaatgttttatgaactgaaattttaatcaaaagaggtcattttagaataacaagtattattcttttttagtagagggaatgactgtcaatatgatttatttgtttttgtgtcatccctactttgaactgctgttagccttacattctcactatagtccataatgcttccagatcaccttttctaagatgcaacatgtgagtttagtgagagtttatatgttgggttacttagttgagctatttatgtataagtaaatgagatgacaggaagctgtaactgagcacaaagtactttagggagcagccacacatacaggaagctcttagaaaagaacttttttttttttttgagacagagtttcactcttgttgcccaggctggagtgcagtagcgcagtctcggctcactgcaacctctacctcctgggttcaagcaagtctcctgtctcagcctcccaagtagctgggattacaggcatgtgccaccatgcccagctaattttgttttttttttagtcgagacggggtttcaccatgttgctcaggctggtcttgaactcctgacctcaagtgattcacctgcctcggcctcccaaagtgctgggattacaggcgtgagccactgcgcccggccaaaaagaacattttgtcaatctgaacagagcacagaacattttttcagactgaacagactgttggaccagcctgtcatgatatgttttagataaagtttgagtgagttcattgggataaatggtccacaatcttaaacagaatactgtgagccaatgccttttggaagtaatggtggaggataatatgattaaagggaacatgcttgtgtttatttttgttggtagtatatgattagaaaaactagataattcccataagatgaagatcttccatgaacaaactaccatcaatcatccatcagattgattttttttttttttttaagtaacactaaagaagctgtaaagaacattgaaggtggtcattccttcaaaactgtgttttgaccacacaaggtgggcattaacaaaccaaatttcaacttaagtttgtttgtattatattgggggtgctgcgagactggagattttataaaagcaagcatttttatttccatttataatttctattcaatattgctagatatattaacatgaaggaatggggaagcttatttcaatcaaagctaaaattttcagaagtctgtaaaaatggaaaaacaccattgaaagaggcagaaacaggtaagggggatagtatcttagaaaacctgttggttaaggcagctgcatgtgataaaagtggtacttgaacttggtagtgtttccttagaacctcctccaaaaatatgcatttaccaggcttgttacaattttttgacagtttttcatcaactgtcaaaaacttcaacccttttaaaacctagatataaatgcttacatgtaaagaaaggaagctaagcagtgggtacctgggatctctctgaactatttttataacttcttgtgagtcttaagtatttcaaaataaaagtggttttaaagtaaattcatagattaaatgtatcattatctatatataaaccatgatttaaaactttaattttctaaacatagtattcaacttagttgaataaatatatgatagaagttaaatagaatttttatttcattcttaagaaaaactcatgtttgtaacaaatgatatctaaagatctattttgccttaccagaaaagaaaaaaaaaaccctaaaaccaaaaactccttttccctaggaagtcaaaaatgctgtgatttaaaatatctaattatatttttttctttctatggtagtggggtttacttctgaggataaaatattttgaaaaagctctgtcccttgacatggtagttctcccgtgccttgtacttgttctctctccatatgcacagtgtgacaagatgctcacctttaatgaagaaggtgtagcttttcgttttaagctgtaattgtctttgtcttgatttggctatttttataactgaaatcctgagcaacagagataatttgggtggtaatgatcatcttttgtatatgttcttgatgttaagaaatattttttgctgccattcagctttgtggaatttatgtttacttttcaatattttcatatttcttaaccagattttaaagaaatttgttgttagttacgtgaaatcaaaggtcaggtcagtaagcccattatcctcaaacttgaagtttcgttggatgttcaaaatgctaatttttgcagagatataaggataaattagttttagtttgtgttcttaagggtttgcaaaataatttggctcccaaactcttgttggggtgtagtgtttgctaggagcccaggatacctgccctggacttaaattgtgattgaagtggagaggtactctaggaatttaaaaagacacaaaattatttttttccagactagtgtgccatggatttctgataagaattaacattcttgaacaaaggtatcagaaagggtaactcgagttgaaggtttgtgaatagaaggggaaatgtgatagaagattattcagaacaaaataagtagacaaaataacaaaagacaggaaaataagtctctttgtatccttattaatcatttgaaattatgctataatattttttaaaactcacctgtttggttctgggtgaagcagttcctgaaggagtgttttgtcagaatatattgttaggagaatagagggttctgtggccaagtaagtttgggaaatagtgggttagacaaagttgagttactgttggcctttcagacctttgatacgctaatgtgcattttaaatctccaagaagcacctctattttatacatcatttccctaatttattttaatatggatttcttgtttttgttttcttgagacggagtcttggtcttgtcacccaggctggagtgcagtggcacgatctcggctcactacaacctccgcctcccaggttcaagcgattctcctgcctcagcctcccaatttactgggattacaggcacctgccaccacgcccagctaatttttgtatttttagtagagatggggtttcaccatgttgaccaggctgattttgaactcctgacctcaggtgattctgcccgcctcaccctcccacagtgctggaattataggtatgagccactgtccccggccagatttttttaaaagtaggtatcttgtgggatttatgttctgagagatacacctaaggaaatgctgccctacagtgtttttgctagttcatactcattacaaaggtttcttgttgttgggtgcccctctagccagtggtagtaaaatgggaagagacaggtcaagactcccttggaccatggcattgagagagggatggctgtcggcatagatatgttggttatttaggcatttgtgagggaggcccctggctcttccagcctgtttccttaggatcccagttggccgggaacagctgtacaagggtctgctgaactggtggtttcagcagactacccagttcctaagcatccatgagacagagggaaccaacttgtatttccagaacaattttccaaaccttttctggctgtactttaaaagtgccaaaaaggcaatgggtgtttatgacactaaagtcacatacaagctagtatgatacatacatcatagaaagcttatagttgctcagtgacaaagcaaaggaagtttaatattttccagttttgttcattaccgaagacagtctacggttcatagttttcactaaattctaagcagattctatatcctaaaacatttaaacctcactaggcctgcaattttgagagggttagctaaatatgtttggtatcacttcagagtctaaaaccagattactaatcgtgtgtaaggaggcattttgtgtgtctttgcaatgtatacaattggattatttggaacaccattttgaatgtgtatttgagagaaagctcgcctgtgggttttgagttgtggtgtaatggtgaacatgtagccacgtgaaaggccgttggatctttgttctgattcttcagtcgtcttcttgcaaattcagagaaatgtcttttaatcatttcgtttacatatcccagatccttggaaatcatgaaaaataacttgccagagtttgcatcagccctcagtaagtcatgaaccatagagaaggtcatggggccatttattctttggaccactggctacttctgaagttctggcttccttctctctaggaggagtcgtgtattcaagcttttaagttaaatgcataaaaatgagttttacttctcttctgacttgatttttaattttatgaaatgggaaataatgtttttccatttttctgttcattttgaagtgggaatttgaggtgtttgtaatgtcatgttactgttctgaaagattgacagtaaagaagacaagaaatatatgtatgtagtatgcatattagttttgtcccaccaagcctatctttgaatggcaaacattttaaaaacatctgttctagttgcacaactactctagcttctttataaagtaaacaatcttaaagtaagcaatgttggccataatttcaatattctagccttgccgagtgtgaatatattttactcagagactatgtacaaatacactaaagtggtgatggtgatcaatattgtaaagaatttattctgataaatgagaaactggatataatgtcaaaatagctattttctcaataaaaatctcaaatctcctgactgcttatgaattctcgatttaatgttatttattctttgaggtaaatcttttcatcgcgaagaattttttgctggttgaatgtggttgttcagggctgggactgagctatagacatagtgggtttttaaaaaatgtccattctttttttttttttttgagacagagttttgctcttatcacccaggctggagtgcaatggtgtgaactcggctcactgcaaccttcgccacctgggttcaagcaattctcctgccttagcctcccaagtagctgggattacaggcacctgccaccttacccggctaa

SEQ ID NO: 11269 - protein, 167 aa, Homo sapiens
MAAPLELSCWGGGWGLPSVHSESLVVMAYAKFSGAPLKVNVIDNTWRGSRGDVPILTTEDDMVSQPAKILNFLRKQKYNADYELSAKQGADTLAYIALLEEKLLPAVLHTFWVESDNYFTVTKPWFASQIPFPLSLILPGRMCSANLIKSCRNPYVKKMSFVVKRLI

SEQ ID NO: 11270 - DNA, 7839 bp, Homo sapiens
gcgcaagatggcggcccccttggaactcagttgctggggaggcggctggggactcccatcggttcacagcgagtccctggtggtgatggcgatgtaccaattttgacaactgaagacgacatggtttctcagccagcaaaaatactaaactttttaagaaaacagaaatataatgctgattatgaactctcagcaaaacaaggggcagatacattggcttatattgctctcctcgaagagaagcttctccctgcagtgcttcacacattctgggttgagagtgacaattactttactgtgacaaagccatggtttgcttcacaaattccttttcctttgagtttgatcctgcctggaagaatgtctaagggagcactgaataggattctcctgaccagaggacagcctcccctctaccacctccgagaagtggaagcacagatatacagagatgccaaggagtgcctaaatcttctatcaaacagattgggaacatctcagtttttctttggagatacgccttctaccttggatgcctatgtttttggttttcttgcacctctttacaaagtacggtttcctaaagttcagctacaagaacatctgaaacagctctccaacctctgtcgcttttgtgatgacatcctgagcagttattttaggcttagtcttggaggcatctctccagctggacaagaaacggtagatgcaaatctgcagaaactcacacaacttgtaaataaggaatccaacttgattgaaaagatggatgacaatcttcgccaaagccctcagcttcctcctcggaaactgccaacacttaaattgactccagcagaagaagaaaataattccttccaacggctttcgccctgagagtagtcatggtttgtggccaaagtcaaacgattgttgcagtaatctcttacaccaagtgtgtgaaggcaaaaagaagataccataataggtattaaggaagactctaaaccaaaaggaactttctatgccatctatttttactattattattaggaagcttgtattctagcttggcactgcatttttaataacaaagagaatgctaaatgaacttggttgggggggcggggaagaaaaacacatcgtactgtatacaaagaactgccttaatcatggcagatttttgcctttggttcacatgttgctgaccaaaggctacaattctgttctgaatgtgcactcctaatttatttgatttaatttattcaatttattaacttagttttcttagaccaggctgaatacctaatatgtggctttttggctgaggctttttacttctgtttagaaatttgatgcctattttaggaaccagaaaaagataaattgcttcagtagaagagaccatatttaactttaaaaagtgaggaggaatgtgctttttaattatgctctcataagtctaatcttttgggggtttagtagcacatagataaatattaaaggtggttacatataataacatctgataatactcatttcagtataacattggtctttgctgatgtgttcgatataggttaggaagagttcttttagtttacttgggcaaatgtggcagttttagacctatgtctttgtagtacatcttcagttgtctttcttgtattaattccagaagaagtgaatgtactggttatcgttactatgctaggctgtaaaattcttactgaaattgcccacttgttagacactactcaggaggagcccatggccagggtagtagaaatactgtgcatctggtccaagttttctatgcttggctcatattctttcataagatgcatattctttcataagatgcatatcatgtagtcaaaagctttctgacaaccaattatttttcatatgtttcacttatagtcgaagaatacaaaggaacaatcagaaatagcagcttttaatgaatattttctatttattggttgctgaactgttaagggatttgctgtgtggtaattttacttataatagaaacttgcttattttagtggttgaggtgcttctgttgtcctaaaactacttctgaggtttttaaaatgtagaaccatgtttttgattagtgtcttaaaagattactgtggtgctcagcaaatcttatcaagtcgtgcaggaacccatatgttaagaaaatgagctttgtagtcaaaagactcatctaatttgagctgagtggagctcagctgtgtttgacccacatcctcccaatttgttctgtatttaggtagttatttatacaagagtctttaagtcattctaaatattttttcttgaaagttttaactaagtgagaaataaggtagtcttcaaaatcttggtcatctgtttggatgagggaaagtacctcatgagttgcacattacttctacaacagggtgtgtgtgtgtgtgtttgtgtgtgtcagtcatcttcaaaggcagattattagattccagcaatctgaaatctattattccagcagtctgaaacctaaatatgttatattggaaatcatgactgtgagactttattgtcctctaggatggatgtatattggagaagggtggttagcacattcatcagacatctgcttatgctgtggtcaaggccagtcatttttaatttatatcagatttatatcagaccctccaaaaagtatttgaaatatattacagttataacgtacaagtacattacatgtatattacaagtatattacatgtaaaacaggacaatttaaaaattttaaattttaaagaattaaaaattttaaaaatttaaattaaaaaaattaaaaatttatagaaccatatcaacactgacagattctaaaattaagtagtaaatttaactccaagtttctccatgggcaaagtcaaaagataatgctaggttatgtcaatttttcttttcaacaaaactgctaatgtctattaggaagaaaaatgtgtttaaagttttacaggaacgtggagctcatgttcttctgatatgtagactttgataaagaagcatactgtaatgttttatgaactgaaattttaatcaaaagaggtcattttagaataacaagtattattcttttttagtagagggaatgactgtcaatatgatttatttgtttttgtgtcatccctactttgaactgctgttagccttacattctcactatagtccataatgcttccagatcaccttttctaagatgcaacatgtgagtttagtgagagtttatatgttgggttacttagttgagctatttatgtataagtaaatgagatgacaggaagctgtaactgagcacaaagtactttagggagcagccacacatacaggaagctcttagaaaagaacttttttttttttttgagacagagtttcactcttgttgcccaggctggagtgcagtagcgcagtctcggctcactgcaacctctacctcctgggttcaagcaagtctcctgtctcagcctcccaagtagctgggattacaggcatgtgccaccatgcccagctaattttgttttttttttagtcgagacggggtttcaccatgttgctcaggctggtcttgaactcctgacctcaagtgattcacctgcctcggcctcccaaagtgctgggattacaggcgtgagccactgcgcccggccaaaaagaacattttgtcaatctgaacagagcacagaacattttttcagactgaacagactgttggaccagcctgtcatgatatgttttagataaagtttgagtgagttcattgggataaatggtccacaatcttaaacagaatactgtgagccaatgccttttggaagtaatggtggaggataatatgattaaagggaacatgcttgtgtttatttttgttggtagtatatgattagaaaaactagataattcccataagatgaagatcttccatgaacaaactaccatcaatcatccatcagattgattttttttttttttttaagtaacactaaagaagctgtaaagaacattgaaggtggtcattccttcaaaactgtgttttgaccacacaaggtgggcattaacaaaccaaatttcaacttaagtttgtttgtattatattgggggtgctgcgagactggagattttataaaagcaagcatttttatttccatttataatttctattcaatattgctagatatattaacatgaaggaatggggaagcttatttcaatcaaagctaaaattttcagaagtctgtaaaaatggaaaaacaccattgaaagaggcagaaacaggtaagggggatagtatcttagaaaacctgttggttaaggcagctgcatgtgataaaagtggtacttgaacttggtagtgtttccttagaacctcctccaaaaatatgcatttaccaggcttgttacaattttttgacagtttttcatcaactgtcaaaaacttcaacccttttaaaacctagatataaatgcttacatgtaaagaaaggaagctaagcagtgggtacctgggatctctctgaactatttttataacttcttgtgagtcttaagtatttcaaaataaaagtggttttaaagtaaattcatagattaaatgtatcattatctatatataaaccatgatttaaaactttaattttctaaacatagtattcaacttagttgaataaatatatgatagaagttaaatagaatttttatttcattcttaagaaaaactcatgtttgtaacaaatgatatctaaagatctattttgccttaccagaaaagaaaaaaaaaaccctaaaaccaaaaactccttttccctaggaagtcaaaaatgctgtgatttaaaatatctaattatatttttttctttctatggtagtggggtttacttctgaggataaaatattttgaaaaagctctgtcccttgacatggtagttctcccgtgccttgtacttgttctctctccatatgcacagtgtgacaagatgctcacctttaatgaagaaggtgtagcttttcgttttaagctgtaattgtctttgtcttgatttggctatttttataactgaaatcctgagcaacagagataatttgggtggtaatgatcatcttttgtatatgttcttgatgttaagaaatattttttgctgccattcagctttgtggaatttatgtttacttttcaatattttcatatttcttaaccagattttaaagaaatttgttgttagttacgtgaaatcaaaggtcaggtcagtaagcccattatcctcaaacttgaagtttcgttggatgttcaaaatgctaatttttgcagagatataaggataaattagttttagtttgtgttcttaagggtttgcaaaataatttggctcccaaactcttgttggggtgtagtgtttgctaggagcccaggatacctgccctggacttaaattgtgattgaagtggagaggtactctaggaatttaaaaagacacaaaattatttttttccagactagtgtgccatggatttctgataagaattaacattcttgaacaaaggtatcagaaagggtaactcgagttgaaggtttgtgaatagaaggggaaatgtgatagaagattattcagaacaaaataagtagacaaaataacaaaagacaggaaaataagtctctttgtatccttattaatcatttgaaattatgctataatattttttaaaactcacctgtttggttctgggtgaagcagttcctgaaggagtgttttgtcagaatatattgttaggagaatagagggttctgtggccaagtaagtttgggaaatagtgggttagacaaagttgagttactgttggcctttcagacctttgatacgctaatgtgcattttaaatctccaagaagcacctctattttatacatcatttccctaatttattttaatatggatttcttgtttttgttttcttgagacggagtcttggtcttgtcacccaggctggagtgcagtggcacgatctcggctcactacaacctccgcctcccaggttcaagcgattctcctgcctcagcctcccaatttactgggattacaggcacctgccaccacgcccagctaatttttgtatttttagtagagatggggtttcaccatgttgaccaggctgattttgaactcctgacctcaggtgattctgcccgcctcaccctcccacagtgctggaattataggtatgagccactgtccccggccagatttttttaaaagtaggtatcttgtgggatttatgttctgagagatacacctaaggaaatgctgccctacagtgtttttgctagttcatactcattacaaaggtttcttgttgttgggtgcccctctagccagtggtagtaaaatgggaagagacaggtcaagactcccttggaccatggcattgagagagggatggctgtcggcatagatatgttggttatttaggcatttgtgagggaggcccctggctcttccagcctgtttccttaggatcccagttggccgggaacagctgtacaagggtctgctgaactggtggtttcagcagactacccagttcctaagcatccatgagacagagggaaccaacttgtatttccagaacaattttccaaaccttttctggctgtactttaaaagtgccaaaaaggcaatgggtgtttatgacactaaagtcacatacaagctagtatgatacatacatcatagaaagcttatagttgctcagtgacaaagcaaaggaagtttaatattttccagttttgttcattaccgaagacagtctacggttcatagttttcactaaattctaagcagattctatatcctaaaacatttaaacctcactaggcctgcaattttgagagggttagctaaatatgtttggtatcacttcagagtctaaaaccagattactaatcgtgtgtaaggaggcattttgtgtgtctttgcaatgtatacaattggattatttggaacaccattttgaatgtgtatttgagagaaagctcgcctgtgggttttgagttgtggtgtaatggtgaacatgtagccacgtgaaaggccgttggatctttgttctgattcttcagtcgtcttcttgcaaattcagagaaatgtcttttaatcatttcgtttacatatcccagatccttggaaatcatgaaaaataacttgccagagtttgcatcagccctcagtaagtcatgaaccatagagaaggtcatggggccatttattctttggaccactggctacttctgaagttctggcttccttctctctaggaggagtcgtgtattcaagcttttaagttaaatgcataaaaatgagttttacttctcttctgacttgatttttaattttatgaaatgggaaataatgtttttccatttttctgttcattttgaagtgggaatttgaggtgtttgtaatgtcatgttactgttctgaaagattgacagtaaagaagacaagaaatatatgtatgtagtatgcatattagttttgtcccaccaagcctatctttgaatggcaaacattttaaaaacatctgttctagttgcacaactactctagcttctttataaagtaaacaatcttaaagtaagcaatgttggccataatttcaatattctagccttgccgagtgtgaatatattttactcagagactatgtacaaatacactaaagtggtgatggtgatcaatattgtaaagaatttattctgataaatgagaaactggatataatgtcaaaatagctattttctcaataaaaatctcaaatctcctgactgctt

SEQ ID NO: 11271 - protein, 251 aa, Homo sapiens; identical to SEQ ID NO: 11267

SEQ ID NO: 11272 - DNA, 6166 bp, Homo sapiens
atagtaaaggtcggcccgcgcaagatggcggcccccttggaactcagttgctggggaggcggctggggactcccatcggttcacagcgagtccctggtggtgatggcttatgccaaattttctggtgcacccttgaaagtcaatgtgatagataacacctggagaggttcaagaggcgatgtaccaattttgacaactgaagacgacatggtttctcagccagcaaaaatactaaactttttaagaaaacagaaatataatgctgattatgaactctcagcaaaacaaggggcagatacattggcttatattgctctcctcgaagagaagcttctccctgcagtgcttcacacattctgggttgagagtgacaattactttactgtgacaaagccatggtttgcttcacaaattccttttcctttgagtttgatcctgcctggaagaatgtgctcagcaaatcttatcaagtcgtgcaggaacccatatgttaagaaaatgagctttgtagtcaaaagactcatctaatttgagctgagtggagctcagctgtgtttgacccacatcctcccaatttgttctgtatttaggtagttatttatacaagagtctttaagtcattctaaatattttttcttgaaagttttaactaagtgagaaataaggtagtcttcaaaatcttggtcatctgtttggatgagggaaagtacctcatgagttgcacattacttctacaacagggtgtgtgtgtgtgtgtttgtgtgtgtcagtcatcttcaaaggcagattattagattccagcaatctgaaatctattattccagcagtctgaaacctaaatatgttatattggaaatcatgactgtgagactttattgtcctctaggatggatgtatattggagaagggtggttagcacattcatcagacatctgcttatgctgtggtcaaggccagtcatttttaatttatatcagatttatatcagaccctccaaaaagtatttgaaatatattacagttataacgtacaagtacattacatgtatattacaagtatattacatgtaaaacaggacaatttaaaaattttaaattttaaagaattaaaaattttaaaaatttaaattaaaaaaattaaaaatttatagaaccatatcaacactgacagattctaaaattaagtagtaaatttaactccaagtttctccatgggcaaagtcaaaagataatgctaggttatgtcaatttttcttttcaacaaaactgctaatgtctattaggaagaaaaatgtgtttaaagttttacaggaacgtggagctcatgttcttctgatatgtagactttgataaagaagcatactgtaatgttttatgaactgaaattttaatcaaaagaggtcattttagaataacaagtattattcttttttagtagagggaatgactgtcaatatgatttatttgtttttgtgtcatccctactttgaactgctgttagccttacattctcactatagtccataatgcttccagatcaccttttctaagatgcaacatgtgagtttagtgagagtttatatgttgggttacttagttgagctatttatgtataagtaaatgagatgacaggaagctgtaactgagcacaaagtactttagggagcagccacacatacaggaagctcttagaaaagaacttttttttttttttgagacagagtttcactcttgttgcccaggctggagtgcagtagcgcagtctcggctcactgcaacctctacctcctgggttcaagcaagtctcctgtctcagcctcccaagtagctgggattacaggcatgtgccaccatgcccagctaattttgttttttttttagtcgagacggggtttcaccatgttgctcaggctggtcttgaactcctgacctcaagtgattcacctgcctcggcctcccaaagtgctgggattacaggcgtgagccactgcgcccggccaaaaagaacattttgtcaatctgaacagagcacagaacattttttcagactgaacagactgttggaccagcctgtcatgatatgttttagataaagtttgagtgagttcattgggataaatggtccacaatcttaaacagaatactgtgagccaatgccttttggaagtaatggtggaggataatatgattaaagggaacatgcttgtgtttatttttgttggtagtatatgattagaaaaactagataattcccataagatgaagatcttccatgaacaaactaccatcaatcatccatcagattgattttttttttttttttaagtaacactaaagaagctgtaaagaacattgaaggtggtcattccttcaaaactgtgttttgaccacacaaggtgggcattaacaaaccaaatttcaacttaagtttgtttgtattatattgggggtgctgcgagactggagattttataaaagcaagcatttttatttccatttataatttctattcaatattgctagatatattaacatgaaggaatggggaagcttatttcaatcaaagctaaaattttcagaagtctgtaaaaatggaaaaacaccattgaaagaggcagaaacaggtaagggggatagtatcttagaaaacctgttggttaaggcagctgcatgtgataaaagtggtacttgaacttggtagtgtttccttagaacctcctccaaaaatatgcatttaccaggcttgttacaattttttgacagtttttcatcaactgtcaaaaacttcaacccttttaaaacctagatataaatgcttacatgtaaagaaaggaagctaagcagtgggtacctgggatctctctgaactatttttataacttcttgtgagtcttaagtatttcaaaataaaagtggttttaaagtaaattcatagattaaatgtatcattatctatatataaaccatgatttaaaactttaattttctaaacatagtattcaacttagttgaataaatatatgatagaagttaaatagaatttttatttcattcttaagaaaaactcatgtttgtaacaaatgatatctaaagatctattttgccttaccagaaaagaaaaaaaaaaccctaaaaccaaaaactccttttccctaggaagtcaaaaatgctgtgatttaaaatatctaattatatttttttctttctatggtagtggggtttacttctgaggataaaatattttgaaaaagctctgtcccttgacatggtagttctcccgtgccttgtacttgttctctctccatatgcacagtgtgacaagatgctcacctttaatgaagaaggtgtagcttttcgttttaagctgtaattgtctttgtcttgatttggctatttttataactgaaatcctgagcaacagagataatttgggtggtaatgatcatcttttgtatatgttcttgatgttaagaaatattttttgctgccattcagctttgtggaatttatgtttacttttcaatattttcatatttcttaaccagattttaaagaaatttgttgttagttacgtgaaatcaaaggtcaggtcagtaagcccattatcctcaaacttgaagtttcgttggatgttcaaaatgctaatttttgcagagatataaggataaattagttttagtttgtgttcttaagggtttgcaaaataatttggctcccaaactcttgttggggtgtagtgtttgctaggagcccaggatacctgccctggacttaaattgtgattgaagtggagaggtactctaggaatttaaaaagacacaaaattatttttttccagactagtgtgccatggatttctgataagaattaacattcttgaacaaaggtatcagaaagggtaactcgagttgaaggtttgtgaatagaaggggaaatgtgatagaagattattcagaacaaaataagtagacaaaataacaaaagacaggaaaataagtctctttgtatccttattaatcatttgaaattatgctataatattttttaaaactcacctgtttggttctgggtgaagcagttcctgaaggagtgttttgtcagaatatattgttaggagaatagagggttctgtggccaagtaagtttgggaaatagtgggttagacaaagttgagttactgttggcctttcagacctttgatacgctaatgtgcattttaaatctccaagaagcacctctattttatacatcatttccctaatttattttaatatggatttcttgtttttgttttcttgagacggagtcttggtcttgtcacccaggctggagtgcagtggcacgatctcggctcactacaacctccgcctcccaggttcaagcgattctcctgcctcagcctcccaatttactgggattacaggcacctgccaccacgcccagctaatttttgtatttttagtagagatggggtttcaccatgttgaccaggctgattttgaactcctgacctcaggtgattctgcccgcctcaccctcccacagtgctggaattataggtatgagccactgtccccggccagatttttttaaaagtaggtatcttgtgggatttatgttctgagagatacacctaaggaaatgctgccctacagtgtttttgctagttcatactcattacaaaggtttcttgttgttgggtgcccctctagccagtggtagtaaaatgggaagagacaggtcaagactcccttggaccatggcattgagagagggatggctgtcggcatagatatgttggttatttaggcatttgtgagggaggcccctggctcttccagcctgtttccttaggatcccagttggccgggaacagctgtacaagggtctgctgaactggtggtttcagcagactacccagttcctaagcatccatgagacagagggaaccaacttgtatttccagaacaattttccaaaccttttctggctgtactttaaaagtgccaaaaaggcaatgggtgtttatgacactaaagtcacatacaagctagtatgatacatacatcatagaaagcttatagttgctcagtgacaaagcaaaggaagtttaatattttccagttttgttcattaccgaagacagtctacggttcatagttttcactaaattctaagcagattctatatcctaaaacatttaaacctcactaggcctgcaattttgagagggttagctaaatatgtttggtatcacttcagagtctaaaaccagattactaatcgtgtgtaaggaggcattttgtgtgtctttgcaatgtatacaattggattatttggaacaccattttgaatgtgtatttgagagaaagctcgcctgtgggttttgagttgtggtgtaatggtgaacatgtagccacgtgaaaggccgttggatctttgttctgattcttcagtcgtcttcttgcaaattcagagaaatgtcttttaatcatttcgtttacatatcccagatccttggaaatcatgaaaaataacttgccagagtttgcatcagccctcagtaagtcatgaaccatagagaaggtcatggggccatttattctttggaccactggctacttctgaagttctggcttccttctctctaggaggagtcgtgtattcaagcttttaagttaaatgcataaaaatgagttttacttctcttctgacttgatttttaattttatgaaatgggaaataatgtttttccatttttctgttcattttgaagtgggaatttgaggtgtttgtaatgtcatgttactgttctgaaagattgacagtaaagaagacaagaaatatatgtatgtagtatgcatattagttttgtcccaccaagcctatctttgaatggcaaacattttaaaaacatctgttctagttgcacaactactctagcttctttataaagtaaacaatcttaaagtaagcaatgttggccataatttcaatattctagccttgccgagtgtgaatatattttactcagagactatgtacaaatacactaaagtggtgatggtgatcaatattgtaaagaatttattctgataaatgagaaactggatataatgtcaaaatagctattttctcaataaaaatctcaaatctcctgactgctt

SEQ ID NO: 11273 - protein, 167 aa, Homo sapiens; identical to SEQ ID NO: 11269

SEQ ID NO: 11274 - DNA, 1868 bp, Homo sapiens
atgcaccacgtgctgctggaggtagatgtgttggagggcaccctgcagtgcccagagtctggacgtgtgttccccatcagccgcaggatccccaacatgctgctgaatgatgaggaaacagagttgatcatgccagtctttcctgaatttctaaatcaaacccgtaggccacagtggcaggagactatagcagatgagaagcaacaaggggccaccctagtgtcctgcaaaggtctgagtctgcgggacccagatctgcatctccagaatgaacacagagagatgttccaggaggaaaagtacttccgggatagtaaaggtcggcccgcgcaagatggcggcccccttggaactcagttgctggggaggcggctggggactcccatcggttcacagcgagtccctggtggtgatggcgatgtaccaattttgacaactgaagacgacatggtttctcagccagcaaaaatactaaactttttaagaaaacagaaatataatgctgattatgaactctcagcaaaacaaggggcagatacattggcttatattgctctcctcgaagagaagcttctccctgcagtgcttcacacattctgggttgagagtgacaattactttactgtgacaaagccatggtttgcttcacaaattccttttcctttgagtttgatcctgcctggaagaatgtctaagggagcactgaataggattctcctgaccagaggacagcctcccctctaccacctccgagaagtggaagcacagatatacagagatgccaaggagtgcctaaatcttctatcaaacagattgggaacatctcagtttttctttggagatacgccttctaccttggatgcctatgtttttggttttcttgcacctctttacaaagtacggtttcctaaagttcagctacaagaacatctgaaacagctctccaacctctgtcgcttttgtgatgacatcctgagcagttattttaggcttagtcttggagcattttcctgcatgaacagaaatcagcagcagattgattttggcatctctccagctggacaagaaacggtagatgcaaatctgcagaaactcacacaacttgtaaataaggaatccaacttgattgaaaagatggatgacaatcttcgccaaagccctcagcttcctcctcggaaactgccaacacttaaattgactccagcagaagaagaaaataattccttccaacggctttcgccctgagagtagtcatggtttgtggccaaagtcaaacgattgttgcagtaatctcttacaccaagtgtgtgaaggcaaaaagaagataccataataggtattaaggaagactctaaaccaaaaggaactttctatgccatctatttttactattattattaggaagcttgtattctagcttggcactgcatttttaataacaaagagaatgctaaatgaacttggttgggggggcggggaagaaaaacacatcgtactgtatacaaagaactgccttaatcatggcagatttttgcctttggttcacatgttgctgaccaaaggctacaattctgttctgaatgtgcactcctaatttatttgatttaatttattcaatttattaacttagttttcttagaccaggctgaatacctaatatgtggctttttggctgaggctttttacttctgtttagaaatttgatgcctattttaggaaccagaaaaagataaattgcttcagtagaagagaccatatttaactttaaaaagtgaggaggaatgtgctttttaattatgctctcataagtctaatcttttgggggtttagtagcacatagataaatattaaaggtggttacatataat

SEQ ID NO: 11275 - protein, 414 aa, Homo sapiens
MHHVLLEVDVLEGTLQCPESGRVFPISRRIPNMLLNDEETELIMPVFPEFLNQTRRPQWQETIADEKQQGATLVSCKGLSLRDPDLHLQNEHREMFQEEKYFRDSKGRPAQDGGPLGTQLLGRRLGTPIGSQRVPGGDGDVPILTTEDDMVSQPAKILNFLRKQKYNADYELSAKQGADTLAYIALLEEKLLPAVLHTFWVESDNYFTVTKPWFASQIPFPLSLILPGRMSKGALNRILLTRGQPPLYHLREVEAQIYRDAKECLNLLSNRLGTSQFFFGDTPSTLDAYVFGFLAPLYKVRFPKVQLQEHLKQLSNLCRFCDDILSSYFRLSLGAFSCMNRNQQQIDFGISPAGQETVDANLQKLTQLVNKESNLIEKMDDNLRQSPQLPPRKLPTLKLTPAEEENNSFQRLSP

SEQ ID NO: 11276 - DNA, 2453 bp, Homo sapiens
gcaagatggcggcccccttggaactcagttgctggggaggcggctggggactcccatcggttcacagcgagtccctggtggtgatggtgaggccgcctcgcgggccagggcgcaggaggaaggggcggggctggaggcgccaggctgacttgccccagtttcccgctgcgctgcggggtccaggagggccgagccgctgcacgctgcattgccctgggctccctcccaccgacgagtcccaacctggccgatacccccgccgaaggccggcggcgacatcaaggcttctccgcttggctccgagttttgtccgcctcacaaagctgtctgggcggtggagtgaaaccccgaagcaaggggcgcgccctccctactctgcatccccaggaccttttggggagcaaagtcctcgaaagccgggtggctggcgcccgcgtccctacttgagatcacggggagggatgcggcctcagtatcagtcgccttctgcctttgggggatggggctgtgaagtaaagctgctctgcagctttgcattacgcacttggtctaaaatgtttgattgcaaactctgtttcaggcttatgccaaattttctggtgcacccttgaaagtcaatgtgatagataacacctggagaggttcaagaggtatagtgtaaacctttacactcccctttctgcactcttttttttcttcttccatttaaagctgtgaggtatatagctataatattgaggatttagtttcttaccgtgaccttggctctgtgttgtttatggtttgatcattctgagtaatacctcaaagtgcaagcgaaatcactggaaattatgagaaacgaaaatgttctttagaaccgctctttgtgaaacagcaaaaaaaccaagacaagcttactcattttttcccctctaaatgtgcaactgctatagtttttaggatattggaatctctcagaggaaatcacactgtgtccttgtatgtaaactgttttttgattataggcgatgtaccaattttgacaactgaagacgacatggtttctcagcctcccaagtagctgggtttacaggtgcccaccaccacgcccgacttcttttgtatttttagtagagacagggtttcaccatgttggccaggcttatctggaactcctgacctcaagtgatctgcccccgcttgatctcccaaagtactgggattacaggcatgagccaccacacccggccttcagttaatattgtcttatgtgctttaaaaatccttaatttatttctaggccttctaccttggatgcctatgtttttggttttcttgcacctctttacaaagtacggtttcctaaagttcagctacaagaacatctgaaacagctctccaacctctgtcgcttttgtgatgacatcctgagcagttattttaggcttagtcttggaggtaagctggctctttttcagctaatgtttgtttgcatattctcctatgtatgtataagcaaaatccactacttattttaattttagaagtttgtgtattgtctttaaatagtggtttatagcacttcaaggatttgtgtttttccgacttcatttttattctcatgttagttcttatttaaatagataaatagatatttgccttttatctattccgctggatttttacgtttcttcttcttgttctttaaatattacccctttgaagtgggtcattttcttctaaaaggttaaaaccacaggtattaagtctttgctgaaaaacagtatttatcctaatgcaaatggacaattactttaaatgatttttacctgctgcttctagcattttcctgcatgaacagaaatcagcagcagattgattttggtgaggtacactgccatgattccactacttgaaaactgattgcatcagaatggaagtatagtaaatagagggcacctgttacttaggatgtgcttcattgagagagtggagccttgtgcttaagtgattcagatactaaatttctattgggatggttggctgaaattgtccttttaagaaacaggttataaagatagctggcttaggtggacagtttattattttttggtgggttatgtattctgtatacaggaaggggttagtagtttgggagtcatgaaattaagtaatgttcaaccgtgttaacttgggagcagtggttagcaaacctgattatttgacagataaaaaatcttgggtcctattccagacttactaaattagaatcttttaggcatcaatcctaggaatttgtatttttaagttcttctgaatactttggatgtctggtgggcaactttttgggagttactgccttagaaaactatccagatagttgtgaccaaagacctatttgaaatgggtgtgagaaaggaatagcttaaacttgagaaggaaatgaggactactgtgctttttttttcaaa

SEQ ID NO: 11277 - protein, 201 aa, Homo sapiens [sequence omitted]

SEQ ID NO: 11278 - DNA, 723 bp, Homo sapiens
gctgtgtgggacgtgcctgctttgccttcgccttccaccatgatcgtaagttttctgagaccccctcagccatgtttcctgtagagcctgtggagttgtgagataaggatattgtaattatacaagagatgtccttcatctaggagatggctgctgaagtattgaagggtaaagtgtcctgtgcttataactggctttcaaacagacaaacaaaaaaagctggtccaaaatggcagtggcaatggatgtggataccccaagaagtaccaacagcagtgctttgaagtaaaaaagtgaaatgcagtagctagccctctgggcttgggatgttgtggttaataactgtgccatctgcaggaatcacagcatggatctgcattgaatgtcaagctaaccaagagtctgccacttcagaagtgtgtaccgttgcacggggagcctgtaaccgtgcttttcacttcactgtctctctcactggctcaaaacacaacagctgtgcctgttggacaacagacaataggaattcccaaagtatggacaccagaaaaagaattcttccatcaagcttaactgttttgtgattcatttaatgacttgcccttctgtcacttaattataaattagatagaactgtgtcttttctgctttgtctttgccatttgctgttctcgcagccacattgtattctgtgtcaaataaagtccagttggattctagagcgaa

SEQ ID NO: 11279 - protein, 84 aa, Homo sapiens
MLWLITVPSAGITAWICIECQANQESATSEVCTVARGACNRAFHFTVSLTGSKHNSCACWTTDNRNSQSMDTRKRILPSSLTVL

SEQ ID NO: 11280 - DNA, 685 bp, Homo sapiens
gctgtgtgggacgtgcctgctttgccttcgccttccacctctttgaccttctcccatcttccagtcagaggctaaacccaggcgctctgctgccagtcctgacagaccccgccctgaatgatctctatgtgatttccaccttcaagctgcagactaaaagttcagccaccatcttcggtctttactcttcaactgacaacagtaaatattttgaatttactgtgatgggacgcttaaacaaagccatcctccgttacctgaagaacgatgggaaggtgcatttggtggttttcaacaacctgcagctggcagacggaaggcggcacaggatcctcctgaggctgagcaatttgcagcgaggggccggctccctagagctctacctggactgcatccaggtggattccgttcacaatctccccagggcctttgctggcccctcccagaaacctgagaccattgaattgaggactttccagaggaagccacaggacttcttggaagagctgaagctggtggtgagaggctcactgttccaggtggccagcctgcaagactgcttcctgcagcagagtgagccactggctgccacaggcacaggggactttaaccggcagttcttgggtcaaatgacacaattaaaccaactcctgggagaggtgaaggaccttctgagacagcaggt

SEQ ID NO: 11281 - protein, 152 aa, Homo sapiens
MGRLNKAILRYLKNDGKVHLVVFNNLQLADGRRHRILLRLSNLQRGAGSLELYLDCIQVDSVHNLPRAFAGPSQKPETIELRTFQRKPQDFLEELKLVVRGSLFQVASLQDCFLQQSEPLAATGTGDFNRQFLGQMTQLNQLLGEVKDLLRQ

SEQ ID NO: 11282 - DNA, 3402 bp, Homo sapiens
ctggtccgtccaggctccttcccatcctcacacccgcgcctttctccctgcggccccggctcgctgctccagctgcccagctcttcccaggacaggggatcccgccaagggggccgcccccgccccggccctcccccgcccggccgcaccataaagcgcccggccgctgccgcggagcccagcagccagctccccagcaccgcacggcggggacgcgagcgcgcccccgacggcagcccggacgccgagcacgggtcacctgcggcgccggcccgggcgccgaccgaggttcaacgcacggcccggggacccccaggcggggccaacgccgccgtcgcccccggcctcgcggggagcaggaagagccaacatgctggccccgcgcggagccgccgtcctcctgctgcacctggtcctgcagcggtggctagcggcaggcgcccaggccaccccccaggtctttgaccttctcccatcttccagtcagaggctaaacccaggcgctctgctgccagtcctgacagaccccgccctgaatgatctctatgtgatttccaccttcaagctgcagactaaaagttcagccaccatcttcggtctttactcttcaactgacaacagtaaatattttgaatttactgtgatgggacgcttaaacaaagccatcctccgttacctgaagaacgatgggaaggtgcatttggtggttttcaacaacctgcagctggcagacggaaggcggcacaggatcctcctgaggctgagcaatttgcagcgaggggccggctccctagagctctacctggactgcatccaggtggattccgttcacaatctccccagggcctttgctggcccctcccagaaacctgagaccattgaattgaggactttccagaggaagccacaggacttcttggaagagctgaagctggtggtgagaggctcactgttccaggtggccagcctgcaagactgcttcctgcagcagagtgagccactggctgccacaggcacaggggactttaaccggcagttcttgggtcaaatgacacaattaaaccaactcctgggagaggtgaaggaccttctgagacagcaggttaaggaaacatcatttttgcgaaacaccatagctgaatgccaggcttgcggtcctctcaagtttcagtctccgaccccaagcacggtggtgcccccggctccccctgcaccgccaacacgcccacctcgtcggtgtgactccaacccatgtttccgaggtgtccaatgtaccgacagtagagatggcttccagtgtgggccctgccccgagggctacacaggaaacgggatcacctgtattgatgttgatgagtgcaaataccatccctgctacccgggcgtgcactgcataaatttgtctcctggcttcagatgtgacgcctgcccagtgggcttcacagggcccatggtgcagggtgttgggatcagttttgccaagtcaaacaagcaggtctgcactgacattgatgagtgtcgaaatggagcgtgcgttcccaactcgatctgcgttaatactttgggatcttaccgctgtgggccttgtaagccggggtatactggtgatcagataaggggatgcaaagcggaaagaaactgcagaaacccagagctgaacccttgcagtgtgaatgcccagtgcattgaagagaggcagggggatgtgacatgtgtgtgtggagtcggttgggctggagatggctatatctgtggaaaggatgtggacatcgacagttaccccgacgaagaactgccatgctctgccaggaactgtaaaaaggacaactgcaaatatgtgccaaattctggccaagaagatgcagacagagatggcattggcgacgcttgtgacgaggatgctgacggagatgggatcctgaatgagcaggataactgtgtcctgattcataatgtggaccaaaggaacagcgataaagatatctttggggatgcctgtgataactgcctgagtgtcttaaataacgaccagaaagacaccgatggggatggaagaggagatgcctgtgatgatgacatggatggagatggaataaaaaacattctggacaactgcccaaaatttcccaatcgtgaccaacgggacaaggatggtgatggtgtgggggatgcctgtgacagttgtcctgatgtcagcaaccctaaccagtctgatgtggataatgatctggttggggactcctgtgacaccaatcaggacagtgatggagatgggcaccaggacagcacagacaactgccccaccgtcattaacagtgcccagctggacaccgataaggatggaattggtgacgagtgtgatgatgatgatgacaatgatggtatcccagacctggtgccccctggaccagacaactgccggctggtccccaacccagcccaggaggatagcaacagcgacggagtgggagacatctgtgagtctgactttgaccaggaccaggtcatcgatcggatcgacgtctgcccagagaacgcagaggtcaccctgaccgacttcagggcttaccagaccgtggtcctggatcctgaaggggatgcccagatcgatcccaactgggtggtcctgaaccagggcatggagattgtacagaccatgaacagtgatcctggcctggcagtggggtacacagcttttaatggagttgacttcgaagggaccttccatgtgaatacccagacagatgatgactatgcaggctttatctttggctaccaagatagctccagcttctacgtggtcatgtggaagcagacggagcagacatattggcaagccaccccattccgagcagttgcagaacctggcattcagctcaaggctgtgaagtctaagacaggtccaggggagcatctccggaactccctgtggcacacgggggacaccagtgaccaggtcaggctgctgtggaaggactccaggaatgtgggctggaaggacaaggtgtcctaccgctggttcctacagcacaggccccaggtgggctacatcagggtacgattttatgaaggctctgagttggtggctgactctggcgtcaccatagacaccacaatgcgtggaggccgacttggcgttttctgcttctctcaagaaaacatcatctggtccaacctcaagtatcgctgcaatgacaccatccctgaggacttccaagagtttcaaacccagaatttcgaccgcttcgataattaaaccaaggaagcaatctgtaactgcttttcggaacactaaaaccatatatattttaacttcaattttctttagcttttaccaacccaaatatatcaaaacgttttatgtgaatgtggcaataaaggagaagagatcatttttaaaaa

SEQ ID NO: 11283 - protein, 961 aa, Homo sapiens; identical to SEQ ID NO: 1046

SEQ ID NO: 11284 - DNA, 1026 bp, Homo sapiens
tgcggacaacacggccggaggggcctccatgaaatccaacccggggttccccatcctgcggtcacaaaagtcctggcatgtccttggggactatcctaggtcagaattgctcagggaaatgaaggctctgggatgcagaacggagaatgctttgcttctagagcaagcctcccctccccagaccagctccgtggctggagaatgcacaggaagcgtgaccattcatggagctgtccctgattggagtggaggtagacatacagcatggcgccgtctggccctgccagtcacctgccaaagacggaaggtttctcccggagggactatgacagtccccacctctacacgatggcccacccccaacaggagcgtcaaggcagacagactctggaagttgtaaggatgaggacagttagagatgacagcaggtaccttttctgtagagtgtaaatgccaagatggtgccgccagagatgaactagccaagaatacctatttatgttgcagtatcgccaaagataataatcactattgtggaacatgaaggatatattttaaggctttctccacattagactttctaggttcattttcccacccttctgaaatctgactcgattttccagttgaccacagtctgaagagagccagttggcgtgaggttctgtgacctacacagatggtgggaggagtcagacgggaaatctcttatgtcgacgtggtcaccaccacttgcttcttgagggagaagaatcggaaagacctggcaagacagactagctagaagggctttctgattccagaacaatactaagtttcctgaagtaaagtattaaataaatataaataaatggtaagacgtatataaatgtggtatgaagaggaagaaaataatggaatggagggaaatagacacaaatagaaattctaaggtatttctaatctgggatagaacagaattcttctccttttatttaatattaattgttgagaattcacatgtaccccttaaatatgtaaaaagta

SEQ ID NO: 11285 - protein, 123 aa, Homo sapiens
MKSNPGFPILRSQKSWHVLGDYPRSELLREMKALGCRTENALLLEQASPPQTSSVAGECTGSVTIHGAVPDWSGGRHTAWRRLALPVTCQRRKVSPGGTMTVPTSTRWPTPNRSVKADRLWKL

SEQ ID NO: 11286 - DNA, 2702 bp, Homo sapiens
agaagtctgtggaaggtgtgggatgggatgacagcatcagaaagaattgggcaaatctgtcccaggactaggtcagaaaaacgcctccctagggaaggtgccaccccaaacacgtgtttctgagaccccttacccgaaataaggaggctgccaagcgatacttgaggttggaccagatgatgttttcttgagagaagcagaaaacgccaagtcggcctccacgcattgtggtgtctatggtgacgccagagtcagccaccaactcagagccttcataaaatcgtaccctgcggacaacacggccggaggggcctccatgaaatccaacccggggttccccatcctgcggtcacaaaagtcctggcatgtccttggggactatcctaggtcagaattgctcagggaaatgaaggctctgggatgcagaacggagaatgctttgcttctagagcaaggaaaaatacttgtattgagcatcatgaagttcgtgttactaacctcacaggcaatcgacagcctgggagatagtccctagggcttcagatcttgtgtggtgttcatcccaccatcttcaggcccacagtgtgtcatttttccacctctgctttgttaggtgctggagagatcaggcgcatggtgagtcacttctgcctgggccagtgtcacacagagactacccttttctgcagttatccagaggtagcttcaaaggacggattctgggagacttaaaaatgaacagctctcagagttttgtgtttgatgatgtcacattggtagcttgaaatcagcaatgaggacaatgcggagttacatcatggaaactggaaaatgctaccaactagggctttctgtgatttgcttaccagcatataccactggaaatgggtcatcagttaggcttgcagaagcctcccctccccagaccagctccgtggctggagaatgcacaggaagcgtgaccattcatggagctgtccctgattggagtggaggtagacatacagcatggcgccgtctggccctgccagtcacctgccaaagacggaaggtttctcccggagggactatgacagtccccacctctacacgatggcccacccccaacaggagcgtcaaggcagacagactctggaagttgtaaggatgaggacagttagagatgacagcaggtactcattgctggcaggaatcaggcatcagatccatgccttcttctttgcttacatgtaagatcatgtgaatgttgatgaaaacaccatcagactggaggctgcgtccggccactcagacaaagaaggaatagaagtgaaggaagaaggctggactgtgaaccaatgacactgagttgcccgcgccaccgtggagggcataggggacaggtcaaaagttccagtgaagtcctgggaggtggtgtgagaagtttactctggggacagggagatgatctgcttaaaaagcaagttaatttttcttattgctgttcctttggctcttttacaatggaatgacaaaggaatgggtgcacagagaaatgctggtggcctgcattgagaatttctgatgaggtaggctgagaaactgacaaatgagctgtcagctccgctgcaatgacacttcaggggccaggtttttttagcttttatatatataatatatattatcacactgcacactatatatgtaataaatattatacaatatgtttaaaaaatgaaaattaaaattttcatctttattgaggtataattgacaaaactgaatatatttaaagtgtgcagtgtgatgatgtgatatacgtatacattgtgaaatgattaccacagtcagttaagtaacacatccatcaactgacatagttaccttcctttttttctttttcagtgagaacacttaagatctgctctcttagcagatttcatatatataatatagtattattaactacagtcaccatgctgtacattagatctttttcatcttatgcagttttattggcataacatttacaggtcgtaaaagacatccatttgaagtatatatattgtttaatgatttaagtcactcacaacctcttagttgccaaatccaatgcatgctttccaatgacttgtctcgatctttcagcctccctggctgtgctatcagttcgctcctttttctggcttctgctctttttccttggcctagtccttcgtttttggggtttcctggagttctatttactgtctactttccttctctctaggtggctcagttattacctttacaccaagatctcgcaaatctatttgcagactactttgtcctggtaaaagctgagaagcaataaatccccatctattcctaagcaatatagcattgcggagaagaactcaggctctgtagccaacctggaagatgtgtgaccttagtctaaatacgtaacatttcttttttttctttttggagacagggtctccctctgtcacccaggttagagtgcagtggcgatcacagctcactgtagcctcaaactactcttgtacccaaatgatccttcggcctcagcctcctgaggagctgggactataggcatgctccaccatgcctggacttaatgatgtaatatttctgtccctcagtttcttcaattgtaaaatggggataataataatccctgtttatgaggttgttgtgaggattaaaataagtgacttgat

SEQ ID NO: 11287 - protein, 116 aa, Homo sapiens
MRTMRSYIMETGKCYQLGLSVICLPAYTTGNGSSVRLAEASPPQTSSVAGECTGSVTIHGAVPDWSGGRHTAWRRLALPVTCQRRKVSPGGTMTVPTSTRWPTPNRSVKADRLWKL

SEQ ID NO: 11288 - DNA, 654 bp, Homo sapiens
aataacgaccagaaagacaccgatggggatggaagaggagatgcctgtgatgatgacatggatggagacggagcagacatattggcaagccaccccattccgagcagttgcagaacctggcattcagctcaaggctgtgaagtctaagacaggtccaggggagcatctccggaactccctgtggcacacgggggacaccagtgaccaggtcaggctgctgtggaaggactccaggaatgtgggctggaaggacaaggtgtcctaccgctggttcctacagcacaggccccaggtgggctacatcagggtacgattttatgaaggctctgagttggtggctgactctggcgtcaccatagacaccacaatgcgtggaggccgacttggcgttttctgcttctctcaagaaaacatcatctggtccaacctcaagtatcgctgcaatgacaccatccctgaggacttccaagagtttcaaacccagaatttcgaccgcttcgataattaaaccaaggaagcaatctgtaactgcttttcggaacactaaaaccatatatattttaacttcaattttctttagcttttaccaacccaaatatatcaaaacgttttatgtgaatgtggcaataaaggagaagagatcatttttaaaaa

SEQ ID NO: 11289 - protein, 161 aa, Homo sapiens
MGMEEEMPVMMTWMETEQTYWQATPFRAVAEPGIQLKAVKSKTGPGEHLRNSLWHTGDTSDQVRLLWKDSRNVGWKDKVSYRWFLQHRPQVGYIRVRFYEGSELVADSGVTIDTTMRGGRLGVFCFSQENIIWSNLKYRCNDTIPEDFQEFQTQNFDRFDN

SEQ ID NO: 11290 - DNA, 478 bp, Homo sapiens
taatgatctggttggggactcctgtgacaccagtcaggctgctgtggaaggactccaggaatgtgggctggaaggacaaggtgtcctaccgctggttcctacagcacaggccccaggtgggctacatcagggtacgattttatgaaggctctgagttggtggctgactctggcgtcaccatagacaccacaatgcgtggaggccgacttggcgttttctgcttctctcaagaaaacatcatctggtccaacctcaagtatcgctgcaatgacaccatccctgaggacttccaagagtttcaaacccagaatttcgaccgcttcgataattaaaccaaggaagcaatctgtaactgcttttcggaacactaaaaccatatatattttaacttcaattttctttagcttttaccaacccaaatatatcaaaacgttttatgtgaatgtggcaataaaggagaagagatcatttttaaaaa

SEQ ID NO: 11291 - protein, 109 aa, Homo sapiens
MIWLGTPVTPVRLLWKDSRNVGWKDKVSYRWFLQHRPQVGYIRVRFYEGSELVADSGVTIDTTMRGGRLGVFCFSQENIIWSNLKYRCNDTIPEDFQEFQTQNFDRFDN

SEQ ID NO: 11292 - DNA, 646 bp, Homo sapiens
attggtgacgagtgtgatgatgatgatgacaatgatggtatcccagacctggtgccccctggaccagacaactgccggctggtccccaacccagcccagttgcagaacctggcattcagctcaaggctgtgaagtctaagacaggtccaggggagcatctccggaactccctgtggcacacgggggacaccagtgaccaggtcaggctgctgtggaaggactccaggaatgtgggctggaaggacaaggtgtcctaccgctggttcctacagcacaggccccaggtgggctacatcagggtacgattttatgaaggctctgagttggtggctgactctggcgtcaccatagacaccacaatgcgtggaggccgacttggcgttttctgcttctctcaagaaaacatcatctggtccaacctcaagtatcgctgcaatgacaccatccctgaggacttccaagagtttcaaacccagaatttcgaccgcttcgataattaaaccaaggaagcaatctgtaactgcttttcggaacactaaaaccatatatattttaacttcaattttctttagcttttaccaacccaaatatatcaaaacgttttatgtgaatgtggcaataaaggagaagagatcatttttaaaaa

SEQ ID NO: 11293 - protein, 69 aa, Homo sapiens
MTPSLRTSKSFKPRISTASIIKPRKQSVTAFRNTKTIYILTSIFFSFYQPKYIKTFYVNVAIKEKRSFL

SEQ ID NO: 11294 - DNA, 548 bp, Homo sapiens
ggctggtccccaacccagcccaggaggatagcaacagcgacggagtgggagacatctcatctccggaactccctgtggcacacgggggacaccagtgaccaggtcaggctgctgtggaaggactccaggaatgtgggctggaaggacaaggtgtcctaccgctggttcctacagcacaggccccaggtgggctacatcagggtacgattttatgaaggctctgagttggtggctgactctggcgtcaccatagacaccacaatgcgtggaggccgacttggcgttttctgcttctctcaagaaaacatcatctggtccaacctcaagtatcgctgcaatgacaccatccctgaggacttccaagagtttcaaacccagaatttcgaccgcttcgataattaaaccaaggaagcaatctgtaactgcttttcggaacactaaaaccatatatattttaacttcaattttctttagcttttaccaacccaaatatatcaaaacgttttatgtgaatgtggcaataaaggagaagagatcatttttaaaaa

SEQ ID NO: 11295 - protein, 69 aa, Homo sapiens; identical to SEQ ID NO: 11293

SEQ ID NO: 11296 - DNA, 853 bp, Homo sapiens
ctcatatggtgcctgaggttttgagcttccttaaggttacttggccccttcaagactgttctgaactccctcaactctctctgcagggcatggagattgtacagaccatgaacagtgatcctggcctggcagtggggtacacagcttttaatggagttgacttcgaagggaccttccatgtgaatacccagacagatgatgactatgcaggctttatctttggctaccaagatagctccagcttctacgtggtcatgtggaagcagacggagcagacatattggcaagccaccccattccgagcagttgcagaacctggcattcagctcaaggctgtgaagtctaagacaggtccaggggagcatctccggaactccctgtggcacacgggggacaccagtgaccaggtcaggctgctgtggaaggactccaggaatgtgggctggaaggacaaggtgtcctaccgctggttcctacagcacaggccccaggtgggctacatcagggtacgattttatgaaggctctgagttggtggctgactctggcgtcaccatagacaccacaatgcgtggaggccgacttggcgttttctgcttctctcaagaaaacatcatctggtccaacctcaagtatcgctgcaatgacaccatccctgaggacttccaagagtttcaaacccagaatttcgaccgcttcgataattaaaccaaggaagcaatctgtaactgcttttcggaacactaaaaccatatatattttaacttcaattttctttagcttttaccaacccaaatatatcaaaacgttttatgtgaatgtggcaataaaggagaagagatcatttttaaaaa

SEQ ID NO: 11297 - protein, 233 aa, Homo sapiens
MVPEVLSFLKVTWPLQDCSELPQLSLQGMEIVQTMNSDPGLAVGYTAFNGVDFEGTFHVNTQTDDDYAGFIFGYQDSSSFYVVMWKQTEQTYWQATPFRAVAEPGIQLKAVKSKTGPGEHLRNSLWHTGDTSDQVRLLWKDSRNVGWKDKVSYRWFLQHRPQVGYIRVRFYEGSELVADSGVTIDTTMRGGRLGVFCFSQENIIWSNLKYRCNDTIPEDFQEFQTQNFDRFDN

SEQ ID NO: 11298 - DNA, 657 bp, Homo sapiens
aagtttttaagcatggtatctagacaaggcaactcacatgacaataagacacaaaactttctcactcaagatagcaggtttggtttggtttgatttttaactcaagtttgatagtgtgaccaacatcatgttaggccttgtgagagacagaagttgggaagaaacaccccccacccccctccacacacacacggacacacacggtccctgccctcaaggacttccagtctagtaagtaagtggcaacagctacagtacaatccaggtcagcgaaaaatggagcctaaaacagagcaaagaaagacgcagggtacgattttatgaaggctctgagttggtggctgactctggcgtcaccatagacaccacaatgcgtggaggccgacttggcgttttctgcttctctcaagaaaacatcatctggtccaacctcaagtatcgctgcaatgacaccatccctgaggacttccaagagtttcaaacccagaatttcgaccgcttcgataattaaaccaaggaagcaatctgtaactgcttttcggaacactaaaaccatatatattttaacttcaattttctttagcttttaccaacccaaatatatcaaaacgttttatgtgaatgtggcaataaaggagaagagatcatttttaaaaa

SEQ ID NO: 11299 - protein, 69 aa, Homo sapiens; identical to SEQ ID NO: 11293

SEQ ID NO: 11300 - DNA, 1906 bp, Homo sapiens
gcttcgccgaggctgatcttcgttcaagtgtgagctgcggctgagcccagcgctcgaggcgcgaggcagccaggagggcccgtgcggcgcggggagccagcgagcgcgccttcggcattggccgccgcgatgtcagctcagtgctgtgcgggccagctggcctgctgctgtgggtctgcaggctgctctctctgctgtgattgctgccccaggattcggcagtccctcagcacccgcttcatgtacgccctctacttcattctggtcgtcgtcctctgctgcatcatgatgtcaacaaccgtggctcacaagatgaaagagcacattcctttttttgaagatatgtgtaaaggcattaaagctggtgacacctgtgagaagctggtgggatattctgccgtgtatagagtctgttttggaatggcttgtttcttctttatcttctgtctactgaccttgaaaatcaacaacagcaaaagttgtagagctcatattcacaatggcttttggttctttaaacttctgctgttgggggccatgtgctcaggagctttcttcattccagatcaggacacctttctgaacgcctggcgctatgtgggagccgtcggaggcttcctcttcattggcatccagctcctcctgctcgtggagtttgcacataagtggaacaagaactggacagcaggcacagccagtaacaagctgtggtacgcctccctggccctggtgacgctcatcatgtattccattgccactggaggcttggttttgatggcagtgttttatacacagaaagacagctgcatggaaaacaaaattctgctgggagtaaatggaggcctgtgcctgcttatatcattggtagccatctcaccctgggtccaaaatcgacagccacactcggggctcttacaatcaggggtcataagctgctatgtcacctacctcaccttctcagctctgtccagcaaacctgcagaagtagttctagatgaacatgggaaaaatgttacaatctgtgtgcctgactttggtcaagacctgtacagagatgaaaacttggtgactatactggggaccagcctcttaatcggatgtatcttgtattcatgtttgacatcaacaacaagatcgagttctgacgctctgcaggggcgatacgcagctcctgaattggagatagctcgctgttgtttttgcttcagtcctggtggagaggacactgaagagcagcagccggggaaggagggaccacgggtcatttatgacgagaagaaaggcaccgtctacatctactcctacttccacttcgtgttcttcctagcttccctgtatgtgatgatgaccgtcaccaactggttcaaccatgtaagaagtgcctttcacctcctgccatgattctgaggcctccccagccatgtggaactctgagaaacctgaacggactccatttggctccttcatttgcaagacatcaagggctccttacccacccccttcctcaaggaattaacttgtgcaagctgactcccagcacatcaaagaatgcaattaactgataacatgctgtggcaagctatgtccgcagttcccaggaatttgtccagttgatattaccctaagcccctgtgtttttgtctggttgatagcacccaaagcccagcgtctatcaccttgtgatggatttaaagcccctgcacctggaactgtttgctttcctgtaaccatttgtctttttaacttcttttgcctgttttacttctgtaagactgctacagctaggctccccctcccctctctaaaccaaagtataaaacaaaatctagccccttcttcagggccgagagaattttgagcactagccgtctctcggtcgctggctaataaaggactcctcaattcg

SEQ ID NO: 11301 - protein, 423 aa, Homo sapiens; identical to SEQ ID NO: 1048

SEQ ID NO: 11302 - DNA, 895 bp, Homo sapiens
aaatccacagtaatctttgacctgacgtccttgagctgctgaaccaacatcccagattggctttctttctatgtctgtgatgcttaaaacagtcactaacaacatctttcaagtttccaaactccttggttcaagacagcagccatttcgaagaaatttccagaaagacactgattgtccagcttagatggaaagtccactcttggatcaattaactgaagctatgacaggagagttgtatggaaaacacatggctgctcctactagaaaacttcccaaaatatgaaggagggaaaagcagggaggaggtgccgctgtgaagacgtaatgctttttcagacccactcaggcacagggcgccagtccctgccccggggacactgttcaaaagatggcactttccaggctgtaggcccacaaagcccaggggaccgccgatatcatcacacagagaactcccgggtggggcagcagaggggagcgaccagcgtacacaggtacaacagcacgcatatccagcaggaggccatcttgacccagaagatggaccagctcccgctgaagaagctctcgatgttggcactttcgtagctgtggaaacaagacacctagccgcggtcaaagcaggaatatattgagatacaattcactaattcacatccatttataatgtataattcaacggctttcaatgtattcatacacagacttgtgctaccatcaacactacccatttccaaacattctcatcacccccaaaagaaatcatgcaccccttaggtgctctccccttccccatggccccctcagcccaccccccgcattcaccaatctactttctgcctctatgaatttgcctattctggacagttgatataaaaggaatcacatggtc

SEQ ID NO: 11303 - protein, 102 aa, Homo sapiens
MKEGKAGRRCRCEDVMLFQTHSGTGRQSLPRGHCSKDGTFQAVGPQSPGDRRYHHTENSRVGQQRGATSVHRYNSTHIQQEAILTQKMDQLPLKKLSMLALS

SEQ ID NO: 11304 - DNA, 1157 bp, Homo sapiens
ctgaggtaccatagtggagattggtaagggctggtctgatattcccaaaagatgtcaattttcaaagttgatagctactaaaaaaaaaatctgtctaaataccagcaacaaacattgttattgaattcgtaaaccacaaaactgcagtgtatggtgggatgagaacatataaaactgcagcccctacaaagtggagatgaggatgaccactctgctctgtagcgtacttctgtaatctgtaggcaagagcacactctgtgggctgggccccctaggagttagttcccccggggtccatgtgattgatgtttgctgtaattactcactgcagctcttcgaggggtcagctttaagaacactaaattcaggctttgtagggcctgggaataaaaggaatgctgtaggggtgggagttagcccaactagggttttttcagatctggacttctgaagagtttgttttccttcctgactcagaggaatgaaaggttggaggatgttacaaaaaggccacatcgtccgtgtgggaactgtcatttgaacataattgcaggaatatctaggattcttgatagaaattgcaggaagccagagactatagatagtatgtaagttaaaaggagaagaaggccaagattgcctggggtccactcttgtaaagttgtagaagactggaaatctccctagctcctctctttcccttcgccctccagagcccccaagccccacccccaaatacttgtttcctttggggtatctccatcctgactcttgcagctggggtactctctaggagtatgttttaatgtttgtagcctcagctcagaagaagggctcaacccaaacctactccctgcctttctgcctggggctgccttctctccagagcctccttccattgcacccaggaatcattgctgtgaaagaacatcatagcttggaccccatgtaagccctaaccttggtccacttgtgggagttctctgatagctctttttatttttttagataaaaaaaaatgttttaaggcaagttctcactatgttacccaggctggacaggagaatcgtttgaacccagaagacagaggttgtggtgagccgacatcgagccattgcactacagcctgggcaaaaagagtgaaactccatctccag

SEQ ID NO: 11305 - protein, 48 aa, Homo sapiens
MFVASAQKKGSTQTYSLPFCLGLPSLQSLLPLHPGIIAVKEHHSLDPM

SEQ ID NO: 11306 - DNA, 1789 bp, Homo sapiens
tccctcttacccacttcccggagaaacaggacagcaggcacagccagtaacaagctgtggtacgcctccctggccctggtgacgctcatcatgtattccattgccactggaggcttggttttgatggcagtgttttatacacagaaagacagctgcatggaaaacaaaattctgctgggagtaaatggaggcctgtgcctgcttatatcattggtagccatctcaccctgggtccaaaatcgacagccacactcggggctcttacaatcaggggtcataagctgctatgtcacctacctcaccttctcagctctgtccagcaaacctgcagaagtaggtaagccagcctgttagtgggcttgtgtttgcggtgtgaatattttcattcatggaggaatgagctattgtttaaatattggagaggccttggagatagagagcagaaagatggttaccagaggctgggaagggtttgggaggaggttaggatgattaatgggtacaaaataaataggaagaatgaataagacctagtatttgatagcacaacagggtgactatagtcaaatttaattgtacatttaaaaataactaaaagagtataattggattgcttgtataacacaaaagatcagtgcatgaggggatgggtaccccattttagatgacgtgattgttacatgtttcacacctgtattaaaacatctcatgtaccacagaaatatgtacgcctactatgtatccacaaaaattaagttaaaaaataaaaataaacgttagaaatgtaccaaatcacagtagagagatgatctagactttttcatgaaaaagtctttaacttgagctatgtaaaggaaaattccctttttcgattcttcctggtgtgtaggacagacaggaggaaaggtttggctgtggagtttgcttttaggcctaaataacctctttagttgtatttcttttcttttctgactatagcagtggaataaagagtggaaagaatgtgggggagtggggagcagggagcaggatctgagcacagatccatgatttactggctatgtgacctcaaaccactcgtcttaaatgacatttatttacagagacaacagaacatagtgattagagcatgagctttgaagtcggactgcctggtttatagactgatcctgctacttaagtaacttgcagaaacttacttatcctctctattacttatgtgatgtataaatgtaaatatacacagacatacatacatatatacatacatacacataagcatatataaatgtatgtttgagtatatttgagcttatataagtcaaataaatgtagtgtctaagagaattgaagttgtttcctcttttaaatttggaaagctggtgcagtgataattttgaaagttttagcatatacacatagtatttatgggtttgtccttgttgctgtttatagtggaaagtaatgtaagtggaggtcttaagtaactattgcctaacctggatttaagttttttttttaaatactctatcttgactctgtaagtttacataaatttagtctctttaagactttcttttatgactgtttatgtattaatttctggctttaacttactgggatttttatttacaatattttttaaatggcaggtatccctttaaaacagaaaaaaaaggctgagcgtggtggcacatgcctgtaatctaagcaccttgggaggctgaggcaggaagattgcttgcagccaggagctgagaccagccttggcaacatagcatctctacaa

SEQ ID NO: 11307 - protein, 87 aa, Homo sapiens
MYSIATGGLVLMAVFYTQKDSCMENKILLGVNGGLCLLISLVAISPWVQNRQPHSGLLQSGVISCYVTYLTFSALSSKPAEVGKPAC

SEQ ID NO: 11308 - DNA, 820 bp, Homo sapiens
tctgaaccccaaggacaactgcgagaagatgacttagatcatgtttgagaccttcacaccccagccatatacgtggccatccaggccgtgctgtccctgtacgcctctggccatagctggcattgtgatggactccggtgatggggtcaccaacactgtgcccatctatgaagggtacacccctcccccacaccatcctgtgtctggacctgactggccggaacctgactgactacctcatgaagatcctcacccagtgtggctacagcttcaccaccacagtcatgcaggaaattgtgtgtgacatcaagaaaaggctgtgctacatccccctggactttgagcaggagatggccatggtgggctccagctcctccctggagaagagctacaagctgcccaatggccaggtcatcaccattagcaacaagtggttctgctgccccgaggcactcttccaaacttccttcgtgggcatggaatcctgtggcatccacgaaactaccttcaactccatcatgaagtcggatgtggacatctacaaagacctgtatgccaacacagtgctgtctggcagcaccaccatgtaccctagcatcaccaacaggatgcagaaggagattaccgccctggcgcccagcgcaatgaagatcaagatcattgctcctcctgagtgcaagtactctgtgtggatcagaggctccatcctggcctcgctgtccaccttccagcagatgtggatcagcaagcaggagtacagtgagtccagcccctccatcgtccaccgcaaatgcttctaggtggactgtgacttagttgc

SEQ ID NO: 11309 - protein, 219 aa, Homo sapiens [sequence omitted]

SEQ ID NO: 11310 - DNA, 1780 bp, Homo sapiens
atgaaaggatggggacctcaccagagaggactggtctcagcaatgtccttaagtggtcaaaacatgctgcggttgagtctccacccacatttgcacaaaggaccatcacctgtccttcctggaatctctaaagttttctgctttccttctgtcctgatggccagctctgctaagtcagctgagatgcccaccatctccaaaaccgttaaccctactcctgatcctcatcaagaatatctggaccctaggattaccattgccttattcgaaattggatcacattccccttcctcctggggctctctccctttcctaaagaatagcagccatcaagttacagaacaacagactgcacagaagtttaacaatctcttaaaagaaattaaagatattcttaaaaatatggcaggttttgaagagaagatcacagaagcaaaagaactttttgaggaaaccaatattactgaggatgtgtcagcccacaaagaaaatatcagaggacttgacaaaatcaatgaaatgttatcaacaaacctgcctgttagtttagccccagagaaagaagacaatgaaaagaaacaggagatgatattggaaaccaatattactgaggatgtgtcagcccacaaagaaaatatcagaggacttgacaaaatcaatgaaatgttatcaacaaacctgcctgttagtttagccccagagaaagaagacaatgaaaagaaacagcagatgataatggaaaaccagaactctgagaacaccgcacaagtttttgcaagagatttggtaaatcgtttagaagaaaaaaaagtccttaacgaaactcaacaaagtcaggaaaaagcaaaaaacagacttaatgttcaagaagaaactatgaaaattaggaacaacatggagcagttactacaggaagcagaacactggagtaaacaacatactgagctcagtaaactgataaaatcctatcagaaatctcagaaagacataagtgaaactcttggaaataatggagtcggtttccaaacccagccaaataatgaagtgtcggctaagcatgagctggaggaacaggtgaagaaactgagccatgacacctattcattgcagttgatggcagctttgctagagaatgaatgccaaatcttacagcagagagtagagattctcaaggaactccatcatcagaaacagggaactctgcaagagaagccaattcagataaactataaacaggacaagaaaaatcagaagccatcagaagcaaagaaagtagaaatgtataagcagaacaagcaagcaatgaagggtacattttggaaaaaagacagatcctgtagaagcctggatgtttgtcttaataagaaagcttgcaatacccagttcaatattcatgttgcaagaaaagctcttaggggaaaaatgaggtcagctagcagcctaagatagaaaataccaaaagcagatgaaaaggtgaatccttaaaaaactacatctgttacctccaacttgtcagtcatgatcaatcatcaaaccttgggcagatctgctggttcaaccaagaaagagctatagaataaggagattgacacttatattactcattacttcagcagttatgtaagtctggtctttaatgaccattgtgtctacatcaagttcataacttttcacctttacaatctgcttgttttttttgtaattattagatagacagcctagagtgagaagttaaaggtccaattaagtaaagatctaaataaaaaccagaatacaaggg

SEQ ID NO: 11311 - protein, 482 aa, Homo sapiens
MKGWGPHQRGLVSAMSLSGQNMLRLSLHPHLHKGPSPVLPGISKVFCFPSVLMASSAKSAEMPTISKTVNPTPDPHQEYLDPRITIALFEIGSHSPSSWGSLPFLKNSSHQVTEQQTAQKFNNLLKEIKDILKNMAGFEEKITEAKELFEETNITEDVSAHKENIRGLDKINEMLSTNLPVSLAPEKEDNEKKQEMILETNITEDVSAHKENIRGLDKINEMLSTNLPVSLAPEKEDNEKKQQMIMENQNSENTAQVFARDLVNRLEEKKVLNETQQSQEKAKNRLNVQEETMKIRNNMEQLLQEAEHWSKQHTELSKLIKSYQKSQKDISETLGNNGVGFQTQPNNEVSAKHELEEQVKKLSHDTYSLQLMAALLENECQILQQRVEILKELHHQKQGTLQEKPIQINYKQDKKNQKPSEAKKVEMYKQNKQAMKGTFWKKDRSCRSLDVCLNKKACNTQFNIHVARKALRGKMRSASSLR

SEQ ID NO: 11312 - DNA, 1869 bp, Homo sapiens
gaataaacaccgggtgcctagaggagaagagatggagccccagccttggtcccctttcccacccttcctccccacaaggctgtctgagatgccaccttccacctaaacatcatctcccaaattttaatccttaactttggtctctgacttctgcttgattccacagtctccacccacatttgcacaaaggaccatcacctgtccttcctggaatctctaaagttttctgctttccttctgtcctgatggccagctctgctaagtcagctgagatgcccaccatctccaaaaccgttaaccctactcctgatcctcatcaagaatatctggaccctaggattaccattgccttattcgaaattggatcacattccccttcctcctggggctctctccctttcctaaagaatagcagccatcaagttacagaacaacagactgcacagaagtttaacaatctcttaaaagaaattaaagatattcttaaaaatatggcaggttttgaagagaagatcacagaagcaaaagaactttttgaggaaaccaatattactgaggatgtgtcagcccacaaagaaaatatcagaggacttgacaaaatcaatgaaatgttatcaacaaacctgcctgttagtttagccccagagaaagaagacaatgaaaagaaacaggagatgatattggaaaccaatattactgaggatgtgtcagcccacaaagaaaatatcagaggacttgacaaaatcaatgaaatgttatcaacaaacctgcctgttagtttagccccagagaaagaagacaatgaaaagaaacagcagatgataatggaaaaccagaactctgagaacaccgcacaagtttttgcaagagatttggtaaatcgtttagaagaaaaaaaagtccttaacgaaactcaacaaagtcaggaaaaagcaaaaaacagacttaatgttcaagaagaaactatgaaaattaggaacaacatggagcagttactacaggaagcagaacactggagtaaacaacatactgagctcagtaaactgataaaatcctatcagaaatctcagaaagacataagtgaaactcttggaaataatggagtcggtttccaaacccagccaaataatgaagtgtcggctaagcatgagctggaggaacaggtgaagaaactgagccatgacacctattcattgcagttgatggcagctttgctagagaatgaatgccaaatcttacagcagagagtagagattctcaaggaactccatcatcagaaacagggaactctgcaagagaagccaattcagataaactataaacaggacaagaaaaatcagaagccatcagaagcaaagaaagtagaaatgtataagcagaacaagcaagcaatgaagggtacattttggaaaaaagacagatcctgtagaagcctggatgtttgtcttaataagaaagcttgcaatacccagttcaatattcatgttgcaagaaaagctcttaggggaaaaatgaggtcagctagcagcctaagatagaaaataccaaaagcagatgaaaaggtgaatccttaaaaaactacatctgttacctccaacttgtcagtcatgatcaatcatcaaaccttgggcagatctgctggttcaaccaagaaagagctatagaataaggagattgacacttatattactcattacttcagcagttatgtaagtctggtctttaatgaccattgtgtctacatcaagttcataacttttcacctttacaatctgcttgttttttttgtaattattagatagacagcctagagtgagaagttaaaggtccaattaagtaaagatctaaataaaaaccagaatacaaggg

SEQ ID NO: 11313 - protein, 430 aa, Homo sapiens
MASSAKSAEMPTISKTVNPTPDPHQEYLDPRITIALFEIGSHSPSSWGSLPFLKNSSHQVTEQQTAQKFNNLLKEIKDILKNMAGFEEKITEAKELFEETNITEDVSAHKENIRGLDKINEMLSTNLPVSLAPEKEDNEKKQEMILETNITEDVSAHKENIRGLDKINEMLSTNLPVSLAPEKEDNEKKQQMIMENQNSENTAQVFARDLVNRLEEKKVLNETQQSQEKAKNRLNVQEETMKIRNNMEQLLQEAEHWSKQHTELSKLIKSYQKSQKDISETLGNNGVGFQTQPNNEVSAKHELEEQVKKLSHDTYSLQLMAALLENECQILQQRVEILKELHHQKQGTLQEKPIQINYKQDKKNQKPSEAKKVEMYKQNKQAMKGTFWKKDRSCRSLDVCLNKKACNTQFNIHVARKALRGKMRSASSLR

SEQ ID NO: 11314 - DNA, 1721 bp, Homo sapiens
aaacaccgggtgcctagaggagaagagatggagccccagccttggtcccctttcccacccttcctccccacaaggctgtctgagatgccaccttccacctaaacatcatctcccaaattttaatccttaactttggtctctgacttctgcttgattccacagtctccacccacatttgcacaaaggaccatcacctgtccttcctggaatctctaaagttttctgctttccttctgtcctgatggccagctctgctaagtcagctgagatgcccaccatctccaaaaccgttaaccctactcctgatcctcatcaagaatatctggaccctaggattaccattgccttattcgaaattggatcacattccccttcctcctggggctctctccctttcctaaagaatagcagccatcaagttacagaacaacagactgcacagaagtttaacaatctcttaaaagaaattaaagatattcttaaaaatatggcaggttttgaagagaagatcacagaagcaaaagaactttttgaggaaaccaatattactgaggatgtgtcagcccacaaagaaaatatcagaggacttgacaaaatcaatgaaatgttatcaacaaacctgcctgttagtttagccccagagaaagaagacaatgaaaagaaacagcagatgataatggaaaaccagaactctgagaacaccgcacaagtttttgcaagagatttggtaaatcgtttagaagaaaaaaaagtccttaacgaaactcaacaaagtcaggaaaaagcaaaaaacagacttaatgttcaagaagaaactatgaaaattaggaacaacatggagcagttactacaggaagcagaacactggagtaaacaacatactgagctcagtaaactgataaaatcctatcagaaatctcagaaagacataagtgaaactcttggaaataatggagtcggtttccaaacccagccaaataatgaagtgtcggctaagcatgagctggaggaacaggtgaagaaactgagccatgacacctattcattgcagttgatggcagctttgctagagaatgaatgccaaatcttacagcagagagtagagattctcaaggaactccatcatcagaaacagggaactctgcaagagaagccaattcagataaactataaacaggacaagaaaaatcagaagccatcagaagcaaagaaagtagaaatgtataagcagaacaagcaagcaatgaagggtacattttggaaaaaagacagatcctgtagaagcctggatgtttgtcttaataagaaagcttgcaatacccagttcaatattcatgttgcaagaaaagctcttaggggaaaaatgaggtcagctagcagcctaagatagaaaataccaaaagcagatgaaaaggtgaatccttaaaaaactacatctgttacctccaacttgtcagtcatgatcaatcatcaaaccttgggcagatctgctggttcaaccaagaaagagctatagaataaggagattgacacttatattactcattacttcagcagttatgtaagtctggtctttaatgaccattgtgtctacatcaagttcataacttttcacctttacaatctgcttgttttttttgtaattattagatagacagcctagagtgagaagttaaaggtccaattaagtaaagatctaaataaaaaccagaatacaaggg

SEQ ID NO: 11315 - protein, 382 aa, Homo sapiens [sequence omitted]

SEQ ID NO: 11316 - DNA, 879 bp, Homo sapiens
gctgtggcggcggcaacatggcggacgtgataaatgtcagtgtgaacctggaggccttttcccaggccattagtgccatccaggcgctgcgctccagcgtgagcaggttgttcgactgcctgaaggatgggatgcggaacaaggagacgctggagggccgggagaaggccttcattgcgcacttccaggacaacttacattcggtcaaccgggacctcaatgagctggaacgtctgagcaatctggtaggcaagccatctgagaaccatcctcttcataacagtgggctgttaagcctggatcctgtgcaggacaaaactcctctctatagtcaactccttcaagcatataagtggtcaaacaagttgcagtaccatgcaggactagcatctggccttttaaatcagtagtcgttgaagcgttccgctaatcagatgggagtatctgccaaaagtagaccaaaggctcagcccacaactcttgtcctaccacctcaatatgttgatgatgtgatcagccgcattgacaggatgtttcctgaaatgtccatccacttatccagacccaatggaacatcagcaatgcttctgcttgatatatggtccaaatccaactatcaagtattccagaaggtgacagaccacgccaccacggccctgctccactatcagctgccccagatgccggatgtcgtagtccgatccttcatgacctggttaagaagttacataaagctgttccaggccccatgccagcactgcgggaagtttctgcaggacggccttcccccgacatggagggatttccgaaccctcgaagccttccatgacacctgccggcagtaagcccccacgctggccccagcgtgagaccccaccc

SEQ ID NO: 11317 - protein, 136 aa, Homo sapiens
MGVSAKSRPKAQPTTLVLPPQYVDDVISRIDRMFPEMSIHLSRPNGTSAMLLLDIWSKSNYQVFQKVTDHATTALLHYQLPQMPDVVVRSFMTWLRSYIKLFQAPCQHCGKFLQDGLPPTWRDFRTLEAFHDTCRQ

SEQ ID NO: 11318 - DNA, 6680 bp, Homo sapiens
ccggtggggcggggaaagaagccctgagccgggatctggcactcccaggactcccggccggggtagctcttcactcctcagcgcgacgtcgtgtcgagttcccaaaaagctccgcaggggctgtagggaggtgatctcatccattaacagctgtgtgttgccagttcccaaatctttatctatctcagacttctctcctgcattccagattcttatattcagctgccttttggatatctctcccaggatgttctcaaggcatacaagaattaaattctgaataagtctgcaggtaggatggacagttattttaaagcagctgtcagtgacttggacaaactccttgatgattttgaacagaacccagatgaacaagattatctccaagatgtacaaaatgcatatgattctaaccactgctcagtttcttcagagttggcttcctcacagcgaacttcattgctcccaaaagaccaagagtgcgttaatagttgtgcctcatcagaaacaagctatggaacaaatgagagttccctgaatgaaaaaacactcaagggacttacttctatacaaaatgaaaaaaatgtaacaggacttgatcttctttcttctgtggatggtggtacttcagatgaaatccagccgttatatatgggacgatgtagtaaacctatctgtgatctgataagtgacatgggtaacttagttcatgcaaccaatagtgaagaagatattaaaaaattattgccagatgattttaagtctaatgcagattccttgattggattggatttatcttcagtgtcagatactccctgtgtttcttcaacagaccatgatagtgatactgtcagagaacaacagaatgatatcagttctgaattacaaaatagagaaatcggaggaatcaaagaattgggtataaaagtagatacaacactttcagattcctataattacagtggaacagaaaatttaaaagataaaaagatctttaatcagttagaatcaattgttgattttaacatgtcatctgctttgactcgacaaagttccaaaatgtttcatgccaaagacaagctacaacacaagagccagccatgtggattactaaaagatgttggcttagtaaaagaggaagtagatgtggcagtcataactgccgcagaatgtttaaaagaagagggcaagacaagtgctttgacctgcagccttccgaaaaatgaagatttatgcttaaatgattcaaattcaagagatgaaaatttcaaattacctgacttttcctttcaggaagataagactgttataaaacaatctgcacaagaagactcaaaaagtttagaccttaaggataatgatgtaatccaagattcctcttcagctttacatgtttccagtaaagatgtgccgtcctcattgtcctgtcttcctgcgtctgggtctatgtgtggatcattaattgaaagtaaagcacggggtgattttttacctcagcatgaacataaagataatatacaagatgcagtgactatacatgaagaaatacagaacagtgttgttctaggtggggaaccattcaaagagaatgatcttttgaaacaggaaaaatgtaaaagcatactccttcagtcattaattgaagggatggaagacagaaagatagatcctgaccagacagtaatcagagctgagtctttggatggtggtgacaccagttctacagttgtagaatctcaagaggggctttctggcactcatgtcccagagtcttctgattgttgtgaaggttttattaatactttttcaagcaatgatatggatgggcaagacttagattactttaatattgatgaaggcgcaaaaagtggcccactaattagtgatgctgaacttgatgcctttctgacagaacagtatcttcagaccactaacataaagtcttttgaagaaaatgtaaatgactctaaatcgcaaatgaatcagatagatatgaaaggcttagatgatggaaacatcaataatatatatttcaatgcagaagcaggagctattggggaaagtcatggtattaatataatttgtgaaatagttgataaacaaaatacaatagaaaatggcctttctttaggagaaaaaagcactattccagttcaacaagggttacctaccagtaagtctgagattacaaatcaattatcggtctctgatattaacagtcaatctgttggaggggccagacctaagcaattgtttagccttccatcaagaacaaggagttcaaaggacctgaataagccagatgttccagatacaatagaaagtgaacccagcacagcagataccgttgttccaatcacttgtgctatagattctacagctgatccacaggttagcttcaactctaattacattgatatagaaagtaattctgaaggtggatctagtttcgtaactgcaaatgaagattctgtacctgaaaacacttgcaaagaaggcttggttttgggccagaaacagcctacttgggttcctgattcagaagctccaaactgtatgaactgccaagtcaaatttacttttaccaaacggcgacaccattgccgagcatgtgggaaagtattttgtggtgtctgttgtaataggaagtgtaaactgcaatatctagaaaaggaagcaagagtatgtgtagtctgctatgaaactattagtaaagctcaggcatttgaaaggatgatgagtccaactggttctaatcttaagtctaatcattctgatgaatgtactactgtccagcctcctcaggagaaccaaacatccagtataccttcaccagcaactttgccagtctcagcacttaaacaaccaggtgttgaaggactatgttccaaagaacagaagagagtatggtttgcagatggtatattgcccaatggtgaagttgcagatacaacaaaattatcatctggaagtaaaagatgttctgaagactttagtcctctctcacctgatgtgcctatgacagtaaacacagtggatcattcccattctactacagtggaaaagccaaacaatgagacaggagatattacaagaaatgagataattcagagtcctatttctcaggttccatcagtggaaaaattgtctatgaacacaggaaatgaggggttacctacttctggttcatttacactagatgatgatgtttttgcagaaactgaagaaccatctagtcctactggtgtcttagttaacagcaatttacctattgctagtatttcagattataggttactgtgtgatattaacaagtatgtctgcaataagattagtcttctacctaatgatgaggacagtttgcccccacttctggttgcatctggagaaaagggatcagtgcctgtagtagaagaacatccatctcatgagcagatcattttgcttcttgaaggtgaaagctttcatcctgttacatttgtcctaaatgctaatctactcgtgaatgtcaaattcatattttattcctcagacaaatattggtacttttcaaccaatggattgcatggcttgggacaggcagaaattattattctattgttatgtttgccaaatgaagatactattcctaaggacatcttcagactatttatcaccatatataaggatgctctaaaaggaaaatacatagaaaacttggacaatattacctttactgagagttttctcagtagcaaggatcacggaggattcctgtttattacacctacttttcagaaacttgatgatctctcattaccaagtaatccttttctttgtggaattcttatccagaagcttgagattccctgggcaaaggtttttcctatgcgtttaatgttgagattgggtgcagaatataaagcatatcctgctcctctaacaagcatcagaggccgaaaacctctttttggagaaataggacacactattatgaacttacttgttgaccttcgaaattaccagtataccttgcataatatagatcaactgttgattcatatggaaatgggaaaaagctgcataaaaataccacggaaaaagtacagtgatgtaatgaaagtactaaattcttccaatgagcatgtcattagcattggagcaagtttcagtacagaagcagattctcatctagtctgtatacagaatgatggaatttatgaaacacaggccaacagtgccactggccatcctagaaaagtgacaggtgcaagttttgtggtattcaatggagctctaaaaacatcttcaggatttcttgctaagtccagcatagttgaagatggcttaatggtacaaataactccagagaccatgaatggcttgcggctagctttacgagaacagaaagactttaaaattacatgtgggaaagttgatgcagtagacctgagagaatacgtggatatctgctgggtagatgctgaagaaaaaggaaacaaaggagttatcagttcagtggatggaatatcattacaaggatttccaagtgaaaaaataaaactggaagcagattttgaaaccgatgagaagattgtaaaatgtaccgaggtgttctactttctaaaggaccaggatttatctattttatcaacttcttatcagtttgcaaaagaaatagccatggcttgtagtgctgcgctgtgccctcacctgaaaactctaaaaagtaatgggatgaataaaattggactcagagtttccattgacactgatatggttgaatttcaggcaggatctgaaggccaacttctgcctcagcattatctaaatgatcttgatagtgctctgatacctgtgatccatggtgggacctccaactctagtttaccattagaaatagaattagtgtttttcattatagaacatcttttttagtgaaagaatgtgccatattacatattgcaacctaatttgttaaaactaactccagcactaaagctgaaatgccacaaacactaaaagtataaatatgtctgatttttgaaacacataagctttgctctttaggcaggaatgatcttttcaaatcattagcacaatatttaaatatctaaaaatttaagagatccatactttctgtagctttacaattaatttaagtactaaaaagacaaggatttcttttaagaaatttatagcatttactgtgttatttaaatgctaagccaaagtatctgcacttaggtatacctctttatgccaataatgattttaatgaaggctcttttcagatgtaaccttatgaaggaaatatctgctttgtgtatatgccagttagaatactggtttctaaagtctgtcaaattgtatttcagtggcacaaaaaccagttttgaggtcttagacttataattctttgaataaaactgataacttatttgtataattggagtggagacctacctccataattagataaactctttttggattataatcagaattttgccttttttcttctcaaattattacatatgtatgtattatatatccacatatatagttttccctgattaaatggatattaaaataattgcgggtgcttcaggactttttgcttctatatttaagtatattgtttttatagcaagaacatattctgaatgttttataaatctttaataatttatatgtaggtaatatttttgtatcacaatgcattatttttttcctcctttccttccaaactataccactgtatttaccacttctaagagtgactgacgacgggccagatgacccttgaagtagtcattatgtagcaataaatgaagcctgaaacaggtttttttacttccactttaatccttagaaatttcttggcaacttcgcatattttcattgacaccagtgtataagtataaatttaaatgaactaattacttttgcatattttaaattctttatatggtagttattttttataacaggatattaacataagttaaatcctatgtatttgaaattgttacagagctttcctctttacttcaaacagcaaaaaagtggggggcatattgtagtcctgtcatttaagttatgtaaaaaatttaatcattattttgatgctttaaacattctcatgtgtaatatatgtttttgtatcaaaaacactcatatatttcaagaaaaagaaattatgttaaatagccctgttttaagaaaaatatttatgaagcatctcaacttgaagatcaagtcaaagttataactcaggatctgaggtctcaagctaggagagactgagaattttaatcagtttgggcatatagtttggactgaatcacatctgtagtacttagccaaagacaatttggaggagaatatcagccttctggaagtagctacttcctgaacaatgtaaagtgtcgcagatattcaataaaatggcaacctgttataatttgtgaaatttattgaaatggtgtaagatgaaaacaattgcatatcaaacccaatttatgttttctaaatatagtgtatgtattctgccatgtaagtaattgaacagtcttaaaataaccaaatggtagagggctgttccatgatgggacagctttggatttgttttcataaaatctctatattcaataaaaattggaattatgtgcctgaagtttggaggcacattttgaagt

SEQ ID NO: 11319 - protein, 1539 aa, Homo sapiens
MDSYFKAAVSDLDKLLDDFEQNPDEQDYLQDVQNAYDSNHCSVSSELASSQRTSLLPKDQECVNSCASSETSYGTNESSLNEKTLKGLTSIQNEKNVTGLDLLSSVDGGTSDEIQPLYMGRCSKPICDLISDMGNLVHATNSEEDIKKLLPDDFKSNADSLIGLDLSSVSDTPCVSSTDHDSDTVREQQNDISSELQNREIGGIKELGIKVDTTLSDSYNYSGTENLKDKKIFNQLESIVDFNMSSALTRQSSKMFHAKDKLQHKSQPCGLLKDVGLVKEEVDVAVITAAECLKEEGKTSALTCSLPKNEDLCLNDSNSRDENFKLPDFSFQEDKTVIKQSAQEDSKSLDLKDNDVIQDSSSALHVSSKDVPSSLSCLPASGSMCGSLIESKARGDFLPQHEHKDNIQDAVTIHEEIQNSVVLGGEPFKENDLLKQEKCKSILLQSLIEGMEDRKIDPDQTVIRAESLDGGDTSSTVVESQEGLSGTHVPESSDCCEGFINTFSSNDMDGQDLDYFNIDEGAKSGPLISDAELDAFLTEQYLQTTNIKSFEENVNDSKSQMNQIDMKGLDDGNINNIYFNAEAGAIGESHGINIICEIVDKQNTIENGLSLGEKSTIPVQQGLPTSKSEITNQLSVSDINSQSVGGARPKQLFSLPSRTRSSKDLNKPDVPDTIESEPSTADTVVPITCAIDSTADPQVSFNSNYIDIESNSEGGSSFVTANEDSVPENTCKEGLVLGQKQPTWVPDSEAPNCMNCQVKFTFTKRRHHCRACGKVFCGVCCNRKCKLQYLEKEARVCVVCYETISKAQAFERMMSPTGSNLKSNHSDECTTVQPPQENQTSSIPSPATLPVSALKQPGVEGLCSKEQKRVWFADGILPNGEVADTTKLSSGSKRCSEDFSPLSPDVPMTVNTVDHSHSTTVEKPNNETGDITRNEIIQSPISQVPSVEKLSMNTGNEGLPTSGSFTLDDDVFAETEEPSSPTGVLVNSNLPIASISDYRLLCDINKYVCNKISLLPNDEDSLPPLLVASGEKGSVPVVEEHPSHEQIILLLEGESFHPVTFVLNANLLVNVKFIFYSSDKYWYFSTNGLHGLGQAEIIILLLCLPNEDTIPKDIFRLFITIYKDALKGKYIENLDNITFTESFLSSKDHGGFLFITPTFQKLDDLSLPSNPFLCGILIQKLEIPWAKVFPMRLMLRLGAEYKAYPAPLTSIRGRKPLFGEIGHTIMNLLVDLRNYQYTLHNIDQLLIHMEMGKSCIKIPRKKYSDVMKVLNSSNEHVISIGASFSTEADSHLVCIQNDGIYETQANSATGHPRKVTGASFVVFNGALKTSSGFLAKSSIVEDGLMVQITPETMNGLRLALREQKDFKITCGKVDAVDLREYVDICWVDAEEKGNKGVISSVDGISLQGFPSEKIKLEADFETDEKIVKCTEVFYFLKDQDLSILSTSYQFAKEIAMACSAALCPHLKTLKSNGMNKIGLRVSIDTDMVEFQAGSEGQLLPQHYLNDLDSALIPVIHGGTSNSSLPLEIELVFFIIEHLF

SEQ ID NO: 11320 - DNA, 7876 bp, Homo sapiens
ccggtggggcggggaaagaagccctgagccgggatctggcactcccaggactcccggccggggtagctcttcactcctcagcgcgacgtcgtgtcgagttcccaaaaagctccgcaggggctgtagggaggtgatctcatccattaacagctgtgtgttgccagttcccaaatctttatctatctcagacttctctcctgcattccagattcttatattcagctgccttttggatatctctcccaggatgttctcaaggcatacaagaattaaattctgaataagtctgcaggtaggatggacagttattttaaagcagctgtcagtgacttggacaaactccttgatgattttgaacagaacccagatgaacaagattatctccaagatgtacaaaatgcatatgattctaaccactgctcagtttcttcagagttggcttcctcacagcgaacttcattgctcccaaaagaccaagagtgcgttaatagttgtgcctcatcagaaacaagctatggaacaaatgagagttccctgaatgaaaaaacactcaagggacttacttctatacaaaatgaaaaaaatgtaacaggacttgatcttctttcttctgtggatggtggtacttcagatgaaatccagccgttatatatgggacgatgtagtaaacctatctgtgatctgataagtgacatgggtaacttagttcatgcaaccaatagtgaagaagatattaaaaaattattgccagatgattttaagtctaatgcagattccttgattggattggatttatcttcagtgtcagatactccctgtgtttcttcaacagaccatgatagtgatactgtcagagaacaacagaatgatatcagttctgaattacaaaatagagaaatcggaggaatcaaagaattgggtataaaagtagatacaacactttcagattcctataattacagtggaacagaaaatttaaaagataaaaagatctttaatcagttagaatcaattgttgattttaacatgtcatctgctttgactcgacaaagttccaaaatgtttcatgccaaagacaagctacaacacaagagccagccatgtggattactaaaagatgttggcttagtaaaagaggaagtagatgtggcagtcataactgccgcagaatgtttaaaagaagagggcaagacaagtgctttgacctgcagccttccgaaaaatgaagatttatgcttaaatgattcaaattcaagagatgaaaatttcaaattacctgacttttcctttcaggaagataagactgttataaaacaatctgcacaagaagactcaaaaagtttagaccttaaggataatgatgtaatccaagattcctcttcagctttacatgtttccagtaaagatgtgccgtcctcattgtcctgtcttcctgcgtctgggtctatgtgtggatcattaattgaaagtaaagcacggggtgattttttacctcagcatgaacataaagataatatacaagatgcagtgactatacatgaagaaatacagaacagtgttgttctaggtggggaaccattcaaagagaatgatcttttgaaacaggaaaaatgtaaaagcatactccttcagtcattaattgaagggatggaagacagaaagatagatcctgaccagacagtaatcagagctgagtctttggatggtggtgacaccagttctacagttgtagaatctcaagaggggctttctggcactcatgtcccagagtcttctgattgttgtgaaggttttattaatactttttcaagcaatgatatggatgggcaagacttagattactttaatattgatgaaggcgcaaaaagtggcccactaattagtgatgctgaacttgatgcctttctgacagaacagtatcttcagaccactaacataaagtcttttgaagaaaatgtaaatgactctaaatcgcaaatgaatcagatagatatgaaaggcttagatgatggaaacatcaataatatatatttcaatgcagaagcaggagctattggggaaagtcatggtattaatataatttgtgaaatagttgataaacaaaatacaatagaaaatggcctttctttaggagaaaaaagcactattccagttcaacaagggttacctaccagtaagtctgagattacaaatcaattatcggtctctgatattaacagtcaatctgttggaggggccagacctaagcaattgtttagccttccatcaagaacaaggagttcaaaggacctgaataagccagatgttccagatacaatagaaagtgaacccagcacagcagataccgttgttccaatcacttgtgctatagattctacagctgatccacaggttagcttcaactctaattacattgatatagaaagtaattctgaaggtggatctagtttcgtaactgcaaatgaagattctgtacctgaaaacacttgcaaagaaggcttggttttgggccagaaacagcctacttgggttcctgattcagaagctccaaactgtatgaactgccaagtcaaatttacttttaccaaacggcgacaccattgccgagcatgtgggaaagtattttgtggtgtctgttgtaataggaagtgtaaactgcaatatctagaaaaggaagcaagagtatgtgtagtctgctatgaaactattagtaaagctcaggcatttgaaaggatgatgagtccaactggttctaatcttaagtctaatcattctgatgaatgtactactgtccagcctcctcaggagaaccaaacatccagtataccttcaccagcaactttgccagtctcagcacttaaacaaccaggtgttgaaggactatgttccaaagaacagaagagagtatggtttgcagatggtatattgcccaatggtgaagttgcagatacaacaaaattatcatctggaagtaaaagatgttctgaagactttagtcctctctcacctgatgtgcctatgacagtaaacacagtggatcattcccattctactacagtggaaaagccaaacaatgagacaggagatattacaagaaatgagataattcagagtcctatttctcaggttccatcagtggaaaaattgtctatgaacacaggaaatgaggggttacctacttctggttcatttacactagatgatgatgtttttgcagaaactgaagaaccatctagtcctactggtgtcttagttaacagcaatttacctattgctagtatttcagattataggttactgtgtgatattaacaagtatgtctgcaataagattagtcttctacctaatgatgaggacagtttgcccccacttctggttgcatctggagaaaagggatcagtgcctgtagtagaagaacatccatctcatgagcagatcattttgcttcttgaaggtgaaagctttcatcctgttacatttgtcctaaatgctaatctactcgtgaatgtcaaattcatattttattcctcagacaaatattggtacttttcaaccaatggattgcatggcttgggacaggcagaaattattattctattgttatgtttgccaaatgaagatactattcctaaggacatcttcagactatttatcaccatatataaggatgctctaaaaggaaaatacatagaaaacttggacaatattacctttactgagagttttctcagtagcaaggatcacggaggattcctgtttattacacctacttttcagaaacttgatgatctctcattaccaagtaatccttttctttgtggaattcttatccagaagcttgagattccctgggcaaaggtttttcctatgcgtttaatgttgagattgggtgcagaatataaagcatatcctgctcctctaacaagcatcagaggccgaaaacctctttttggagaaataggacacactattatgaacttacttgttgaccttcgaaattaccagtataccttgcataatatagatcaactgttgattcatatggaaatgggaaaaagctgcataaaaataccacggaaaaagtacagtgatgtaatgaaagtactaaattcttccaatgagcatgtcattagcattggagcaagtttcagtacagaagcagattctcatctagtctgtatacagaatgatggaatttatgaaacacaggccaacagtgccactggccatcctagaaaagtgacaggtgcaagttttgtggtattcaatggagctctaaaaacatcttcaggatttcttgctaagtccagcatagttgaagatggcttaatggtacaaataactccagagaccatgaatggcttgcggctagctttacgagaacagaaagactttaaaattacatgtgggaaagttgatgcagtagacctgagagaatacgtggatatctgctgggtagatgctgaagaaaaaggaaacaaaggagttatcagttcagtggatggaatatcattacaaggatttccaagtgaaaaaataaaactggaagcagattttgaaaccgatgagaagattgtaaaatgtaccgaggtgttctactttctaaaggaccaggatttatctattttatcaacttcttatcagtttgcaaaagaaatagccatggcttgtagtgctgcgctgtgccctcacctgaaaactctaaaaagtaatgggatgaataaaattggactcagagtttccattgacactgatatggttgaatttcaggcaggatctgaaggccaacttctgcctcagcattatctaaatgatcttgatagtgctctgatacctgtgatccatggtgggacctccaactctagtttaccattagaaatagaattagtgtttttcattatagaacatcttttttagtgaaagaatgtgccatattacatattgcaacctaatttgttaaaactaactccagcactaaagctgaaatgccacaaacactaaaagtataaatatgtctgatttttgaaacacataagctttgctctttaggcaggaatgatcttttcaaatcattagcacaatatttaaatatctaaaaatttaagagatccatactttctgtagctttacaattaatttaagtactaaaaagacaaggatttcttttaagaaatttatagcatttactgtgttatttaaatgctaagccaaagtatctgcacttaggtatacctctttatgccaataatgattttaatgaaggctcttttcagatgtaaccttatgaaggaaatatctgctttgtgtatatgccagttagaatactggtttctaaagtctgtcaaattgtatttcagtggcacaaaaaccagttttgaggtcttagacttataattctttgaataaaactgataacttatttgtataattggagtggagacctacctccataattagataaactctttttggattataatcagaattttgccttttttcttctcaaattattacatatgtatgtattatatatccacatatatagttttccctgattaaatggatattaaaataattgcgggtgcttcaggactttttgcttctatatttaagtatattgtttttatagcaagaacatattctgaatgttttataaatctttaataatttatatgtaggtaatatttttgtatcacaatgcattatttttttcctcctttccttccaaactataccactgtatttaccacttctaagagtgactgacgacgggccagatgacccttgaagtagtcattatgtagcaataaatgaagcctgaaacaggtttttttacttccactttaatccttagaaatttcttggcaacttcgcatattttcattgacaccagtgtataagtataaatttaaatgaactaattacttttgcatattttaaattctttatatggtagttattttttataacaggatattaacataagttaaatcctatgtatttgaaattgttacagagctttcctctttacttcaaacagcaaaaaagtggggggcatattgtagtcctgtcatttaagttatgtaaaaaatttaatcattattttgatgctttaaacattctcatgtgtaatatatgtttttgtatcaaaaacactcatatatttcaagaaaaagaaattatgttaaatagccctgttttaagaaaaatatttatgaagcatctcaacttgaagatcaagtcaaagttataactcaggatctgaggtctcaagctaggagagactgagaattttaatcagtttgggcatatagtttggactgaatcacatctgtagtacttagccaaagacaatttggaggagaatatcagccttctggaagtagctacttcctgaacaatgtaaagtgtcgcagatattcaataaaatggcaacctgttataatttgtgaaatttattgaaatggtgtaagatgaaaacaattgcatatcaaacccaatttatgttttctaaatatagtgtatgtattctgccatgtaagtaattgaacagtcttaaaataaccaaatggtagagggctgttccatgatgggacagctttggatttgttttcataaaatctctatattcaataaaaattggaattatgtgcctgaagtttggaggcacattttgaagtattctttgtagacatatagtatgtttctgaatgtgtttgttacttatttggtcattggtacttaatttgaaattttaattttttaagagaagaaatagaatggttctttgtactcagtctgcaatgatctatttttggcttatgtcttttaatactactctctttctctgaattttgaaatatgaagtaaaatctagcccatttgttttatgcagctattcaacaaactttgtgtgttcgtatacttgctacatgcagagcactttaccaggtttctaagcaaaaatttctaaaaatgattaattgttctgacagaattaggcgtagttctttatcaacatttatggattccatgccacaagtagtatgcgcttaagtgcagagcatgccaagagaaagagtaggatttggccctgtaggagcaaagattcaattgtgggaaactacttgtttctgaaaattgcatgctaggatatttacatcatgttcctgttgaaaacaattcctgattaaaatacaagaataatcttaaaacatcaaagagattttccagacaataaggaatgccaagtccaaaagtaaagagaataagagaagcaagcatgtacccttactctgacaaccttatgagtgagggggacagaaattaaagttcagggcccatataaggtgatgaacctaacaggagaccctccacacaataggctgagactcccaaatactttcacctttaggatgataatgaatcagaggtggaagaaccaatgtaaaagaacaggcaagtttagaattgccccagtgatctaaagaatcttaagcactgagcttcctttaaggtgttcccacactagtaatgcctccaggtgacagagaaaataaaatgtaaatacttttcatggaaaagtaatttcattgtaggcctcaaattacttttcaaatatgtctagtaacacatagtaaaaagtagtcatataaggaaactagattccagaggcaagaattacttgaagcaatgaaaacaaactcacagatataggtattagatttgttttctttgtttaaggaaataaggtgtgtgaatgtacttgcaggaaatgggaaactatacgataaaaagttgtggagctaatctggaaaagaactgaatataaacattacaagaatatacataaaaactgcactttaaaactcagtaa

SEQ ID NO: 11321 - protein, 1539 aa, Homo sapiens; identical to SEQ ID NO: 11319

SEQ ID NO: 11322 - DNA, 2929 bp, Homo sapiens
ggtggggcggggaaagaagccctgagccgggatctggcactcccaggactcccggccggggtagctcttcactcctcagcgcgacgtcgtgtcgagttcccaaaaagctccgcaggggctgtagggaggcatacaagaattaaattctgaataagtctgcaggtaggatggacagttattttaaagcagctgtcagtgacttggacaaactccttgatgattttgaacagaacccagatgaacaagattatctccaagatgtacaaaatgcatatgattctaaccactgctcagtttcttcagagttggcttcctcacagcgaacttcattgctcccaaaagaccaagagtgcgttaatagttgtgcctcatcagaaacaagctatggaacaaatgagagttccctgaatgaaaaaacactcaagggacttacttctatacaaaatgaaaaaaatgtaacaggacttgatcttctttcttctgtggatggtggtacttcagatgaaatccagccgttatatatgggacgatgtagtaaacctatctgtgatctgataagtgacatgggtaacttagttcatgcaaccaatagtgaagaagatattaaaaaattattgccagatgattttaagtctaatgcagattccttgattggattggatttatcttcagtgtcagatactccctgtgtttcttcaacagaccatgatagtgatactgtcagagaacaacagaatgatatcagttctgaattacaaaatagagaaatcggaggaatcaaagaattgggtataaaagtagatacaacactttcagattcctataattacagtggaacagaaaatttaaaagataaaaagatctttaatcagttagaatcaattgttgattttaacatgtcatctgctttgactcgacaaagttccaaaatgtttcatgccaaagacaagctacaacacaagagccagccatgtggattactaaaagatgttggcttagtaaaagaggaagtagatgtggcagtcataactgccgcagaatgtttaaaagaagagggcaagacaagtgctttgacctgcagccttccgaaaaatgaagatttatgcttaaatgattcaaattcaagagatgaaaatttcaaattacctgacttttcctttcaggaagataagactgttataaaacaatctgcacaagaagactcaaaaagtttagaccttaaggataatgatgtaatccaagattcctcttcagctttacatgtttccagtaaagatgtgccgtcctcattgtcctgtcttcctgcgtctgggtctatgtgtggatcattaattgaaagtaaagcacggggtgattttttacctcagcatgaacataaagataatatacaagatgcagtgactatacatgaagaaatacagaacagtgttgttctaggtggggaaccattcaaagagaatgatcttttgaaacaggaaaaatgtaaaagcatactccttcagtcattaattgaagggatggaagacagaaagatagatcctgaccagacagtaatcagagctgagtctttggatggtggtgacaccagttctacagttgtagaatctcaagaggggctttctggcactcatgtcccagagtcttctgattgttgtgaaggttttattaatactttttcaagcaatgatatggatgggcaagacttagattactttaatattgatgaaggcgcaaaaagtggcccactaattagtgatgctgaacttgatgcctttctgacagaacagtatcttcagaccactaacataaagtcttttgaagaaaatgtaaatgactctaaatcgcaaatgaatcagatagatatgaaaggcttagatgatggaaacatcaataatatatatttcaatgcagaagcaggagctattggggaaagtcatggtattaatataatttgtgaaatagttgataaacaaaatacaatagaaaatggcctttctttaggagaaaaaagcactattccagttcaacaagggttacctaccagtaagtctgagattacaaatcaattatcggtctctgatattaacagtcaatctgttggaggggccagacctaagcaattgtttagccttccatcaagaacaaggagttcaaaggacctgaataagccagatgttccagatacaatagaaagtgaacccagcacagcagataccgttgttccaatcacttgtgctatagattctacagctgatccacaggttagcttcaactctaattacattgatatagaaagtaattctgaaggtggatctagtttcgtaactgcaaatgaagattctgtacctgaaaacacttgcaaagaaggcttggttttgggccagaaacagcctacttgggttcctgattcagaagctccaaactgtatgaactgccaagtcaaatttacttttaccaaacggcgacaccattgccgagcatgtgggaaagtattttgtggtgtctgttgtaataggaagtgtaaactgcaatatctagaaaaggaagcaagagtatgtgtagtctgctatgaaactattagtaaaggtgagtattaacttgatatattttcttccagtaattgaatatatcttaaaattaattggattgtgacaaagataaacttctttattttcttaaggcaaggacctagtgttgaattatctggcttaggtgggacatcccaaggcttggtttctcttctttttgttccactctcacaattaatactaccaatctggaaaggaagcattcagtttctggagtggcagttcattaacttttaacaggtaccaagtccctaaatgctgcatttcatctgcctatttgtttttgtcatcatcattgtcatgttaatcatcttaatctaaataaacacttacagatacct

SEQ ID NO: 11323 - protein, 809 aa, Homo sapiens
MDSYFKAAVSDLDKLLDDFEQNPDEQDYLQDVQNAYDSNHCSVSSELASSQRTSLLPKDQECVNSCASSETSYGTNESSLNEKTLKGLTSIQNEKNVTGLDLLSSVDGGTSDEIQPLYMGRCSKPICDLISDMGNLVHATNSEEDIKKLLPDDFKSNADSLIGLDLSSVSDTPCVSSTDHDSDTVREQQNDISSELQNREIGGIKELGIKVDTTLSDSYNYSGTENLKDKKIFNQLESIVDFNMSSALTRQSSKMFHAKDKLQHKSQPCGLLKDVGLVKEEVDVAVITAAECLKEEGKTSALTCSLPKNEDLCLNDSNSRDENFKLPDFSFQEDKTVIKQSAQEDSKSLDLKDNDVIQDSSSALHVSSKDVPSSLSCLPASGSMCGSLIESKARGDFLPQHEHKDNIQDAVTIHEEIQNSVVLGGEPFKENDLLKQEKCKSILLQSLIEGMEDRKIDPDQTVIRAESLDGGDTSSTVVESQEGLSGTHVPESSDCCEGFINTFSSNDMDGQDLDYFNIDEGAKSGPLISDAELDAFLTEQYLQTTNIKSFEENVNDSKSQMNQIDMKGLDDGNINNIYFNAEAGAIGESHGINIICEIVDKQNTIENGLSLGEKSTIPVQQGLPTSKSEITNQLSVSDINSQSVGGARPKQLFSLPSRTRSSKDLNKPDVPDTIESEPSTADTVVPITCAIDSTADPQVSFNSNYIDIESNSEGGSSFVTANEDSVPENTCKEGLVLGQKQPTWVPDSEAPNCMNCQVKFTFTKRRHHCRACGKVFCGVCCNRKCKLQYLEKEARVCVVCYETISKGEY

SEQ ID NO: 11324 - DNA, 4498 bp, Homo sapiens
ggtggggcggggaaagaagccctgagccgggatctggcactcccaggactcccggccggggtagctcttcactcctcagcgcgacgtcgtgtcgagttcccaaaaagctccgcaggggctgtagggaggcatacaagaattaaattctgaataagtctgcaggtaggatggacagttattttaaagcagctgtcagtgacttggacaaactccttgatgattttgaacagaacccagatgaacaagattatctccaagatgtacaaaatgcatatgattctaaccactgctcagtttcttcagagttggcttcctcacagcgaacttcattgctcccaaaagaccaagagtgcgttaatagttgtgcctcatcagaaacaagctatggaacaaatgagagttccctgaatgaaaaaacactcaagggacttacttctatacaaaatgaaaaaaatgtaacaggacttgatcttctttcttctgtggatggtggtacttcagatgaaatccagccgttatatatgggacgatgtagtaaacctatctgtgatctgataagtgacatgggtaacttagttcatgcaaccaatagtgaagaagatattaaaaaattattgccagatgattttaagtctaatgcagattccttgattggattggatttatcttcagtgtcagatactccctgtgtttcttcaacagaccatgatagtgatactgtcagagaacaacagaatgatatcagttctgaattacaaaatagagaaatcggaggaatcaaagaattgggtataaaagtagatacaacactttcagattcctataattacagtggaacagaaaatttaaaagataaaaagatctttaatcagttagaatcaattgttgattttaacatgtcatctgctttgactcgacaaagttccaaaatgtttcatgccaaagacaagctacaacacaagagccagccatgtggattactaaaagatgttggcttagtaaaagaggaagtagatgtggcagtcataactgccgcagaatgtttaaaagaagagggcaagacaagtgctttgacctgcagccttccgaaaaatgaagatttatgcttaaatgattcaaattcaagagatgaaaatttcaaattacctgacttttcctttcaggaagataagactgttataaaacaatctgcacaagaagactcaaaaagtttagaccttaaggataatgatgtaatccaagattcctcttcagctttacatgtttccagtaaagatgtgccgtcctcattgtcctgtcttcctgcgtctgggtctatgtgtggatcattaattgaaagtaaagcacggggtgattttttacctcagcatgaacataaagataatatacaagatgcagtgactatacatgaagaaatacagaacagtgttgttctaggtggggaaccattcaaagagaatgatcttttgaaacaggaaaaatgtaaaagcatactccttcagtcattaattgaagggatggaagacagaaagatagatcctgaccagacagtaatcagagctgagtctttggatggtggtgacaccagttctacagttgtagaatctcaagaggggctttctggcactcatgtcccagagtcttctgattgttgtgaaggttttattaatactttttcaagcaatgatatggatgggcaagacttagattactttaatattgatgaaggcgcaaaaagtggcccactaattagtgatgctgaacttgatgcctttctgacagaacagtatcttcagaccactaacataaagtcttttgaagaaaatgtaaatgactctaaatcgcaaatgaatcagatagatatgaaaggcttagatgatggaaacatcaataatatatatttcaatgcagaagcaggagctattggggaaagtcatggtattaatataatttgtgaaatagttgataaacaaaatacaatagaaaatggcctttctttaggagaaaaaagcactattccagttcaacaagggttacctaccagtaagtctgagattacaaatcaattatcggtctctgatattaacagtcaatctgttggaggggccagacctaagcaattgtttagccttccatcaagaacaaggagttcaaaggacctgaataagccagatgttccagatacaatagaaagtgaacccagcacagcagataccgttgttccaatcacttgtgctatagattctacagctgatccacaggttagcttcaactctaattacattgatatagaaagtaattctgaaggtggatctagtttcgtaactgcaaatgaagattctgtacctgaaaacacttgcaaagaaggcttggttttgggccagaaacagcctacttgggttcctgattcagaagctccaaactgtatgaactgccaagtcaaatttacttttaccaaacggcgacaccattgccgagcatgtgggaaagtattttgtggtgtctgttgtaataggaagtgtaaactgcaatatctagaaaaggaagcaagagtatgtgtagtctgctatgaaactattagtaaagctcaggcatttgaaaggatgatgagtccaactggttctaatcttaagtctaatcattctgatgaatgtactactgtccagcctcctcaggagaaccaaacatccagtataccttcaccagcaactttgccagtctcagcacttaaacaaccaggtgttgaaggactatgttccaaagaacagaagagagtatggtttgcagatggtatattgcccaatggtgaagttgcagatacaacaaaattatcatctggaagtaaaagatgttctgaagactttagtcctctctcacctgatgtgcctatgacagtaaacacagtggatcattcccattctactacagtggaaaagccaaacaatgagacaggagatattacaagaaatgagataattcagagtcctatttctcaggttccatcagtggaaaaattgtctatgaacacaggaaatgaggggttacctacttctggttcatttacactagatgatgatgtttttgcagaaactgaagaaccatctagtcctactggtgtcttagttaacagcaatttacctattgctagtatttcagattataggttactgtgtgatattaacaagtatgtctgcaataagattagtcttctacctaatgatgaggacagtttgcccccacttctggttgcatctggagaaaagggatcagtgcctgtagtagaagaacatccatctcatgagcagatcattttgcttcttgaaggtgaaagctttcatcctgttacatttgtcctaaatgctaatctactcgtgaatgtcaaattcatattttattcctcagacaaatattggtacttttcaaccaatggattgcatggcttgggacaggcagaaattattattctattgttatgtttgccaaatgaagatactattcctaaggacatcttcagactatttatcaccatatataaggatgctctaaaaggaaaatacatagaaaacttggacaatattacctttactgagagttttctcagtagcaaggatcacggaggattcctgtttattacacctacttttcagaaacttgatgatctctcattaccaagtaatccttttctttgtggaattcttatccagaagcttgagattccctgggcaaaggtttttcctatgcgtttaatgttgagattgggtgcagaatataaaggtaagttttagagtaataagttaaattgcatattttcaaatatactgaatgtaaagactttcagggaatcattaaaatcaattttaatggattaatggaactacttttgttttgctatgcttttaaagttctaagacaaccctcttctactaccaggttggtctagataactgtggtatgtcttcaagtttctagatgttcataagttcttttattacctaaaacttttcttcttaaatttcagaacaaaacagaaaactttcacagtgcaggttgagtatgccatatctgaaatgtattggatcagttttttggattttggactttttcagattttggaatattcacagagtacataccagttgagcatcccaaattcaaaatctgaaatgctccagtgagcatttcttttgagcatcacgttggcatttgaaaaagttatagaccgggcatggtggctcacgcctgtactcccagcactttgggaggccaaggcgggcagatcacatgaggtcaggagttcgagaccagcctggccaacatggtgaaaccctgtctctactaaaaatacaaaaattagctgggtgaggtggcaggcgcctgtaattgcagctactcaggaggctgaggcaggagaatcacctgaacccaggaggcagatttgcagtgagctaagatcatgcctctgcattccagccagggtgacagagcaagactacgtctc

SEQ ID NO: 11325 - protein, 1205 aa, Homo sapiens
MDSYFKAAVSDLDKLLDDFEQNPDEQDYLQDVQNAYDSNHCSVSSELASSQRTSLLPKDQECVNSCASSETSYGTNESSLNEKTLKGLTSIQNEKNVTGLDLLSSVDGGTSDEIQPLYMGRCSKPICDLISDMGNLVHATNSEEDIKKLLPDDFKSNADSLIGLDLSSVSDTPCVSSTDHDSDTVREQQNDISSELQNREIGGIKELGIKVDTTLSDSYNYSGTENLKDKKIFNQLESIVDFNMSSALTRQSSKMFHAKDKLQHKSQPCGLLKDVGLVKEEVDVAVITAAECLKEEGKTSALTCSLPKNEDLCLNDSNSRDENFKLPDFSFQEDKTVIKQSAQEDSKSLDLKDNDVIQDSSSALHVSSKDVPSSLSCLPASGSMCGSLIESKARGDFLPQHEHKDNIQDAVTIHEEIQNSVVLGGEPFKENDLLKQEKCKSILLQSLIEGMEDRKIDPDQTVIRAESLDGGDTSSTVVESQEGLSGTHVPESSDCCEGFINTFSSNDMDGQDLDYFNIDEGAKSGPLISDAELDAFLTEQYLQTTNIKSFEENVNDSKSQMNQIDMKGLDDGNINNIYFNAEAGAIGESHGINIICEIVDKQNTIENGLSLGEKSTIPVQQGLPTSKSEITNQLSVSDINSQSVGGARPKQLFSLPSRTRSSKDLNKPDVPDTIESEPSTADTVVPITCAIDSTADPQVSFNSNYIDIESNSEGGSSFVTANEDSVPENTCKEGLVLGQKQPTWVPDSEAPNCMNCQVKFTFTKRRHHCRACGKVFCGVCCNRKCKLQYLEKEARVCVVCYETISKAQAFERMMSPTGSNLKSNHSDECTTVQPPQENQTSSIPSPATLPVSALKQPGVEGLCSKEQKRVWFADGILPNGEVADTTKLSSGSKRCSEDFSPLSPDVPMTVNTVDHSHSTTVEKPNNETGDITRNEIIQSPISQVPSVEKLSMNTGNEGLPTSGSFTLDDDVFAETEEPSSPTGVLVNSNLPIASISDYRLLCDINKYVCNKISLLPNDEDSLPPLLVASGEKGSVPVVEEHPSHEQIILLLEGESFHPVTFVLNANLLVNVKFIFYSSDKYWYFSTNGLHGLGQAEIIILLLCLPNEDTIPKDIFRLFITIYKDALKGKYIENLDNITFTESFLSSKDHGGFLFITPTFQKLDDLSLPSNPFLCGILIQKLEIPWAKVFPMRLMLRLGAEYKGKF

SEQ ID NO: 11326 - DNA, 6313 bp, Homo sapiens
ggtggggcggggaaagaagccctgagccgggatctggcactcccaggactcccggccggggtagctcttcactcctcagcgcgacgtcgtgtcgagttcccaaaaagctccgcaggggctgtagggaggcatacaagaattaaattctgaataagtctgcaggtaggatggacagttattttaaagcagctgtcagtgacttggacaaactccttgatgattttgaacagaacccagatgaacaagattatctccaagatgtacaaaatgcatatgattctaaccactgctcagtttcttcagagttggcttcctcacagcgaacttcattgctcccaaaagaccaagagtgcgttaatagttgtgcctcatcagaaacaagctatggaacaaatgagagttccctgaatgaaaaaacactcaagggacttacttctatacaaaatgaaaaaaatgtaacaggacttgatcttctttcttctgtggatggtggtacttcagatgaaatccagccgttatatatgggacgatgtagtaaacctatctgtgatctgataagtgacatgggtaacttagttcatgcaaccaatagtgaagaagatattaaaaaattattgccagatgattttaagtctaatgcagattccttgattggattggatttatcttcagtgtcagatactccctgtgtttcttcaacagaccatgatagtgatactgtcagagaacaacagaatgatatcagttctgaattacaaaatagagaaatcggaggaatcaaagaattgggtataaaagtagatacaacactttcagattcctataattacagtggaacagaaaatttaaaagataaaaagatctttaatcagttagaatcaattgttgattttaacatgtcatctgctttgactcgacaaagttccaaaatgtttcatgccaaagacaagctacaacacaagagccagccatgtggattactaaaagatgttggcttagtaaaagaggaagtagatgtggcagtcataactgccgcagaatgtttaaaagaagagggcaagacaagtgctttgacctgcagccttccgaaaaatgaagatttatgcttaaatgattcaaattcaagagatgaaaatttcaaattacctgacttttcctttcaggaagataagactgttataaaacaatctgcacaagaagactcaaaaagtttagaccttaaggataatgatgtaatccaagattcctcttcagctttacatgtttccagtaaagatgtgccgtcctcattgtcctgtcttcctgcgtctgggtctatgtgtggatcattaattgaaagtaaagcacggggtgattttttacctcagcatgaacataaagataatatacaagatgcagtgactatacatgaagaaatacagaacagtgttgttctaggtggggaaccattcaaagagaatgatcttttgaaacaggaaaaatgtaaaagcatactccttcagtcattaattgaagggatggaagacagaaagatagatcctgaccagacagtaatcagagctgagtctttggatggtggtgacaccagttctacagttgtagaatctcaagaggggctttctggcactcatgtcccagagtcttctgattgttgtgaaggttttattaatactttttcaagcaatgatatggatgggcaagacttagattactttaatattgatgaaggcgcaaaaagtggcccactaattagtgatgctgaacttgatgcctttctgacagaacagtatcttcagaccactaacataaagtcttttgaagaaaatgtaaatgactctaaatcgcaaatgaatcagatagatatgaaaggcttagatgatggaaacatcaataatatatatttcaatgcagaagcaggagctattggggaaagtcatggtattaatataatttgtgaaatagttgataaacaaaatacaatagaaaatggcctttctttaggagaaaaaagcactattccagttcaacaagggttacctaccagtaagtctgagattacaaatcaattatcggtctctgatattaacagtcaatctgttggaggggccagacctaagcaattgtttagccttccatcaagaacaaggagttcaaaggacctgaataagccagatgttccagatacaatagaaagtgaacccagcacagcagataccgttgttccaatcacttgtgctatagattctacagctgatccacaggttagcttcaactctaattacattgatatagaaagtaattctgaaggtggatctagtttcgtaactgcaaatgaagattctgtacctgaaaacacttgcaaagaaggcttggttttgggccagaaacagcctacttgggttcctgattcagaagctccaaactgtatgaactgccaagtcaaatttacttttaccaaacggcgacaccattgccgagcatgtgggaaagtattttgtggtgtctgttgtaataggaagtgtaaactgcaatatctagaaaaggaagcaagagtatgtgtagtctgctatgaaactattagtaaagctcaggcatttgaaaggatgatgagtccaactggttctaatcttaagtctaatcattctgatgaatgtactactgtccagcctcctcaggagaaccaaacatccagtataccttcaccagcaactttgccagtctcagcacttaaacaaccaggtgttgaaggactatgttccaaagaacagaagagagtatggtttgcagatggtatattgcccaatggtgaagttgcagatacaacaaaattatcatctggaagtaaaagatgttctgaagactttagtcctctctcacctgatgtgcctatgacagtaaacacagtggatcattcccattctactacagtggaaaagccaaacaatgagacaggagatattacaagaaatgagataattcagagtcctatttctcaggttccatcagtggaaaaattgtctatgaacacaggaaatgaggggttacctacttctggttcatttacactagatgatgatgtttttgcagaaactgaagaaccatctagtcctactggtgtcttagttaacagcaatttacctattgctagtatttcagattataggttactgtgtgatattaacaagtatgtctgcaataagattagtcttctacctaatgatgaggacagtttgcccccacttctggttgcatctggagaaaagggatcagtgcctgtagtagaagaacatccatctcatgagcagatcattttgcttcttgaaggtgaaagctttcatcctgttacatttgtcctaaatgctaatctactcgtgaatgtcaaattcatattttattcctcagacaaatattggtacttttcaaccaatggattgcatggcttgggacaggcagaaattattattctattgttatgtttgccaaatgaagatactattcctaaggacatcttcagactatttatcaccatatataaggatgctctaaaaggaaaatacatagaaaacttggacaatattacctttactgagagttttctcagtagcaaggatcacggaggattcctgtttattacacctacttttcagaaacttgatgatctctcattaccaagtaatccttttctttgtggaattcttatccagaagcttgagattccctgggcaaaggtttttcctatgcgtttaatgttgagattgggtgcagaatataaagcatatcctgctcctctaacaagcatcagaggccgaaaacctctttttggagaaataggacacactattatgaacttacttgttgaccttcgaaattaccagtataccttgcataatatagatcaactgttgattcatatggaaatgggaaaaagctgcataaaaataccacggaaaaagtacagtgatgtaatgaaagtactaaattcttccaatgagcatgtcattagcattggagcaagtttcagtacagaagcagattctcatctagtctgtatacagaatgatggaatttatgaaacacaggccaacagtgccactggccatcctagaaaagtgacaggtgcaagttttgtggtattcaatggagctctaaaaacatcttcaggatttcttgctaagtccagcatagttgaagatggcttaatggtacaaataactccagagaccatgaatggcttgcggctagctttacgagaacagaaagactttaaaattacatgtgggaaagttgatgcagtagacctgagagaatacgtggatatctgctgggtagatgctgaagaaaaaggaaacaaaggagttatcagttcagtggatggaatatcattacaaggatttccaagtgaaaaaataaaactggaagcagattttgaaaccgatgagaagattgtaaaatgtaccgaggtgttctactttctaaaggaccaggatttatctattttatcaacttcttatcagtttgcaaaagaaatagccatggcttgtagtgctgcgctgtgccctcacctgaaaactctaaaaagtaatgggatgaataaaattggactcagagtttccattgacactgatatggttgaatttcaggcaggatctgaaggccaacttctgcctcagcattatctaaatgatcttgatagtgctctgatacctgtgatccatggtgggacctccaactctagtttaccattagaaatagaattagtgtttttcattatagaacatcttttttagtgaaagaatgtgccatattacatattgcaacctaatttgttaaaactaactccagcactaaagctgaaatgccacaaacactaaaagtataaatatgtctgatttttgaaacacataagctttgctctttaggcaggaatgatcttttcaaatcattagcacaatatttaaatatctaaaaatttaagagatccatactttctgtagctttacaattaatttaagtactaaaaagacaaggatttcttttaagaaatttatagcatttactgtgttatttaaatgctaagccaaagtatctgcacttaggtatacctctttatgccaataatgattttaatgaaggctcttttcagatgtaaccttatgaaggaaatatctgctttgtgtatatgccagttagaatactggtttctaaagtctgtcaaattgtatttcagtggcacaaaaaccagttttgaggtcttagacttataattctttgaataaaactgataacttatttgtataattggagtggagacctacctccataattagataaactctttttggattataatcagaattttgccttttttcttctcaaattattacatatgtatgtattatatatccacatatatagttttccctgattaaatggatattaaaataattgcgggtgcttcaggactttttgcttctatatttaagtatattgtttttatagcaagaacatattctgaatgttttataaatctttaataatttatatgtaggtaatatttttgtatcacaatgcattatttttttcctcctttccttccaaactataccactgtatttaccacttctaagagtgactgacgacgggccagatgacccttgaagtagtcattatgtagcaataaatgaagcctgaaacaggtttttttacttccactttaatccttagaaatttcttggcaacttcgcatattttcattgacaccagtgtataagtataaatttaaatgaactaattacttttgcatattttaaattctttatatggtagttattttttataacaggatattaacataagttaaatcctatgtatttgaaattgttacagagctttcctctttacttcaaacagcaaaaaagtggggggcatattgtagtcctgtcatttaagttatgtaaaaaatttaatcattattttgatgctttaaacattctcatgtgtaatatatgtttttgtatcaaaaacactcatatatttcaagaaaaagaaattatgttaaatagccctgttttaagaaaaatatttatgaagcatctcaacttgaagatcaagtcaaagttataactcaggatctgaggtctcaagctaggagagactgagaattttaatcagtttgggcatatagtttggactgaatcacatctgtagtacttagccaaagacaatttggaggagaatatcagccttctggaagtagctacttcctgaacaatgtaaagtgtcgcagatattcaataaaatggcaacctgttat

SEQ ID NO: 11327 - protein, 1539 aa, Homo sapiens; identical to SEQ ID NO: 11319

SEQ ID NO: 11328 - DNA, 6550 bp, Homo sapiens
ggtggggcggggaaagaagccctgagccgggatctggcactcccaggactcccggccggggtagctcttcactcctcagcgcgacgtcgtgtcgagttcccaaaaagctccgcaggggctgtagggaggcatacaagaattaaattctgaataagtctgcaggtaggatggacagttattttaaagcagctgtcagtgacttggacaaactccttgatgattttgaacagaacccagatgaacaagattatctccaagatgtacaaaatgcatatgattctaaccactgctcagtttcttcagagttggcttcctcacagcgaacttcattgctcccaaaagaccaagagtgcgttaatagttgtgcctcatcagaaacaagctatggaacaaatgagagttccctgaatgaaaaaacactcaagggacttacttctatacaaaatgaaaaaaatgtaacaggacttgatcttctttcttctgtggatggtggtacttcagatgaaatccagccgttatatatgggacgatgtagtaaacctatctgtgatctgataagtgacatgggtaacttagttcatgcaaccaatagtgaagaagatattaaaaaattattgccagatgattttaagtctaatgcagattccttgattggattggatttatcttcagtgtcagatactccctgtgtttcttcaacagaccatgatagtgatactgtcagagaacaacagaatgatatcagttctgaattacaaaatagagaaatcggaggaatcaaagaattgggtataaaagtagatacaacactttcagattcctataattacagtggaacagaaaatttaaaagataaaaagatctttaatcagttagaatcaattgttgattttaacatgtcatctgctttgactcgacaaagttccaaaatgtttcatgccaaagacaagctacaacacaagagccagccatgtggattactaaaagatgttggcttagtaaaagaggaagtagatgtggcagtcataactgccgcagaatgtttaaaagaagagggcaagacaagtgctttgacctgcagccttccgaaaaatgaagatttatgcttaaatgattcaaattcaagagatgaaaatttcaaattacctgacttttcctttcaggaagataagactgttataaaacaatctgcacaagaagactcaaaaagtttagaccttaaggataatgatgtaatccaagattcctcttcagctttacatgtttccagtaaagatgtgccgtcctcattgtcctgtcttcctgcgtctgggtctatgtgtggatcattaattgaaagtaaagcacggggtgattttttacctcagcatgaacataaagataatatacaagatgcagtgactatacatgaagaaatacagaacagtgttgttctaggtggggaaccattcaaagagaatgatcttttgaaacaggaaaaatgtaaaagcatactccttcagtcattaattgaagggatggaagacagaaagatagatcctgaccagacagtaatcagagctgagtctttggatggtggtgacaccagttctacagttgtagaatctcaagaggggctttctggcactcatgtcccagagtcttctgattgttgtgaaggttttattaatactttttcaagcaatgatatggatgggcaagacttagattactttaatattgatgaaggcgcaaaaagtggcccactaattagtgatgctgaacttgatgcctttctgacagaacagtatcttcagaccactaacataaagtcttttgaagaaaatgtaaatgactctaaatcgcaaatgaatcagatagatatgaaaggcttagatgatggaaacatcaataatatatatttcaatgcagaagcaggagctattggggaaagtcatggtattaatataatttgtgaaatagttgataaacaaaatacaatagaaaatggcctttctttaggagaaaaaagcactattccagttcaacaagggttacctaccagtaagtctgagattacaaatcaattatcggtctctgatattaacagtcaatctgttggaggggccagacctaagcaattgtttagccttccatcaagaacaaggagttcaaaggacctgaataagccagatgttccagatacaatagaaagtgaacccagcacagcagataccgttgttccaatcacttgtgctatagattctacagctgatccacaggttagcttcaactctaattacattgatatagaaagtaattctgaaggtggatctagtttcgtaactgcaaatgaagattctgtacctgaaaacacttgcaaagaaggcttggttttgggccagaaacagcctacttgggttcctgattcagaagctccaaactgtatgaactgccaagtcaaatttacttttaccaaacggcgacaccattgccgagcatgtgggaaagtattttgtggtgtctgttgtaataggaagtgtaaactgcaatatctagaaaaggaagcaagagtatgtgtagtctgctatgaaactattagtaaagctcaggcatttgaaaggatgatgagtccaactggttctaatcttaagtctaatcattctgatgaatgtactactgtccagcctcctcaggagaaccaaacatccagtataccttcaccagcaactttgccagtctcagcacttaaacaaccaggtgttgaaggactatgttccaaagaacagaagagagtatggtttgcagatggtatattgcccaatggtgaagttgcagatacaacaaaattatcatctggaagtaaaagatgttctgaagactttagtcctctctcacctgatgtgcctatgacagtaaacacagtggatcattcccattctactacagtggaaaagccaaacaatgagacaggagatattacaagaaatgagataattcagagtcctatttctcaggttccatcagtggaaaaattgtctatgaacacaggaaatgaggggttacctacttctggttcatttacactagatgatgatgtttttgcagaaactgaagaaccatctagtcctactggtgtcttagttaacagcaatttacctattgctagtatttcagattataggttactgtgtgatattaacaagtatgtctgcaataagattagtcttctacctaatgatgaggacagtttgcccccacttctggttgcatctggagaaaagggatcagtgcctgtagtagaagaacatccatctcatgagcagatcattttgcttcttgaaggtgaaagctttcatcctgttacatttgtcctaaatgctaatctactcgtgaatgtcaaattcatattttattcctcagacaaatattggtacttttcaaccaatggattgcatggcttgggacaggcagaaattattattctattgttatgtttgccaaatgaagatactattcctaaggacatcttcagactatttatcaccatatataaggatgctctaaaaggaaaatacatagaaaacttggacaatattacctttactgagagttttctcagtagcaaggatcacggaggattcctgtttattacacctacttttcagaaacttgatgatctctcattaccaagtaatccttttctttgtggaattcttatccagaagcttgagattccctgggcaaaggtttttcctatgcgtttaatgttgagattgggtgcagaatataaagcatatcctgctcctctaacaagcatcagaggccgaaaacctctttttggagaaataggacacactattatgaacttacttgttgaccttcgaaattaccagtataccttgcataatatagatcaactgttgattcatatggaaatgggaaaaagctgcataaaaataccacggaaaaagtacagtgatgtaatgaaagtactaaattcttccaatgagcatgtcattagcattggagcaagtttcagtacagaagcagattctcatctagtctgtatacagaatgatggaatttatgaaacacaggccaacagtgccactggccatcctagaaaagtgacaggtgcaagttttgtggtattcaatggagctctaaaaacatcttcaggatttcttgctaagtccagcatagttgaagatggcttaatggtacaaataactccagagaccatgaatggcttgcggctagctttacgagaacagaaagactttaaaattacatgtgggaaagttgatgcagtagacctgagagaatacgtggatatctgctgggtagatgctgaagaaaaaggaaacaaaggagttatcagttcagtggatggaatatcattacaaggatttccaagtgaaaaaataaaactggaagcagattttgaaaccgatgagaagattgtaaaatgtaccgaggtgttctactttctaaaggaccaggatttatctattttatcaacttcttatcagtttgcaaaagaaatagccatggcttgtagtgctgcgctgtgccctcacctgaaaactctaaaaagtaatgggatgaataaaattggactcagagtttccattgacactgatatggttgaatttcaggcaggatctgaaggccaacttctgcctcagcattatctaaatgatcttgatagtgctctgatacctgtgatccatggtgggacctccaactctagtttaccattagaaatagaattagtgtttttcattatagaacatcttttttagtgaaagaatgtgccatattacatattgcaacctaatttgttaaaactaactccagcactaaagctgaaatgccacaaacactaaaagtataaatatgtctgatttttgaaacacataagctttgctctttaggcaggaatgatcttttcaaatcattagcacaatatttaaatatctaaaaatttaagagatccatactttctgtagctttacaattaatttaagtactaaaaagacaaggatttcttttaagaaatttatagcatttactgtgttatttaaatgctaagccaaagtatctgcacttaggtatacctctttatgccaataatgattttaatgaaggctcttttcagatgtaaccttatgaaggaaatatctgctttgtgtatatgccagttagaatactggtttctaaagtctgtcaaattgtatttcagtggcacaaaaaccagttttgaggtcttagacttataattctttgaataaaactgataacttatttgtataattggagtggagacctacctccataattagataaactctttttggattataatcagaattttgccttttttcttctcaaattattacatatgtatgtattatatatccacatatatagttttccctgattaaatggatattaaaataattgcgggtgcttcaggactttttgcttctatatttaagtatattgtttttatagcaagaacatattctgaatgttttataaatctttaataatttatatgtaggtaatatttttgtatcacaatgcattatttttttcctcctttccttccaaactataccactgtatttaccacttctaagagtgactgacgacgggccagatgacccttgaagtagtcattatgtagcaataaatgaagcctgaaacaggtttttttacttccactttaatccttagaaatttcttggcaacttcgcatattttcattgacaccagtgtataagtataaatttaaatgaactaattacttttgcatattttaaattctttatatggtagttattttttataacaggatattaacataagttaaatcctatgtatttgaaattgttacagagctttcctctttacttcaaacagcaaaaaagtggggggcatattgtagtcctgtcatttaagttatgtaaaaaatttaatcattattttgatgctttaaacattctcatgtgtaatatatgtttttgtatcaaaaacactcatatatttcaagaaaaagaaattatgttaaatagccctgttttaagaaaaatatttatgaagcatctcaacttgaagatcaagtcaaagttataactcaggatctgaggtctcaagctaggagagactgagaattttaatcagtttgggcatatagtttggactgaatcacatctgtagtacttagccaaagacaatttggaggagaatatcagccttctggaagtagctacttcctgaacaatgtaaagtgtcgcagatattcaataaaatggcaacctgttataatttgtgaaatttattgaaatggtgtaagatgaaaacaattgcatatcaaacccaatttatgttttctaaatatagtgtatgtattctgccatgtaagtaattgaacagtcttaaaataaccaaatggtagagggctgttccatgatgggacagctttggatttgttttcataaaatctctatattcaataaaaattggaattatgtgcctgaagtttggaggcacattttgaagt

SEQ ID NO: 11329 - protein, 1539 aa, Homo sapiens; identical to SEQ ID NO: 11319

SEQ ID NO: 11330 - DNA, 7746 bp, Homo sapiens
ggtggggcggggaaagaagccctgagccgggatctggcactcccaggactcccggccggggtagctcttcactcctcagcgcgacgtcgtgtcgagttcccaaaaagctccgcaggggctgtagggaggcatacaagaattaaattctgaataagtctgcaggtaggatggacagttattttaaagcagctgtcagtgacttggacaaactccttgatgattttgaacagaacccagatgaacaagattatctccaagatgtacaaaatgcatatgattctaaccactgctcagtttcttcagagttggcttcctcacagcgaacttcattgctcccaaaagaccaagagtgcgttaatagttgtgcctcatcagaaacaagctatggaacaaatgagagttccctgaatgaaaaaacactcaagggacttacttctatacaaaatgaaaaaaatgtaacaggacttgatcttctttcttctgtggatggtggtacttcagatgaaatccagccgttatatatgggacgatgtagtaaacctatctgtgatctgataagtgacatgggtaacttagttcatgcaaccaatagtgaagaagatattaaaaaattattgccagatgattttaagtctaatgcagattccttgattggattggatttatcttcagtgtcagatactccctgtgtttcttcaacagaccatgatagtgatactgtcagagaacaacagaatgatatcagttctgaattacaaaatagagaaatcggaggaatcaaagaattgggtataaaagtagatacaacactttcagattcctataattacagtggaacagaaaatttaaaagataaaaagatctttaatcagttagaatcaattgttgattttaacatgtcatctgctttgactcgacaaagttccaaaatgtttcatgccaaagacaagctacaacacaagagccagccatgtggattactaaaagatgttggcttagtaaaagaggaagtagatgtggcagtcataactgccgcagaatgtttaaaagaagagggcaagacaagtgctttgacctgcagccttccgaaaaatgaagatttatgcttaaatgattcaaattcaagagatgaaaatttcaaattacctgacttttcctttcaggaagataagactgttataaaacaatctgcacaagaagactcaaaaagtttagaccttaaggataatgatgtaatccaagattcctcttcagctttacatgtttccagtaaagatgtgccgtcctcattgtcctgtcttcctgcgtctgggtctatgtgtggatcattaattgaaagtaaagcacggggtgattttttacctcagcatgaacataaagataatatacaagatgcagtgactatacatgaagaaatacagaacagtgttgttctaggtggggaaccattcaaagagaatgatcttttgaaacaggaaaaatgtaaaagcatactccttcagtcattaattgaagggatggaagacagaaagatagatcctgaccagacagtaatcagagctgagtctttggatggtggtgacaccagttctacagttgtagaatctcaagaggggctttctggcactcatgtcccagagtcttctgattgttgtgaaggttttattaatactttttcaagcaatgatatggatgggcaagacttagattactttaatattgatgaaggcgcaaaaagtggcccactaattagtgatgctgaacttgatgcctttctgacagaacagtatcttcagaccactaacataaagtcttttgaagaaaatgtaaatgactctaaatcgcaaatgaatcagatagatatgaaaggcttagatgatggaaacatcaataatatatatttcaatgcagaagcaggagctattggggaaagtcatggtattaatataatttgtgaaatagttgataaacaaaatacaatagaaaatggcctttctttaggagaaaaaagcactattccagttcaacaagggttacctaccagtaagtctgagattacaaatcaattatcggtctctgatattaacagtcaatctgttggaggggccagacctaagcaattgtttagccttccatcaagaacaaggagttcaaaggacctgaataagccagatgttccagatacaatagaaagtgaacccagcacagcagataccgttgttccaatcacttgtgctatagattctacagctgatccacaggttagcttcaactctaattacattgatatagaaagtaattctgaaggtggatctagtttcgtaactgcaaatgaagattctgtacctgaaaacacttgcaaagaaggcttggttttgggccagaaacagcctacttgggttcctgattcagaagctccaaactgtatgaactgccaagtcaaatttacttttaccaaacggcgacaccattgccgagcatgtgggaaagtattttgtggtgtctgttgtaataggaagtgtaaactgcaatatctagaaaaggaagcaagagtatgtgtagtctgctatgaaactattagtaaagctcaggcatttgaaaggatgatgagtccaactggttctaatcttaagtctaatcattctgatgaatgtactactgtccagcctcctcaggagaaccaaacatccagtataccttcaccagcaactttgccagtctcagcacttaaacaaccaggtgttgaaggactatgttccaaagaacagaagagagtatggtttgcagatggtatattgcccaatggtgaagttgcagatacaacaaaattatcatctggaagtaaaagatgttctgaagactttagtcctctctcacctgatgtgcctatgacagtaaacacagtggatcattcccattctactacagtggaaaagccaaacaatgagacaggagatattacaagaaatgagataattcagagtcctatttctcaggttccatcagtggaaaaattgtctatgaacacaggaaatgaggggttacctacttctggttcatttacactagatgatgatgtttttgcagaaactgaagaaccatctagtcctactggtgtcttagttaacagcaatttacctattgctagtatttcagattataggttactgtgtgatattaacaagtatgtctgcaataagattagtcttctacctaatgatgaggacagtttgcccccacttctggttgcatctggagaaaagggatcagtgcctgtagtagaagaacatccatctcatgagcagatcattttgcttcttgaaggtgaaagctttcatcctgttacatttgtcctaaatgctaatctactcgtgaatgtcaaattcatattttattcctcagacaaatattggtacttttcaaccaatggattgcatggcttgggacaggcagaaattattattctattgttatgtttgccaaatgaagatactattcctaaggacatcttcagactatttatcaccatatataaggatgctctaaaaggaaaatacatagaaaacttggacaatattacctttactgagagttttctcagtagcaaggatcacggaggattcctgtttattacacctacttttcagaaacttgatgatctctcattaccaagtaatccttttctttgtggaattcttatccagaagcttgagattccctgggcaaaggtttttcctatgcgtttaatgttgagattgggtgcagaatataaagcatatcctgctcctctaacaagcatcagaggccgaaaacctctttttggagaaataggacacactattatgaacttacttgttgaccttcgaaattaccagtataccttgcataatatagatcaactgttgattcatatggaaatgggaaaaagctgcataaaaataccacggaaaaagtacagtgatgtaatgaaagtactaaattcttccaatgagcatgtcattagcattggagcaagtttcagtacagaagcagattctcatctagtctgtatacagaatgatggaatttatgaaacacaggccaacagtgccactggccatcctagaaaagtgacaggtgcaagttttgtggtattcaatggagctctaaaaacatcttcaggatttcttgctaagtccagcatagttgaagatggcttaatggtacaaataactccagagaccatgaatggcttgcggctagctttacgagaacagaaagactttaaaattacatgtgggaaagttgatgcagtagacctgagagaatacgtggatatctgctgggtagatgctgaagaaaaaggaaacaaaggagttatcagttcagtggatggaatatcattacaaggatttccaagtgaaaaaataaaactggaagcagattttgaaaccgatgagaagattgtaaaatgtaccgaggtgttctactttctaaaggaccaggatttatctattttatcaacttcttatcagtttgcaaaagaaatagccatggcttgtagtgctgcgctgtgccctcacctgaaaactctaaaaagtaatgggatgaataaaattggactcagagtttccattgacactgatatggttgaatttcaggcaggatctgaaggccaacttctgcctcagcattatctaaatgatcttgatagtgctctgatacctgtgatccatggtgggacctccaactctagtttaccattagaaatagaattagtgtttttcattatagaacatcttttttagtgaaagaatgtgccatattacatattgcaacctaatttgttaaaactaactccagcactaaagctgaaatgccacaaacactaaaagtataaatatgtctgatttttgaaacacataagctttgctctttaggcaggaatgatcttttcaaatcattagcacaatatttaaatatctaaaaatttaagagatccatactttctgtagctttacaattaatttaagtactaaaaagacaaggatttcttttaagaaatttatagcatttactgtgttatttaaatgctaagccaaagtatctgcacttaggtatacctctttatgccaataatgattttaatgaaggctcttttcagatgtaaccttatgaaggaaatatctgctttgtgtatatgccagttagaatactggtttctaaagtctgtcaaattgtatttcagtggcacaaaaaccagttttgaggtcttagacttataattctttgaataaaactgataacttatttgtataattggagtggagacctacctccataattagataaactctttttggattataatcagaattttgccttttttcttctcaaattattacatatgtatgtattatatatccacatatatagttttccctgattaaatggatattaaaataattgcgggtgcttcaggactttttgcttctatatttaagtatattgtttttatagcaagaacatattctgaatgttttataaatctttaataatttatatgtaggtaatatttttgtatcacaatgcattatttttttcctcctttccttccaaactataccactgtatttaccacttctaagagtgactgacgacgggccagatgacccttgaagtagtcattatgtagcaataaatgaagcctgaaacaggtttttttacttccactttaatccttagaaatttcttggcaacttcgcatattttcattgacaccagtgtataagtataaatttaaatgaactaattacttttgcatattttaaattctttatatggtagttattttttataacaggatattaacataagttaaatcctatgtatttgaaattgttacagagctttcctctttacttcaaacagcaaaaaagtggggggcatattgtagtcctgtcatttaagttatgtaaaaaatttaatcattattttgatgctttaaacattctcatgtgtaatatatgtttttgtatcaaaaacactcatatatttcaagaaaaagaaattatgttaaatagccctgttttaagaaaaatatttatgaagcatctcaacttgaagatcaagtcaaagttataactcaggatctgaggtctcaagctaggagagactgagaattttaatcagtttgggcatatagtttggactgaatcacatctgtagtacttagccaaagacaatttggaggagaatatcagccttctggaagtagctacttcctgaacaatgtaaagtgtcgcagatattcaataaaatggcaacctgttataatttgtgaaatttattgaaatggtgtaagatgaaaacaattgcatatcaaacccaatttatgttttctaaatatagtgtatgtattctgccatgtaagtaattgaacagtcttaaaataaccaaatggtagagggctgttccatgatgggacagctttggatttgttttcataaaatctctatattcaataaaaattggaattatgtgcctgaagtttggaggcacattttgaagtattctttgtagacatatagtatgtttctgaatgtgtttgttacttatttggtcattggtacttaatttgaaattttaattttttaagagaagaaatagaatggttctttgtactcagtctgcaatgatctatttttggcttatgtcttttaatactactctctttctctgaattttgaaatatgaagtaaaatctagcccatttgttttatgcagctattcaacaaactttgtgtgttcgtatacttgctacatgcagagcactttaccaggtttctaagcaaaaatttctaaaaatgattaattgttctgacagaattaggcgtagttctttatcaacatttatggattccatgccacaagtagtatgcgcttaagtgcagagcatgccaagagaaagagtaggatttggccctgtaggagcaaagattcaattgtgggaaactacttgtttctgaaaattgcatgctaggatatttacatcatgttcctgttgaaaacaattcctgattaaaatacaagaataatcttaaaacatcaaagagattttccagacaataaggaatgccaagtccaaaagtaaagagaataagagaagcaagcatgtacccttactctgacaaccttatgagtgagggggacagaaattaaagttcagggcccatataaggtgatgaacctaacaggagaccctccacacaataggctgagactcccaaatactttcacctttaggatgataatgaatcagaggtggaagaaccaatgtaaaagaacaggcaagtttagaattgccccagtgatctaaagaatcttaagcactgagcttcctttaaggtgttcccacactagtaatgcctccaggtgacagagaaaataaaatgtaaatacttttcatggaaaagtaatttcattgtaggcctcaaattacttttcaaatatgtctagtaacacatagtaaaaagtagtcatataaggaaactagattccagaggcaagaattacttgaagcaatgaaaacaaactcacagatataggtattagatttgttttctttgtttaaggaaataaggtgtgtgaatgtacttgcaggaaatgggaaactatacgataaaaagttgtggagctaatctggaaaagaactgaatataaacattacaagaatatacataaaaactgcactttaaaactcagtaa

SEQ ID NO: 11331 - protein, 1539 aa, Homo sapiens; identical to SEQ ID NO: 11319

SEQ ID NO: 11332 - DNA, 2528 bp, Homo sapiens
cccggccggggtagctcttcactcctcagcgcgacgtcgtgtcgagttcccaaaaagctccgcaggggctgtagggaggcatacaagaattaaattctgaataagtctgcaggtaggatggacagttattttaaagcagctgtcagtgacttggacaaactccttgatgattttgaacagaacccagatggggtctcactgtgttgctcaggctggtcttgaactcctgatctcaagttatcctccgaccgtggcttcccaaagcgctgggattacagttatgaacaagattatctccaagatgtacaaaatgcatatgattctaaccactgctcagtttcttcagagttggcttcctcacagcgaacttcattgctcccaaaagaccaagagtgcgttaatagttgtgcctcatcagaaacaagctatggaacaaatgagagttccctgaatgaaaaaacactcaagggacttacttctatacaaaatgaaaaaaatgtaacaggacttgatcttctttcttctgtggatggtggtacttcagatgaaatccagccgttatatatgggacgatgtagtaaacctatctgtgatctgataagtgacatgggtaacttagttcatgcaaccaatagtgaagaagatattaaaaaattattgccagatgattttaagtctaatgcagattccttgattggattggatttatcttcagtgtcagatactccctgtgtttcttcaacagaccatgatagtgatactgtcagagaacaacagaatgatatcagttctgaattacaaaatagagaaatcggaggaatcaaagaattgggtataaaagtagatacaacactttcagattcctataattacagtggaacagaaaatttaaaagataaaaagatctttaatcagttagaatcaattgttgattttaacatgtcatctgctttgactcgacaaagttccaaaatgtttcatgccaaagacaagctacaacacaagagccagccatgtggattactaaaagatgttggcttagtaaaagaggaagtagatgtggcagtcataactgccgcagaatgtttaaaagaagagggcaagacaagtgctttgacctgcagccttccgaaaaatgaagatttatgcttaaatgattcaaattcaagagatgaaaatttcaaattacctgacttttcctttcaggaagataagactgttataaaacaatctgcacaagaagactcaaaaagtttagaccttaaggataatgatgtaatccaagattcctcttcagctttacatgtttccagtaaagatgtgccgtcctcattgtcctgtcttcctgcgtctgggtctatgtgtggatcattaattgaaagtaaagcacggggtgattttttacctcagcatgaacataaagataatatacaagatgcagtgactatacatgaagaaatacagaacagtgttgttctaggtggggaaccattcaaagagaatgatcttttgaaacaggaaaaatgtaaaagcatactccttcagtcattaattgaagggatggaagacagaaagatagatcctgaccagacagtaatcagagctgagtctttggatggtggtgacaccagttctacagttgtagaatctcaagaggggctttctggcactcatgtcccagagtcttctgattgttgtgaaggttttattaatactttttcaagcaatgatatggatgggcaagacttagattactttaatattgatgaaggcgcaaaaagtggcccactaattagtgatgctgaacttgatgcctttctgacagaacagtatcttcagaccactaacataaagtcttttgaagaaaatgtaaatgactctaaatcgcaaatgaatcagatagatatgaaaggcttagatgatggaaacatcaataatatatatttcaatgcagaagcaggagctattggggaaagtcatggtattaatataatttgtgaaatagttgataaacaaaatacaatagaaaatggcctttctttaggagaaaaaagcactattccagttcaacaagggttacctaccagtaagtctgagattacaaatcaattatcggtctctgatattaacagtcaatctgttggaggggccagacctaagcaattgtttagccttccatcaagaacaaggagttcaaaggacctgaataagccagatgttccagatacaatagaaagtgaacccagcacagcagataccgttgttccaatcacttgtgctatagattctacagctgatccacaggttagcttcaactctaattacattgatatagaaagtaattctgaaggtggatctagtttcgtaactgcaaatgaagattctgtacctgaaaacacttgcaaagaaggcttggttttgggccagaaacagcctacttgggttcctgattcagaagctccaaactgtatgaactgccaagtcaaatttacttttaccaaacggcgacaccattgccgagcatgtgg

SEQ ID NO: 11333 - protein, 94 aa, Homo sapiens
MILNRTQMGSHCVAQAGLELLISSYPPTVASQSAGITVMNKIISKMYKMHMILTTAQFLQSWLPHSELHCSQKTKSALIVVPHQKQAMEQMRVP

SEQ ID NO: 11334 - DNA, 790 bp, Homo sapiens
gtgtcgagttcccaaaaagctccgcaggggctgtagggaggttgaagcatatgaagaaaacaccagccttgaacagatacgtagcaggaaaagcgaggatcttacaagcctgctgaaaggctcctggggacatccaggggtcctgagaccacagtttgagaaagctgatttaaccatttttggattggtgggctgttaggttgtttaaaattttacactgttacaacccttgcaacagtgaaagttctttgtgatgttttctggtgtatgcgtgctagtgttttttctgtaagtagaattgctaggtcatagagttttgcttttttttaagtttgttaaacacattacttttgatgcctgtataatttgcttttgtgcactaatgttggtgtttagattgtttcaactaatgatttggtgaaatatctttgcatgtttttagttgttttgaattattttctttttgagggggctggggggagtccagtaaaaaccagacaactgccagatacattttaagagagctttaacacatggattcttttctaaaatttctaaaaagataattgttagatcaaatattaggaatctttctcaggctattggtacatattgtcacattgttttcatgggagatagtaccagtttgtttcctgtcagcagtgtctgacatgctttaaaaaaaaaaatcacacccttaccaacatcgagtacttttattattttaaaaaattgtttcaatttagcaggcaataaatggtatatgttctaattctcattactttgatag

SEQ ID NO: 11335 - protein, 65 aa, Homo sapiens
CRVPKKLRRGCREVEAYEENTSLEQIRSRKSEDLTSLLKGSWGHPGVLRPQFEKADLTIFGLVGC

SEQ ID NO: 11336 - DNA, 4977 bp, Homo sapiens
atttattgtaatttactttgaagtaaattccaaaaacatctgagattttaacactattgttttcccctttatagctcaggcatttgaaaggatgatgagtccaactggttctaatcttaagtctaatcattctgatgaatgtactactgtccagcctcctcaggagaaccaaacatccagtataccttcaccagcaactttgccagtctcagcacttaaacaaccaggtgttgaaggactatgttccaaagaacagaagagagtatggtttgcagatggtatattgcccaatggtgaagttgcagatacaacaaaattatcatctggaagtaaaagatgttctgaagactttagtcctctctcacctgatgtgcctatgtatttcagattataggttactgtgtgatattaacaagtatgtctgcaataagattagtcttctacctaatgatgaggacagtttgcccccacttctggttgcatctggagaaaagggatcagtgcctgtagtagaagaacatccatctcatgagcagatcattttgcttcttgaaggtgaaagctttcatcctgttacatttgtcctaaatgctaatctactcgtgaatgtcaaattcatattttattcctcagacaaatattggtacttttcaaccaatggattgcatggcttgggacaggcagaaattattattctattgttatgtttgccaaatgaagatactattcctaaggacatcttcagactatttatcaccatatataaggatgctctaaaaggaaaatacatagaaaacttggacaatattacctttactgagagttttctcagtagcaaggatcacggaggattcctgtttattacacctacttttcagaaacttgatgatctctcattaccaagtaatccttttctttgtggaattcttatccagaagcttgagattccctgggcaaaggtttttcctatgcgtttaatgttgagattgggtgcagaatataaagcatatcctgctcctctaacaagcatcagaggccgaaaacctctttttggagaaataggacacactattatgaacttacttgttgaccttcgaaattaccagtataccttgcataatatagatcaactgttgattcatatggaaatgggaaaaagctgcataaaaataccacggaaaaagtacagtgatgtaatgaaagtactaaattcttccaatgagcatgtcattagcattggagcaagtttcagtacagaagcagattctcatctagtctgtatacagaatgatggaatttatgaaacacaggccaacagtgccactggccatcctagaaaagtgacaggtgcaagttttgtggtattcaatggagctctaaaaacatcttcaggatttcttgctaagtccagcatagttgaagatggcttaatggtacaaataactccagagaccatgaatggcttgcggctagctttacgagaacagaaagactttaaaattacatgtgggaaagttgatgcagtagacctgagagaatacgtggatatctgctgggtagatgctgaagaaaaaggaaacaaaggagttatcagttcagtggatggaatatcattacaaggatttccaagtgaaaaaataaaactggaagcagattttgaaaccgatgagaagattgtaaaatgtaccgaggtgttctactttctaaaggaccaggatttatctattttatcaacttcttatcagtttgcaaaagaaatagccatggcttgtagtgctgcgctgtgccctcacctgaaaactctaaaaagtaatgggatgaataaaattggactcagagtttccattgacactgatatggttgaatttcaggcaggatctgaaggccaacttctgcctcagcattatctaaatgatcttgatagtgctctgatacctgtgatccatggtgggacctccaactctagtttaccattagaaatagaattagtgtttttcattatagaacatcttttttagtgaaagaatgtgccatattacatattgcaacctaatttgttaaaactaactccagcactaaagctgaaatgccacaaacactaaaagtataaatatgtctgatttttgaaacacataagctttgctctttaggcaggaatgatcttttcaaatcattagcacaatatttaaatatctaaaaatttaagagatccatactttctgtagctttacaattaatttaagtactaaaaagacaaggatttcttttaagaaatttatagcatttactgtgttatttaaatgctaagccaaagtatctgcacttaggtatacctctttatgccaataatgattttaatgaaggctcttttcagatgtaaccttatgaaggaaatatctgctttgtgtatatgccagttagaatactggtttctaaagtctgtcaaattgtatttcagtggcacaaaaaccagttttgaggtcttagacttataattctttgaataaaactgataacttatttgtataattggagtggagacctacctccataattagataaactctttttggattataatcagaattttgccttttttcttctcaaattattacatatgtatgtattatatatccacatatatagttttccctgattaaatggatattaaaataattgcgggtgcttcaggactttttgcttctatatttaagtatattgtttttatagcaagaacatattctgaatgttttataaatctttaataatttatatgtaggtaatatttttgtatcacaatgcattatttttttcctcctttccttccaaactataccactgtatttaccacttctaagagtgactgacgacgggccagatgacccttgaagtagtcattatgtagcaataaatgaagcctgaaacaggtttttttacttccactttaatccttagaaatttcttggcaacttcgcatattttcattgacaccagtgtataagtataaatttaaatgaactaattacttttgcatattttaaattctttatatggtagttattttttataacaggatattaacataagttaaatcctatgtatttgaaattgttacagagctttcctctttacttcaaacagcaaaaaagtggggggcatattgtagtcctgtcatttaagttatgtaaaaaatttaatcattattttgatgctttaaacattctcatgtgtaatatatgtttttgtatcaaaaacactcatatatttcaagaaaaagaaattatgttaaatagccctgttttaagaaaaatatttatgaagcatctcaacttgaagatcaagtcaaagttataactcaggatctgaggtctcaagctaggagagactgagaattttaatcagtttgggcatatagtttggactgaatcacatctgtagtacttagccaaagacaatttggaggagaatatcagccttctggaagtagctacttcctgaacaatgtaaagtgtcgcagatattcaataaaatggcaacctgttataatttgtgaaatttattgaaatggtgtaagatgaaaacaattgcatatcaaacccaatttatgttttctaaatatagtgtatgtattctgccatgtaagtaattgaacagtcttaaaataaccaaatggtagagggctgttccatgatgggacagctttggatttgttttcataaaatctctatattcaataaaaattggaattatgtgcctgaagtttggaggcacattttgaagtattctttgtagacatatagtatgtttctgaatgtgtttgttacttatttggtcattggtacttaatttgaaattttaattttttaagagaagaaatagaatggttctttgtactcagtctgcaatgatctatttttggcttatgtcttttaatactactctctttctctgaattttgaaatatgaagtaaaatctagcccatttgttttatgcagctattcaacaaactttgtgtgttcgtatacttgctacatgcagagcactttaccaggtttctaagcaaaaatttctaaaaatgattaattgttctgacagaattaggcgtagttctttatcaacatttatggattccatgccacaagtagtatgcgcttaagtgcagagcatgccaagagaaagagtaggatttggccctgtaggagcaaagattcaattgtgggaaactacttgtttctgaaaattgcatgctaggatatttacatcatgttcctgttgaaaacaattcctgattaaaatacaagaataatcttaaaacatcaaagagattttccagacaataaggaatgccaagtccaaaagtaaagagaataagagaagcaagcatgtacccttactctgacaaccttatgagtgagggggacagaaattaaagttcagggcccatataaggtgatgaacctaacaggagaccctccacacaataggctgagactcccaaatactttcacctttaggatgataatgaatcagaggtggaagaaccaatgtaaaagaacaggcaagtttagaattgccccagtgatctaaagaatcttaagcactgagcttcctttaaggtgttcccacactagtaatgcctccaggtgacagagaaaataaaatgtaaatacttttcatggaaaagtaatttcattgtaggcctcaaattacttttcaaatatgtctagtaacacatagtaaaaagtagtcatataaggaaactagattccagaggcaagaattacttgaagcaatgaaaacaaactcacagatataggtattagatttgttttctttgtttaaggaaataaggtgtgtgaatgtacttgcaggaaatgggaaactatacgataaaaagttgtggagctaatctggaaaagaactgaatataaacattacaagaatatacataaaaactgcactttaaaactcagtaa

SEQ ID NO: 11337 - protein, 627 aa, Homo sapiens
MNVLLSSLLRRTKHPVYLHQQLCQSQHLNNQVLKDYVPKNRREYGLQMVYCPMVKLQIQQNYHLEVKDVLKTLVLSHLMCLCISDYRLLCDINKYVCNKISLLPNDEDSLPPLLVASGEKGSVPVVEEHPSHEQIILLLEGESFHPVTFVLNANLLVNVKFIFYSSDKYWYFSTNGLHGLGQAEIIILLLCLPNEDTIPKDIFRLFITIYKDALKGKYIENLDNITFTESFLSSKDHGGFLFITPTFQKLDDLSLPSNPFLCGILIQKLEIPWAKVFPMRLMLRLGAEYKAYPAPLTSIRGRKPLFGEIGHTIMNLLVDLRNYQYTLHNIDQLLIHMEMGKSCIKIPRKKYSDVMKVLNSSNEHVISIGASFSTEADSHLVCIQNDGIYETQANSATGHPRKVTGASFVVFNGALKTSSGFLAKSSIVEDGLMVQITPETMNGLRLALREQKDFKITCGKVDAVDLREYVDICWVDAEEKGNKGVISSVDGISLQGFPSEKIKLEADFETDEKIVKCTEVFYFLKDQDLSILSTSYQFAKEIAMACSAALCPHLKTLKSNGMNKIGLRVSIDTDMVEFQAGSEGQLLPQHYLNDLDSALIPVIHGGTSNSSLPLEIELVFFIIEHLF

SEQ ID NO: 11338 - DNA, 5165 bp, Homo sapiens
attgcaaaggttgccccctcattcatataaggcaaaaagctagcagttaatcatttcctttatcgtttttatgtcttttcacactaatatcttgtatttttttcaaatctagaccctctgtctttcaaataacttagttgcctttttagaattacaaaatatgtttgtactagcaagaaaatgactactttgacttaagtctttaaagcagctaatgttgggtatgtggtgtttctttagaattttaaggaagtatatttgtataatagacattagagagattagtttgcttaagacctaacttgagaactgaaggttacaaatgtgtctgtgtcttatcactatagaaatagtcttgccttccttttcttcagagtgcctgctgcgttaccagtaaggtctcttttcctttttggtgtccagaatttatggtgccctaaagaaagaacatagttaggtggccgacctcatgtcccttccctttttgtgcattggtttccctgactctatctgtatattcctttttttttttttttgagacggagtctcactctgtcgcccaggctggagtgcagtggcgcgatctcggctcactgcaagcttcgcctcccgggttcacgccattctcctgcctcagcctcccaagtagctgggactacaggtgcccgccaccacgcccggctaattttgtttttgtatttttagtagagacagggtttcaccatgttagccaggatggtctcgatctcctgacctcatcatctacccgccttggcctcccaaagtgctgggatgacaggcgtgagccaccacggccagccccagtatatttcttttatcatgctgaaccaagaactttaaaagtttactaccattcataaattagcacaattgaatattagttataaatgccttaaaagtctttagttctttgtatttctctttaaattatcagaaacctatatcgttctaaccaattatcataattttccaccccctataattttgtggaaacaagatgtataatgaaaagatgaaatactctcgaatcagacaagcctaatttcaaatctgtttcaccaattattagtcactaggagcaagttgattaatttctgtgtctcaactttctcatttatgaaatagtatagacacactccattaggttgttgaatttaaataagataatgtatgtatagttcccagttcaatgtagcatctagtagatacatagatacacagtaagtgttaatattgtctcttggctgggtgtggtggctcatgcctgtaatcccagcactttgggaggccgaggtgggtggatcacctgaggtcagaagtttgagatcagcctggtcaacatggtgaaaccctgtctctactaaaaatacaaaaattagccaggtgttgtggcacatgcctataatcccagctacttgggaggctgaggcaggagaattacttgaacccaggaagtggaggttgcaatgagtcgagattgcaccgctgcactccagcctgggcaacagagtgagaccttgtctcaaaaacaaaaaaaaaattatctctcactttcccctaagaactgattgagtgatatttatacataatgtttgtttgtaaaatgagagttgaaggtaataaattcaataatttggggttttttttgttgatagtaaccagttttcctttcttatgtatagcatatcctgctcctctaacaagcatcagaggccgaaaacctctttttggagaaataggacacactattatgaacttacttgttgtgagtaattgaactattttattaggtatttttatactgttactttaaaactgtatttagcaaagtttatacatttatattttcctactttaatttgccatatttggtataatgaccattcatttacaataaatcctaattattttaacattagtgctcagtttttgacgaattgctttttagaacgtactatctcctcatgtacgtgtacctgattctaagtgccttttgattcattctcctgcagttcttggatatttaggtaatgtaagaactctatacagacctcttaaagttgttgaaacttttgtaaatgtattagtaaagtcagtcagtcttgtgattttgagcaaattatggccttagttttctcatttataataggaagtgttggattagatgatatctaaagttcccttccacctatactttttgtaattttgtgtttccctgttaccatagaaaaatgtttcagtggactcacttttatttatccatgcctagtttgaagaccttttctattttggaagttctgtaactagaaagttaccctaaatactacaaagtttttcctgagaatgatattctttattactgctgtggagaaggatttcttaaagaaggatttaatggatagaaaaatactcatggttagtagtttatggtaatgcaattattctatgtaggaccttcgaaattaccagtataccttgcataatatagatcaactgttgattcatatggaaatgggaaaaagctgcataaaaataccacggaaaaagtacagtgatgtaatgaaagtactaaattcttccaatgagcatgtcattagcattggagcaagtttcagtacagaagcagattctcatctagtctgtatacagaatgatggaatttatgaaacacaggccaacagtgccactggccatcctagaaaagtgacaggtgcaagttttgtggtattcaatggagctctaaaaacatcttcaggatttcttgctaagtccagcatagttgaagatggcttaatggtacaaataactccagagaccatgaatggcttgcggctagctttacgagaacagaaagactttaaaattacatgtgggaaagttgatgcagtagacctgagagaatacgtggatatctgctgggtagatgctgaagaaaaaggaaacaaaggagttatcagttcagtggatggaatatcattacaaggatttccaagtgaaaaaataaaactggaagcagattttgaaaccgatgagaagattgtaaaatgtaccgaggtgttctactttctaaaggaccaggatttatctattttatcaacttcttatcagtttgcaaaagaaatagccatggcttgtagtgctgcgctgtgccctcacctgaaaactctaaaaagtaatgggatgaataaaattggactcagagtttccattgacactgatatggttgaatttcaggcaggatctgaaggccaacttctgcctcagcattatctaaatgatcttgatagtgctctgatacctgtgatccatggtgggacctccaactctagtttaccattagaaatagaattagtgtttttcattatagaacatcttttttagtgaaagaatgtgccatattacatattgcaacctaatttgttaaaactaactccagcactaaagctgaaatgccacaaacactaaaagtataaatatgtctgatttttgaaacacataagctttgctctttaggcaggaatgatcttttcaaatcattagcacaatatttaaatatctaaaaatttaagagatccatactttctgtagctttacaattaatttaagtactaaaaagacaaggatttcttttaagaaatttatagcatttactgtgttatttaaatgctaagccaaagtatctgcacttaggtatacctctttatgccaataatgattttaatgaaggctcttttcagatgtaaccttatgaaggaaatatctgctttgtgtatatgccagttagaatactggtttctaaagtctgtcaaattgtatttcagtggcacaaaaaccagttttgaggtcttagacttataattctttgaataaaactgataacttatttgtataattggagtggagacctacctccataattagataaactctttttggattataatcagaattttgccttttttcttctcaaattattacatatgtatgtattatatatccacatatatagttttccctgattaaatggatattaaaataattgcgggtgcttcaggactttttgcttctatatttaagtatattgtttttatagcaagaacatattctgaatgttttataaatctttaataatttatatgtaggtaatatttttgtatcacaatgcattatttttttcctcctttccttccaaactataccactgtatttaccacttctaagagtgactgacgacgggccagatgacccttgaagtagtcattatgtagcaataaatgaagcctgaaacaggtttttttacttccactttaatccttagaaatttcttggcaacttcgcatattttcattgacaccagtgtataagtataaatttaaatgaactaattacttttgcatattttaaattctttatatggtagttattttttataacaggatattaacataagttaaatcctatgtatttgaaattgttacagagctttcctctttacttcaaacagcaaaaaagtggggggcatattgtagtcctgtcatttaagttatgtaaaaaatttaatcattattttgatgctttaaacattctcatgtgtaatatatgtttttgtatcaaaaacactcatatatttcaagaaaaagaaattatgttaaatagccctgttttaagaaaaatatttatgaagcatctcaacttgaagatcaagtcaaagttataactcaggatctgaggtctcaagctaggagagactgagaattttaatcagtttgggcatatagtttggactgaatcacatctgtagtacttagccaaagacaatttggaggagaatatcagccttctggaagtagctacttcctgaacaatgtaaagtgtcgcagatattcaataaaatggcaacctgttataatttgtgaaatttattgaaatggtgtaagatgaaaacaattgcatatcaaacccaatttatgttttctaaatatagtgtatgtattctgccatgtaagtaattgaacagtcttaaaataaccaaatggtagagggctgttccatgatgggacagctttggatttgttttcataaaatctctatattcaataaaaattggaattatgtgcctgaagtttggaggcacattttgaagt

SEQ ID NO: 11339 - protein, 291 aa, Homo sapiens [sequence omitted]

SEQ ID NO: 11340 - DNA, 1204 bp, Homo sapiens
ggtggcagggaaattcgactccacaaaccacaggcctcggcgggggaagagcccggcgggcgccagcgaagcggaaccaaacggagccgcggcacgcaggcgcaaaggctggcgttcgaggttcgtttacgcgccgcttcgccgtgcaggtggtggcgaagcgctcctccgaaaggtttcggaagctggtggtagctctgaagataacgctgcgttagggcatactgcggcggaggatggaactccgattgaaagcagttgctggagtggagcacgaatttcaacaagccgcatgttgaagtgtgaggcgtgaaagggtatgtctgatatttgctttaaaatgctccagcaaagaaattaagggatggatgaagcaaaagagccaggtatggtggctcatgcctctaatctcagcactttgggaggccgaagcaggcagatcacctgaggtcaggagtttgagaccatcctgaccaacatggtgaaactcgtctctactacaaacataaaaaaattagctgggcgtggtaccacgcacctgtaatcccagctactcctctggaggctcagacaggagaactgcttgaaccgggaggcggaggttgcagtgagctgagatcgcaccaatccattccagcctgggcaacagagtgagactccatctcataaaaaaaaaaaaagtaaagaaaaaaaagaaaatgtctttatttcattttctttcctaaagaatatatttgctggataaaggattctgtgttgacagttttgttgctttttaaaagcactttataaatgttgctccatggtttctgatgagaaatctgccatcactgaaatctttggttctcctatatacaaagtgttgttttcttccagttgttttcaaagtattttctttacagttggtttcatcactttgattatgacgtgcctgggtgtggttttcctttttgggatttgctgtgccagcagaccggctttaaatagaatgctatgtaaatgtatgtgaatatttgttttttgccagatgtttggaagtttttagctattatttcttcagatatttttttcttccaattgttctttctgggctcctaagacatgaatattagactgtttcatattgtcccacagatccccaaaggtcttctcatttttttcacttttttctctgtcattcagactagataatttctgctcatgt

SEQ ID NO: 11341 - protein, 34 aa, Homo sapiens
MKQKSQVWWLMPLISALWEAEAGRSPEVRSLRPS

SEQ ID NO: 11342 - DNA, 693 bp, Homo sapiens
agcgctcctccgaaaggtttcggaagctggtggtagctctgaagataacgctgcgttagggcatactgcggcggaggatggaactccgattgaaagcagttgctggagtggagcacgaatttcaacaatgaagtctcactctgttcccccaggctggagtgcatgagctgagatcgcaccaatccattccagcctgggcaacagagtgagactccatctcataaaaaaaaaaaaagtaaagaaaaaaaagaaaatgtctttatttcattttctttcctaaagaatatatttgctggataaaggattctgtgttgacagttttgttgctttttaaaagcactttataaatgttgctccatggtttctgatgagaaatctgccatcactgaaatctttggttctcctatatacaaagtgttgttttcttccagttgttttcaaagtattttctttacagttggtttcatcactttgattatgacgtgcctgggtgtggttttcctttttgggatttgctgtgccagcagaccggctttaaatagaatgctatgtaaatgtatgtgaatatttgttttttgccagatgtttggaagtttttagctattatttcttcagatatttttttcttccaattgttctttctgggctcctaagacatgaatattagactgtttcatattgtcccacagatcc

SEQ ID NO: 11343 - protein, 68 aa, Homo sapiens
MVSDEKSAITEIFGSPIYKVLFSSSCFQSIFFTVGFITLIMTCLGVVFLFGICCASRPALNRMLCKCM

SEQ ID NO: 11344 - DNA, 508 bp, Homo sapiens
gtgccgcggctccgtttggttccgcttcgctggcgcccgccgggctcttcccccgccgaggcctgtggtttgtggagtcgaatttccctgccaccagtgcccggttagcaggggcgccagcctgggcgcctgcgcggacggcgggcgtcgtcaccatggcagcatccgctggaggcccaggatcttggagtgaaaatatactggaatattttctgagaaatagccagattacagcagaagacggtgctgagatcacctggtatcatgcagctaaccacaaggcacaaacaaatgaggcactgaaaaagacgagatttcaccgtgttggccagactggtctcgaactcctgacctcatgatccgcctgccttggcctcgcgaagtgctgggattacaggtgtgagccaccacgcccggccaagaactttacttttattaagatgagtggattggtcacgtgagatggcagtgacaaaaacttcagtttaaaatgccttatggatctgta

SEQ ID NO: 11345 - protein, 67 aa, Homo sapiens
MAASAGGPGSWSENILEYFLRNSQITAEDGAEITWYHAANHKAQTNEALKKTRFHRVGQTGLELLTS

SEQ ID NO: 11346 - DNA, 1705 bp, Homo sapiens
cgtttggttccgcttcgctggcgcccgccgggctcttcccccgccgaggcctgtggtttgtggagtcgaatttccctgccaccagtgcccggttagcaggggcgccagcctgggcgcctgcgcggacggcgggcgtcgtcaccatggcagcatccgctggaggcccaggatcttggagtgaaaatatactggaatattttctgagaaatagccagattacagcagaagacggtgctgagatcacctggtatcatgcagctaaccacaaggcacaaacaaatgaggcactgaaaagtactgctcacatgatagaggctgatgtccttcttccaagtgatggatcagaacacagccagccaattatggcccatccccctgaaacaaacagtgataatactctacaggagtggctgactgaagttatgaaaagcaataaaggcatcaagctggatttcaaaagtctggcagttgtagaaccatccatgatgctcttggaaaatgtgaagaggcatctgaagcgtcctgtatggattaatgccgatattcttcctggtccaaatggaaatagcaaagtaatagatgcaaaaccatttttagacaccgtgatatccttctttccagacgtgacgttttccctgggttggacaacaggatggcatcctgagaaagtcaatgaagggtacagttggacaatggtgaaagagatggaatatatatgtaatgaactaagtcagcctgtaacgttccctgtcagagcagcattagtcaggcagtcttgttctcagttactttggctgttaaagaaatcaaacaggtacagcctgactatttggactggaaaaaatgataactattccgttgaagatttactttacattagagaccattttgacaaaaaacaagttttctatgacatcttggaaccacaaaaccatgaatttaaacaagccattggaatcaaagttaatctctaagaagaagattctcaattatttcctgtgttttggtttcataatccttctctccattggtctgaattaattaccatataaattatggttattgattgacgttccaagtcatctaatcaagaaacgtttattgtatgcttactctgtgggcatatgtccttataatagtgcacttacataaaagatttggaaagaagagatttatttacacacgtggcctagtctaataataattcaggaaaatgatactctgcaccccttcataaaaatagttttgataaactaaagatgattggcagaatccatatgtcataaaacaggtataaatcacatgtgcttggcacttgcattacagagattatgaaaaatatggtactcttttcctttttcctagaaaactggttattttagagataacaaaaaaggaagagggcttttaaaatgtttttaattttcacaggggtcagcagctgtctcatatcaagatctattaatccatttcctgaaactgtagattaaattagatagatctagaatttccatgtgattgagaagcatgctagtggctaagtgttttttttatatttcttatttctatagtatctgatttatagtggacaatatactgttggagagcagttttagtctttgttatgtatcatttgttttccaagtttcttactgccaccaccttcattcaggtccttgttctactagtaaaactttatgaacta

SEQ ID NO: 11347 - protein, 276 aa, Homo sapiens
MAASAGGPGSWSENILEYFLRNSQITAEDGAEITWYHAANHKAQTNEALKSTAHMIEADVLLPSDGSEHSQPIMAHPPETNSDNTLQEWLTEVMKSNKGIKLDFKSLAVVEPSMMLLENVKRHLKRPVWINADILPGPNGNSKVIDAKPFLDTVISFFPDVTFSLGWTTGWHPEKVNEGYSWTMVKEMEYICNELSQPVTFPVRAALVRQSCSQLLWLLKKSNRYSLTIWTGKNDNYSVEDLLYIRDHFDKKQVFYDILEPQNHEFKQAIGIKVNL

SEQ ID NO: 11348 - DNA, 1019 bp, Homo sapiens
aaatatactggaatattttctgagaaatagccagattacagcagaagacggtgctgagatcacctggtatcatgcagctaaccacaaggcacaaacaaatgaggcactgaaaagtactgctcacatgatagaggctgatgtccttcttccaagtgatggatcagaacacagccagccaattatggcccatccccctgaaacaaacagtgataatactctacaggagtggctgactgaagttatgaaaagcaataaaggcatcaagctggatttcaaaagtctggcagttgtagaaccatccatgatgctcttggaaaatgtgaagaggcatctgaagcgtcctgtatggattaatgccgatattcttcctggtccaaatggaaatagcaaagtaatagatgcaaaaccatttttagacaccgtgatatccttctttccagacgtgacgttttccctgggttggacaacaggatggcatcctgagaaagtcaatgaagggtacagttggacaatggtgaaagagatggaatatatatgtaatgaactaagtcagcctgtaacgttccctgtcagagcagcattagtcaggcagtcttgttctcagttactttggctgttaaagaaatcaaacaggtatgtaatagtttaacaaatgtgtatgtgagtgtgtatgagagacagagatagaaagggcatgaaaattgattatttaaagacagtgtgtgtgagagaaaggtagacagaaaaggaatgaaaactgatgatataagcgcacagactccctcaccggattggagctccttgatgaaccttaacttacttaacatcgtatattttacccctattcctcacaaaagtttttgtacatagtaggtgctcagtaagtgttagctgtctttttcattatatattcacaaaaaattatgagtggataaattagcttctttttaaatttcatcataatttcagaaatcagccaggtgtgatggctcacacccgtaatcccagcactttgggag

SEQ ID NO: 11349 - protein, 174 aa, Homo sapiens [sequence omitted]

SEQ ID NO: 11350 - DNA, 1659 bp, Homo sapiens
atggatgaaggtatggaaatttcaagtgaaggaaattccttgatcaaagcagtccatcagagccggcttcgcctcacaagacttttgctagaaggcggtgcctacattaatgagagcaacgaccgtggggaaacccctttaatgatcgcttgtaagaccaaacatgtcgatcaccagagtgtcagtaaagccaaaatggtgaaatacctgttagagaacaatgccgatcccaacatacaggacaaatctgggaaaacggctctgatgcatgcttgcttagaaaaagctggccctgaagttgtttccttgctcctcaagagtggggctgacctcagcttgcaagaccattctagttactcagctcttgtttatgctataaattcagaagatacagagaccctgaaagttcttcttagtgcttgcaaggcaaaagggaaagaggtcatcatcatcacaacagcaaagttgccctgtgggaagcatactactaaacaatacttaaatatgcctcctgtggatatagatgggtgtcattccccagctacctgcaccactccttcagaaatagacatcaaaactgcctcatcgccactttcacattcttctgaaacggaactgacgctttttggctttaaagatcttgagcttgctggaagcaatgatgatacctgggacccaggttcccctgtgaggaaacctgcattggcccctaaggggcccaagctcccccacgctccaccctgggtcaagagtcccccattattaatgcaccagaacagagtggcttcattgcaagaggagctccaggatattacaccagaggaagaactatcctataaaaccaatgggctggcactttccaagcggttcatcactaggcaccaaagcattgatgtaaaagacactgcacatttgctaagagcctttgatcaggccagctcaaggaagatgtcatatgatgaaataaattgtcaatcttatctttcagaaggaaatcagcaatgcattgaagtccctgttgaccaggacccagattctaaccagacaatatttgcttccaccttaagaagtatagttcaaaaaagaaacttgggggcaaatcactacagctctgattcccagctctcagctggccttacccctccaacttcagaagacggcaaagcacttataggaaagaaaaagatcctctcaccatctccttcccaattgtcagagtccaaagaattgttggagaatatccccccaggtcccctgagcaggagaaatcatgcagttttagaaaggcgaggttcaggagctttccctttagatcacagtgttacccaaaccagacaagggtttctcccacccttaaatgtaaattctcaccctcccatctcagatatcaatgtcaacaacaagatttgcagccttctttcttgtggtcaaaaagtgcttatgccaacagttccgattttccctaaagaattcaaaagtacgattcttagttacttgggaccaggatttccaatgagtacagagtccttttgtcgaggacaaagggcaactccagttactgagaaaggtgttgacagtgcccatccaagcagtgcccagggaaggggtaaacaactgcctggcatattcttggctggaaacacacctatcaggcatcta

SEQ ID NO: 11351 - protein, 552 aa, Homo sapiens
MDEGMEISSEGNSLIKAVHQSRLRLTRLLLEGGAYINESNDRGETPLMIACKTKHVDHQSVSKAKMVKYLLENNADPNIQDKSGKTALMHACLEKAGPEVVSLLLKSGADLSLQDHSSYSALVYAINSEDTETLKVLLSACKAKGKEVIIITTAKLPCGKHTTKQYLNMPPVDIDGCHSPATCTTPSEIDIKTASSPLSHSSETELTLFGFKDLELAGSNDDTWDPGSPVRKPALAPKGPKLPHAPPWVKSPPLLMHQNRVASLQEELQDITPEEELSYKTNGLALSKRFITRHQSIDVKDTAHLLRAFDQASSRKMSYDEINCQSYLSEGNQQCIEVPVDQDPDSNQTIFASTLRSIVQKRNLGANHYSSDSQLSAGLTPPTSEDGKALIGKKKILSPSPSQLSESKELLENIPPGPLSRRNHAVLERRGSGAFPLDHSVTQTRQGFLPPLNVNSHPPISDINVNNKICSLLSCGQKVLMPTVPIFPKEFKSTILSYLGPGFPMSTESFCRGQRATPVTEKGVDSAHPSSAQGRGKQLPGIFLAGNTPIRH

SEQ ID NO: 11352 - DNA, 943 bp, Homo sapiens
atgcggaggggtggaaggaccggtggggacagatggacccatgaaccagcgggtggattcgccgtggccgaagcgcggtggccgaagcgggggacgggggtgggacttacggggacagaaggcggagcttccagcagctgctggcccccctgggtccagaggagccttgccgccctcacctgcgcagagcctggagccgacgcgtcacccccagcggaagcgcctcgctgcccgggcgtctggcgaggtgtgcgctccgggtcccagctccagcgcttcgcggcagtcgcccgcctctttccgcaagcagggcggggactgggcggcatctaccgagatctgcgattcgaggcgccgaggagccgaagaccacagctcagctcagacggcgccctagggccgcacagagggtcgggcagtgccggagagaggtttgaaagcgccgccgccaactcgacagcgcgtcccagcgccttgagctcgcttcctcctgctctcaggaaaaactgaggaaacgcgcctggttccaggggtcggcggggaccgtggagacgctgccagcatcctcaacagcttggaaatcccatcaccttggttccctgagacttggaggactagtaggaactgacagctggctgacagaaaacttatccagggagagaagagacaaaagtgaagtgtgaaattttgaataatgttttcagatgctttgcattcagaatagacctctgagttgggacccaagctgtcaactgatcccaaattcctaagttcctgacttgcaggtattgagttctaacctccgaagatggatgaaggtatggaaatttcaagtgaaggaaattccttgatcaaagcagtccatcagagccggcttcgcctcacaagacttttgctagaaggcggtgcctacattaatgagagcaacgaccgtggggaaacc

SEQ ID NO: 11353 - protein, 169 aa, Homo sapiens [sequence omitted]

SEQ ID NO: 11354 - DNA, 3930 bp, Homo sapiens
cgatggccctgcccagtcccagacagaacctactatgtgcggcggcagctggggcgggaaggcgggagctgggggcgctgggggcgctgcggccgctgcggccgctgcagccgctgcagcgccagggtccacctggtcggctgcacctgtggaggaggaggtggatttcaggcttcccgtagactggaagaatcggctcaaaaccgcttgcctcgcaggggctgagctggaggcagcgaggccgcccgacgcaggcttccggcgagacatggcagggcaaggatggcagcccggcggcagggcctggcgaggagcgcgagcccgcggccgcagttcccaggcgtctgcgggcgcgagcacgccgcgaccctgcgtgcgccggggcgggggggcggggcctcgcctgcacaaatggggacgaggggggcggggcggccacaatttcgcgccaaacttgaccgcgcgttctgctgtaacgagcgggctcggaggtcctcccgctgctgtcatggttggttcgctaaactgcatcgtcgctgtgtcccagaacatgggcatcggcaagaacggggacctgccctggccaccgctcaggaatgaattcagatatttccagagaatgaccacaacctcttcagtagaaggtaaacagaatctggtgattatgggtaagaagacctggttctccattcctgagaagaatcgacctttaaagggtagaattaatttagttctcagcagagaactcaaggaacctccacaaggagctcattttctttccagaagtctagatgatgccttaaaacttactgaacaaccagaattagcaaataaagtagacatggtctggatagttggtggcagttctgtttataaggaagccatgaatcacccaggccatcttaaactatttgtgacaaggatcatgcaagactttgaaagtgacacgttttttccagaaattgatttggagaaatataaacttctgccagaatacccaggtgttctctctgatgtccaggaggagaaaggcattaagtacaaatttgaagtatatgagaagaatgattaatatgaaggtgttttctagtttaagttgttccccctccctctgaaaaaagtatgtatttttacattagaaaaggttttttgttgactttagatctataattatttctaagcaactagtttttattccccactactcttgtctctatcagataccatttatgagacattcttgctataactaagtgcttctccaagaccccaactgagtccccagcacctgctacagtgagctgccattccacacccatcacatgtggcactcttgccagtccttgacattgtcgggcttttcacatgttggtaatatttattaaagatgaagatccacatacccttcaactgagcagtttcactagtggaaataccaaaagcttcctacgtgtatatccagaggtttgtagataaatgttgccaccttgtttgtaacagtgaaaaattgaaaacaacctggaagtccagtgatgggaaaatgagtatgtttctgtcttagattggggaacccaaagcagattgcaagactgaaatttcagtgaaagcagtgtatttgctaggtcataccagaaatcatcaattgaggtacggagaaactgaactgagaaggtaagaaaagcaatttaaagtcagcgagcaggttctcattgataacaagctccatactgctgagatacagggaaatggaggggggaaagctggagtattgatcccgcccccctccttggttgtcagctccctgtcctgtgtgtgggcggaacatagtccagctgctctatagcaagtctcaggtgtttgcagtaagaagctgctggcatgcacgggaacagtgaatgccaaacacttaaagcaattcgatgtttaagtatgtaagttcttttttttttagacagcgtttcgctcttgttgcccaggctagcatgcaatggtgtgacctcggcttactgcaacctccgccttcccagattcaagcgattctcctgcctcaggctcccaagtagctaggaccaggtgcgcgccaccacgcccggctaatttttgtattttgtatttttagtagagatggggtttcaccatgttggtcaggctagtctcgaactcgtgaccgcaagcgattcacccacctcagcctcccaaagtgctgggattaccggcttgagccaccacacccggcacatcttcattctttttatgtagtaaaaagtataaggccacacatggtttatttgaagtattttataatttaaaaaaatacagaagcaggaaaaccaattataagttcaagtgagggatgatggttgcttgaaccaaagggttgcatgtagtaagaaattgtgatttaagatatattttaaagttataagtagcaggatattctgatggagtttgactttggttttgggcccagggagtttcagatgcctttgagaaatgaatgaagtagagagaaaataaaagaaaaaccagccaggcacagtggctcacacctgtaatcccagcgctttgggaggctaaggcaggcagatcacttgagaccagcttgggcaacatggcaaagccccatctctacaaaaaacacaaaaattagctgggcattgtggcgcacacctgtattcccatctagtcaggaagctgagatggaagaattaattgagcccacgagttcaaggctgcagtgagtcgtgattgtgccactgcactccagccggggtgacagaagagaccttgtctcgaaaaggaatctgaaaacaatggaaccatgccttcataattctagaaagttattttcaactgataaatctatattcacccaaataatcaagggtgaaggtaaaataatacatttttagacaagcaaagactcaggggttacctccatgtgccctttttagggaagctgttggagaaaatactccagcaaaatgaaggagtacacaaaccagagaatgacatgaatccagcaaataggatccaacacaggcaatattccagctatggagctagctttaaaaaggaacagtaaaaatattaatcggttagctgggtggaatggcccatgcctgtagtcccagctactcaggaggctcagcagcaggacgacttgagcccaagagttccagaccagcctggccaccttagtgagatcccttctcttaaaaataataacttattgccagatttggggcatttggaaagaagttcattgaagataaagcaaaagtaaaaaaaaaaaaaaaaaaaacaaggggaaagggttggttaggcaatcattctagggcagaaagaagtacaggataggaagagcataatacactgtttttctcaacaaggagcagtatgtacacagtcataatgatgtgactgcttagcccctaaatatggtaactactctgggacaatatgggaggaaaagtgaagattgtgatggtgtaagagctaaatcctcatctgtcatatccagaaatcactatataatatataataatgaaatgactaagttatgtgaggaaaaaaacagaagacattgctaaaagagttaaaagtcattgctctggagaattaggagggatggggcaggggactgttaggatgcattataaactgaaaagcctttttaaaattttatgtattaatatatgcattcacttgaaaaactaaaaaaaaacaataatttggaaaaacccatgaaggtaactaacggaaggaaaaactaagagaatgaaaagtatttgcctctggaaagaacaactggcaggactgttgttttcattgtaagacttttggagccatttaattgtacttaaccattttcatctatttctttaataagaacaattccatcttaataaagagttacacttgttaata

SEQ ID NO: 11355 - protein, 345 aa, Homo sapiens
MCGGSWGGKAGAGGAGGAAAAAAAAAAAAPGSTWSAAPVEEEVDFRLPVDWKNRLKTACLAGAELEAARPPDAGFRRDMAGQGWQPGGRAWRGARARGRSSQASAGASTPRPCVRRGGGAGPRLHKWGRGGRGGHNFAPNLTARSAVTSGLGGPPAAVMVGSLNCIVAVSQNMGIGKNGDLPWPPLRNEFRYFQRMTTTSSVEGKQNLVIMGKKTWFSIPEKNRPLKGRINLVLSRELKEPPQGAHFLSRSLDDALKLTEQPELANKVDMVWIVGGSSVYKEAMNHPGHLKLFVTRIMQDFESDTFFPEIDLEKYKLLPEYPGVLSDVQEEKGIKYKFEVYEKND

SEQ ID NO: 11356 - DNA, 2156 bp, Homo sapiens
ctgagcagtttcactagtggaaataccaaaagcttcctacgtgtatatccagaggtttgtagataaatgttgccaccttgtttgtaacagtgaaaaattgaaaacaacctggaagtccagtgatgggaaaatgagtatgtttctgtcttagattggggaacccaaagcagattgcaagactgaaatttcagtgaaagcagtgtatttgctaggtcataccagaaatcatcaattgaggtacggagaaactgaactgagaaggtaagaaaagcaatttaaagtcagcgagcaggttctcattgataacaagctccatactgctgagatacagggaaatggaggggggaaagctggagtattgatcccgcccccctccttggttgtcagctccctgtcctgtgtgtgggcggaacatagtccagctgctctatagcaagtctcaggtgtttgcagtaagaagctgctggcatgcacgggaacagtgaatgccaaacacttaaagcaattcgatgtttaagtatgtaagttcttttttttttagacagcgtttcgctcttgttgcccaggctagcatgcaatggtgtgacctcggcttactgcaacctccgccttcccagattcaagcgattctcctgcctcaggctcccaagtagctaggaccaggtgcgcgccaccacgcccggctaatttttgtattttgtatttttagtagagatggggtttcaccatgttggtcaggctagtctcgaactcgtgaccgcaagcgattcacccacctgtaatcccagcgctttgggaggctaaggcaggcagatcacttgagaccagcttgggcaacatggcaaagccccatctctacaaaaaacacaaaaattagctgggcattgtggcgcacacctgtattcccatctagtcaggaagctgagatggaagaattaattgagcccacgagttcaaggctgcagtgagtcgtgattgtgccactgcactccagccggggtgacagaagagaccttgtctcgaaaaggaatctgaaaacaatggaaccatgccttcataattctagaaagttattttcaactgataaatctatattcacccaaataatcaagggtgaaggtaaaataatacatttttagacaagcaaagactcaggggttacctccatgtgccctttttagggaagctgttggagaaaatactccagcaaaatgaaggagtacacaaaccagagaatgacatgaatccagcaaataggatccaacacaggcaatattccagctatggagctagctttaaaaaggaacagtaaaaatattaatcggttagctgggtggaatggcccatgcctgtagtcccagctactcaggaggctcagcagcaggacgacttgagcccaagagttccagaccagcctggccaccttagtgagatcccttctcttaaaaataataacttattgccagatttggggcatttggaaagaagttcattgaagataaagcaaaagtaaaaaaaaaaaaaaaaaaaacaaggggaaagggttggttaggcaatcattctagggcagaaagaagtacaggataggaagagcataatacactgtttttctcaacaaggagcagtatgtacacagtcataatgatgtgactgcttagcccctaaatatggtaactactctgggacaatatgggaggaaaagtgaagattgtgatggtgtaagagctaaatcctcatctgtcatatccagaaatcactatataatatataataatgaaatgactaagttatgtgaggaaaaaaacagaagacattgctaaaagagttaaaagtcattgctctggagaattaggagggatggggcaggggactgttaggatgcattataaactgaaaagcctttttaaaattttatgtattaatatatgcattcacttgaaaaactaaaaaaaaacaataatttggaaaaacccatgaaggtaactaacggaaggaaaaactaagagaatgaaaagtatttgcctctggaaagaacaactggcaggactgttgttttcattgtaagacttttggagccatttaattgtacttaaccattttcatctatttctttaataagaacaattccatcttaataaagagttacacttgttaat

SEQ ID NO: 11357 - protein, 55 aa, Homo sapiens [sequence omitted]

SEQ ID NO: 11358 - DNA, 2762 bp, Homo sapiens
attaatatgaaggtgttttctagtttaagttgttccccctccctctgaaaaaaataccatttatgagacattcttgctataactaagtgcttctccaagaccccaactgagtccccagcacctgctacagtgagctgccattccacacccatcacatgtggcactcttgccagtccttgacattgtcgggcttttcacatgttggtaatatttattaaagatgaagatccacatacccttcaactgagcagtttcactagtggaaataccaaaagcttcctacgtgtatatccagaggtttgtagataaatgttgccaccttgtttgtaacagtgaaaaattgaaaacaacctggaagtccagtgatgggaaaatgagtatgtttctgtcttagattggggaacccaaagcagattgcaagactgaaatttcagtgaaagcagtgtatttgctaggtcataccagaaatcatcaattgaggtacggagaaactgaactgagaaggtaagaaaagcaatttaaagtcagcgagcaggttctcattgataacaagctccatactgctgagatacagggaaatggaggggggaaagctggagtattgatcccgcccccctccttggttgtcagctccctgtcctgtgtgtgggcggaacatagtccagctgctctatagcaagtctcaggtgtttgcagtaagaagctgctggcatgcacgggaacagtgaatgccaaacacttaaagcaattcgatgtttaagtatgtaagttcttttttttttagacagcgtttcgctcttgttgcccaggctagcatgcaatggtgtgacctcggcttactgcaacctccgccttcccagattcaagcgattctcctgcctcaggctcccaagtagctaggaccaggtgcgcgccaccacgcccggctaatttttgtattttgtatttttagtagagatggggtttcaccatgttggtcaggctagtctcgaactcgtgaccgcaagcgattcacccacctcagcctcccaaagtgctgggattaccggcttgagccaccacacccggcacatcttcattctttttatgtagtaaaaagtataaggccacacatggtttatttgaagtattttataatttaaaaaaatacagaagcaggaaaaccaattataagttcaagtgagggatgatggttgcttgaaccaaagggttgcatgtagtaagaaattgtgatttaagatatattttaaagttataagtagcaggatattctgatggagtttgactttggttttgggcccagggagtttcagatgcctttgagaaatgaatgaagtagagagaaaataaaagaaaaaccagccaggcacagtggctcacacctgtaatcccagcgctttgggaggctaaggcaggcagatcacttgagaccagcttgggcaacatggcaaagccccatctctacaaaaaacacaaaaattagctgggcattgtggcgcacacctgtattcccatctagtcaggaagctgagatggaagaattaattgagcccacgagttcaaggctgcagtgagtcgtgattgtgccactgcactccagccggggtgacagaagagaccttgtctcgaaaaggaatctgaaaacaatggaaccatgccttcataattctagaaagttattttcaactgataaatctatattcacccaaataatcaagggtgaaggtaaaataatacatttttagacaagcaaagactcaggggttacctccatgtgccctttttagggaagctgttggagaaaatactccagcaaaatgaaggagtacacaaaccagagaatgacatgaatccagcaaataggatccaacacaggcaatattccagctatggagctagctttaaaaaggaacagtaaaaatattaatcggttagctgggtggaatggcccatgcctgtagtcccagctactcaggaggctcagcagcaggacgacttgagcccaagagttccagaccagcctggccaccttagtgagatcccttctcttaaaaataataacttattgccagatttggggcatttggaaagaagttcattgaagataaagcaaaagtaaaaaaaaaaaaaaaaaaaacaaggggaaagggttggttaggcaatcattctagggcagaaagaagtacaggataggaagagcataatacactgtttttctcaacaaggagcagtatgtacacagtcataatgatgtgactgcttagcccctaaatatggtaactactctgggacaatatgggaggaaaagtgaagattgtgatggtgtaagagctaaatcctcatctgtcatatccagaaatcactatataatatataataatgaaatgactaagttatgtgaggaaaaaaacagaagacattgctaaaagagttaaaagtcattgctctggagaattaggagggatggggcaggggactgttaggatgcattataaactgaaaagcctttttaaaattttatgtattaatatatgcattcacttgaaaaactaaaaaaaaacaataatttggaaaaacccatgaaggtaactaacggaaggaaaaactaagagaatgaaaagtatttgcctctggaaagaacaactggcaggactgttgttttcattgtaagacttttggagccatttaattgtacttaaccattttcatctatttctttaataagaacaattccatcttaataaagagttacacttgttaat

SEQ ID NO: 11359 - protein, 55 aa, Homo sapiens [sequence omitted]

SEQ ID NO: 11360 - DNA, 904 bp, Homo sapiens
ggttttttgttgactttagatctataattatttctaagcaactagtttttattccccactactcttgtctctatcagataccatttatgagacattcttgctataactaagtgcttctccaagaccccaactgagtccccagcacctgctacagtgagctgccattccacacccatcacatgtggcactcttgccagtccttgacattgtcgggcttttcacatgttggtaatatttattaaagatgaagatccacatacccttcaactgagcagtttcactagtggaaataccaaaagcttcctacgtgtatatccagaggtttgtagataaatgttgccaccttgtttgtaacagtgaaaaattgaaaacaacctggaagtccagtgatgggaaaatgagtatgtttctgtcttagattggggaacccaaagcagattgcaagactgaaatttcagtgaaagcagtgtatttgctaggtcataccagaaatcatcaattgaggtacggagaaactgaactgagaaggtaagaaaagcaatttaaagtcagcgagcaggttctcattgataacaagctccatactgctgagatacagggaaatggaggggggaaagctggagtattgatcccgcccccctccttggttgtcagctccctgtcctgtgtgtgggcggaacatagtccagctgctctatagcaagtctcaggtgtttgcagtaagaagctgctggcatgcacgggaacagtgaatgccaaacacttaaagcaattcgatgtttaagtatgtaagttcttttttttccagaccagcctggccaccttagtgagatcccttctcttaaaaataataacttattgccagatttggggcatttggaaagaagttcattgaagataaagc

SEQ ID NO: 11361 - protein, 36 aa, Homo sapiens
MLVIFIKDEDPHTLQLSSFTSGNTKSFLRVYPEVCR

SEQ ID NO: 11362 - DNA, 1394 bp, Homo sapiens
agtcccagacagaacctactatgtgcggcggcagctggggcgggaaggcgggagctgggggcgctgggggcgctgcggccgctgcggccgctgcagccgctgcagcgccagggtccacctggtcggctgcacctgtggaggaggaggtggatttcaggcttcccgtagactggaagaatcggctcaaaaccgcttgcctcgcaggggctgagctggaggcagcgaggccgcccgacgcaggcttccggcgagacatggcagggcaaggatggcagcccggcggcagggcctggcgaggagcgcgagcccgcggccgcagttcccaggcgtctgcgggcgcgagcacgccgcgaccctgcgtgcgccggggcgggggggcggggcctcgcctgcacaaatggggacgaggggggcggggcggccacaatttcgcgccaaacttgaccgcgcgttctgctgtaacgagcgggctcggaggtcctcccgctgctgtcatggttggttcgctaaactgcatcgtcgctgtgtcccagaacatgggcatcggcaagaacggggacctgccctggccaccgctcaggaatgaattcagatatttccagagaatgaccacaacctcttcagtagaaggtaaacagaatctggtgattatgggtaagaagacctggttctccattcctgagaagaatcgacctttaaagggtagaattaatttagttctcagcagagaactcaaggaacctccacaaggagctcattttctttccagaagtctagatgatgccttaaaacttactgaacaaccagaattagcaaataaagtagacatggtctggatagttggtggcagttctgtttataaggaagccatgaatcacccaggccatcttaaactatttgtgacaaggatcatgcaagactttgaaagtgacacgttttttccagaaattgatttggagaaatataaacttctgccagaatacccaggtgttctctctgatgtccaggaggagaaaggcattaagtacaaatttgaagtatatgagaagaatgattaatatgaaggtgttttctagtttaagttgttccccctccctctgaaaaaagtatgtatttttacattagaaaaggttttttgttgactttagatctataattatttctaagcaactagtttttattccccactactcttgtctctatcagataccatttatgagacattcttgctataactaagtgcttctccaagaccccaactgagtccccagcacctgctacagtgagctgccattccacacccatcacatgtggcactcttgccagtccttgacattgtcgggcttttcacatgttggtaatatttattaaagatgaagatccacatacccttc

SEQ ID NO: 11363 - protein, 345 aa, Homo sapiens; identical to SEQ ID NO: 11355

SEQ ID NO: 11364 - DNA, 8192 bp, Homo sapiens
agtaagaatcagcagcgcgggcaaggagtacggacgggagtcagaggcagagcgagggtgtgtggagggccggcggggaccgccgggagcgcgcggatgtcggtgttcctggggccagggatgccctctgcatctttattagtaaatcttctttcagctttactcatcctatttgtgtttggagaaacagaaataagatttactggacaaactgaatttgttgttaatgaaacaagtacaacagttattcgtcttatcattgaaaggataggagagccagcaaatgttactgcaattgtatcgctgtatggagaggacgctggtgacttttttgacacatatgctgcagcttttatacctgccggagaaacaaacagaacagtgtacatagcagtatgtgatgatgacttaccagagcctgacgaaacttttatttttcacttaacattacagaaaccttcagcaaatgtgaagcttggatggccaaggactgttactgtgacaatattatcaaatgacaatgcatttggaattatttcatttaatatgcttccctcaatcgcagtgagtgagcccaagggcagaaatgagtctatgcctcttactctcatcagggaaaagggaacctatggaatggtcatggtgacttttgaggtagagggtggcccaaatccccctgatgaagatttgagtccagttaaaggaaatatcacctttccccctggcagagcaacagtaatttataacttgacagtactcgatgacgaggtaccagaaaatgatgaaatatttttaattcaactgaaaagtgtagaaggaggagctgagattaacacctctaggaattccattgagatcatcattaagaaaaatgatagtcccgtgagattccttcagagtatttatttggttcctgaggaagaccacatactcataattccagtagttcgtggaaaggacaacaatggaaatctgattggatctgatgaatatgaggtttcaatcagttatgctgtcacaactgggaattccacagcacatgcccagcaaaatctggacttcattgatcttcagccaaacacaactgttgtttttccaccttttattcatgaatctcacttgaaatttcaaatagttgatgacaccataccggagattgctgaatcgtttcacattatgttactaaaagataccttacagggagatgctgtgctaataagcccttctgttgtacaagtcaccattaagccaaatgataaaccttatggagtcctttcattcaacagtgttttgtttgaaaggacagttataattgatgaagatagaatatcaagatatgaagaaatcacagtggttagaaatggaggaacccatgggaatgtctctgcgaattgggtgttgacacggaacagcactgatccctcaccagtaacagcagatatcagaccgagctctggagttctccattttgcacaagggcagatgttggcaacaattcctcttactgtggttgatgatgatcttccagaagaggcagaagcttatctacttcaaattctgcctcatacaatacgaggaggtgcagaagtgagcgagccagcggagcttttgttctacattcaggatagtgatgatgtctatggcctaataacattttttcctatggaaaaccagaagattgaaagcagcccaggtgaacgatacttatccttgagttttacaagactaggagggactaaaggagatgtgaggttgctttattctgtactttacattcctgctggagctgtggaccccttgcaagcaaaagaaggcatcttaaatatatcaaggagaaatgacctcatttttccagagcaaaaaactcaagtcactacaaaattaccaataagaaatgatgcattccttcaaaatggagctcactttctagtacagttggaaactgtggagttgttaaacataattcctctaatcccacccataagccctagatttggggaaatctgcaatatttctttactggttactccagccattgcaaatggagaaattggctttctcagcaatcttccaattattttgcatgaaccagaagattttgctgctgaagtggtatacattcccttacatcgggatggaactgatggccaggctactgtctactggagtttgaagccctctggctttaattcaaaagcagtgaccccggatgatataggcccctttaatggctctgttttgtttttatctgggcaaagtgacacaacaatcaacattactatcaaaggtgatgacataccggaaatgaatgaaactgtaacactttctctagacagggttaacgtggaaaaccaagtgctgaaatctggatatactagccgtgacctaattattttggaaaatgatgaccctgggggagtttttgaattttctcctgcttccagaggaccctatgttataaaagaaggagaatctgtagagctccacatcatccgatcaagggggtcccttgttaagcagtttctacactaccgagtagagccaagagatagcaatgaattctatggaaacacgggagtactagaatttaaacctggagaaagggagatagtgatcaccttgctagcaagattggatgggataccagagttggatgaacactactgggtggtcctcagcagccacggagaacgggaaagcaagttgggaagtgccaccattgtcaatataacgattctgaaaaatgatgatcctcatggcattatagaatttgtttctgatggtctaattgtgatgataaatgaaagcaaaggagatgctatctatagtgctgtttatgatgtagtaagaaatcgaggcaactttggtgatgttagtgtatcatgggtggttagtccagactttacacaagatgtatttcctgtacaagggactgttgtctttggagatcaggaattttcaaaaaatatcaccatttactcccttccagatgagattccagaagaaatggaagaatttaccgttatcctactgaatggcactggaggagctaaagtgggaaatagaacaactgcaactctgaggattagaagaaatgatgaccccatttattttgcagaacctcgtgtagtgagggttcaggaaggtgagactgccaactttacagttctcagaaatggatctgttgatgtgacttgcatggtccagtatgctaccaaggatgggaaggctactgcaagagagagagatttcattcctgttgaaaaaggagaaacgctcatttttgaggttggaagtagacagcagagcatatccatatttgttaatgaagatggtatcccggaaacagatgagcccttttatataatcctcttgaattcaacaggtgatacagtagtatatcaatatggagtagctacagtaataattgaagctaatgatgacccaaatggcattttttctctggagcccatagacaaagcagtggaagaaggaaagactaatgcattttggattttgaggcaccgaggatactttggtagtgtttctgtatcttggcagctctttcagaatgattctgctttgcagcctgggcaggagttctatgaaacttcaggaactgttaacttcatggatggagaagaagcaaaaccaatcattctccatgcttttccagataaaattcctgaattcaatgaattttatttcctaaaacttgtaaacatttcaggtggatccccaggtcctgggggccagctagcagaaaccaacctccaggtgacagtaatggttccattcaatgatgatccctttggagtttttatcttggatccagagtgtttagagagagaagtggcagaagatgtcctgtctgaagatgatatgtcttatattaccaacttcaccattttgaggcagcagggtgtgtttggtgatgtacaactgggctgggaaatactgtccagtgagttccctgctggtttgccaccaatgatagattttttactggttggaattttccccaccaccgtgcatttacaacagcacatgcggcgtcaccacagtggaacggatgctttgtactttaccggactagagggtgcatttgggactgttaatccaaaataccatccctccaggaataatacaattgccaactttacattctcagcttgggtaatgcccaatgccaatacgaatggattcattatagcgaaggatgacggtaatggaagcatctactacggggtaaaaatacaaacaaacgaatcccatgtgacactttcccttcattataaaaccttgggttccaatgctacatacattgccaagacaacagtcatgaaatatttagaagaaagtgtttggcttcatctactaattatcctggaggatggtataatcgaattctacctggatggaaatgcaatgcccaggggaatcaagagtctgaaaggagaagccattactgacggtcctgggatactgagaattggagcagggataaatggcaatgacagatttacaggtctgatgcaggatgtgaggtcctatgagcggaaactgacgcttgaagaaatttatgaacttcatgccatgcccgcaaaaagtgatttacacccaatttctggatatctggagttcagacagggagaaactaacaaatcattcattatttctgcaagagatgacaatgacgaggaaggagaagaattattcattcttaaactagtttctgtatatggaggagctcgtatttcggaagaaaatactactgcaagattaacaatacaaaaaagtgacaatgcaaatggcttgtttggtttcacaggagcttgtataccagagattgcagaggagggatcaaccatttcttgtgtggttgagagaaccagaggagctctggattatgtgcatgttttttacaccatttcacagattgaaactgatggcattaattaccttgttgatgactttgctaatgccagtggaactattacattccttccttggcagagatcagaggttctgaatatatatgttcttgatgatgatattcctgaacttaatgagtatttccgtgtgacattggtttctgcaattcctggagatgggaagctaggctcaactcctaccagtggtgcaagcatagatcctgaaaaggaaacgactgatatcaccatcaaagctagtgatcatccatatggcttgctgcagttctccacagggctgcctcctcagcctaaggacgcaatgaccctgcctgcaagcagcgttccacatatcactgtggaggaggaagatggagaaatcaggttattggtcatccgtgcacagggacttctgggaagggtgactgcggaatttagaacagtgtccttgacagcattcagtcctgaggattaccagaatgttgctggcacattagaatttcaaccaggagaaagatataaatacattttcataaacatcactgataattctattcctgaactggaaaaatcttttaaagttgagttgttaaacttggaaggaggagtagctgaactctttagggttgatggaagtggtagtggtgatggggacatggaattcttccttccaactattcacaaacgtgccagtctaggagtggcttcccaaattctagtgacaattgcagcctctgaccacgctcatggcgtatttgaatttagccctgagtcactctttgtcagtggaactgaaccagaagatgggtatagcactgttacattaaatgttataagacatcatggaactctgtctccagtgactttgcattggaacatagactctgatcctgatggtgatctcgccttcacctctggcaacatcacatttgagattgggcagacgagcgccaatatcactgtggagatattgcctgacgaagacccagaactggataaggcattctctgtgtcagtcctcagtgtttccagtggttctttgggagctcatattaatgccacgttaacagttttggctagtgatgatccatatgggatattcattttttctgagaaaaacagacctgttaaagttgaggaagcaacccagaacatcacactatcaataataaggttgaaaggcctcatgggaaaagtccttgtctcatatgcaacactagatgatatggaaaaaccaccttattttccacctaatttagcgagagcaactcaaggaagagactatataccagcttctggatttgctctttttggagctaatcagagtgaggcaacaatagctatttcaattttggatgatgatgagccagaaaggtccgaatctgtctttatcgaactactcaactctactttagtagcgaaagtacagagtcgttcaattccaaattctccacgtcttgggcctaaggtagaaactattgcgcaactaattatcattgccaatgatgatgcatttggaactcttcagctctcagcaccaattgtccgagtggcagaaaatcatgttggacccattatcaatgtgactagaacaggaggagcatttgcagatgtctctgtgaagtttaaagctgtgccaataactgcaatagctggtgaagattatagtatagcttcatcagatgtggtcttgctagaaggggaaaccagtaaagccgtgccaatatatgtcattaatgatatctatcctgaactggaagaatcttttcttgtgcaactgatgaatgaaacaacaggaggagccagactaggggctttaacagaggcagtcattattattgaggcctctgatgacccctatggattatttggttttcagattactaaacttattgtagaggaacctgagtttaactcagtgaaggtaaacctgccaataattcgaaattctgggacactcggcaatgttactgttcagtgggttgccaccattaatggacagcttgctactggcgacctgcgagttgtctcaggtaatgtgacctttgcccctggggaaaccattcaaaccttgttgttagaggtcctggctgacgacgttccggagattgaagaggttatccaagtgcaactaactgatgcctctggtggaggtactattgggttagatcgaattgcaaatattattattcctgccaatgatgatccttatggtacagtagcctttgctcagatggtttatcgtgttcaagagcctctggaaagaagttcctgtgctaatataactgtcaggcgaagcggagggcactttggtcggctgttgttgttctacagtacttccgacattgatgtagtggctctggcaatggaggaaggtcaagatttactgtcctactatgaatctccaattcaaggggtgcctgacccactttggagaacttggatgaatgtctctgccgtgggggagcccctgtatacctgtgccactttgtgccttaaggaacaagcttgctcagcgttttcatttttcagtgcttctgagggtccccagtgtttctggatgacatcatggatcagcccagctgtcaacaattcagacttctggacctacaggaaaaacatgaccagggtagcatctctttttagtggtcaggctgtggctgggagtgactatgagcctgtgacaaggcaatgggccataatgcaggaaggtgatgaattcgcaaatctcacagtgtctattcttcctgatgatttcccagagatggatgagagttttctaatttctctccttgaagttcacctcatgaacatttcagccagtttgaaaaatcagccaaccataggacagccaaatatttctacagttgtcatagcactaaatggtgatgcctttggagtgtttgtgatctacaatattagtcccaatacttccgaagatggcttatttgttgaagttcaggagcagccccaaaccttggtggagctgatgatacacaggacagggggcagcttaggtcaagtggcagtcgaatggcgtgttgttggtggaacagctactgaaggtttagattttataggtgctggagagattctgacctttgctgaaggtgaaaccaaaaagacagtcattttaaccatcttggatgactctgaaccagaggatgacgaaagtatcatagttagtttggtgtacactgaaggtggaagtagaattttgccaagctccgacactgttagagtgaacattttggccaatga

SEQ ID NO: 11365 - protein, 4000 aa, Homo sapiens
MSVFLGPGMPSASLLVNLLSALLILFVFGETEIRFTGQTEFVVNETSTTVIRLIIERIGEPANVTAIVSLYGEDAGDFFDTYAAAFIPAGETNRTVYIAVCDDDLPEPDETFIFHLTLQKPSANVKLGWPRTVTVTILSNDNAFGIISFNMLPSIAVSEPKGRNESMPLTLIREKGTYGMVMVTFEVEGGPNPPDEDLSPVKGNITFPPGRATVIYNLTVLDDEVPENDEIFLIQLKSVEGGAEINTSRNSIEIIIKKNDSPVRFLQSIYLVPEEDHILIIPVVRGKDNNGNLIGSDEYEVSISYAVTTGNSTAHAQQNLDFIDLQPNTTVVFPPFIHESHLKFQIVDDTIPEIAESFHIMLLKDTLQGDAVLISPSVVQVTIKPNDKPYGVLSFNSVLFERTVIIDEDRISRYEEITVVRNGGTHGNVSANWVLTRNSTDPSPVTADIRPSSGVLHFAQGQMLATIPLTVVDDDLPEEAEAYLLQILPHTIRGGAEVSEPAELLFYIQDSDDVYGLITFFPMENQKIESSPGERYLSLSFTRLGGTKGDVRLLYSVLYIPAGAVDPLQAKEGILNISRRNDLIFPEQKTQVTTKLPIRNDAFLQNGAHFLVQLETVELLNIIPLIPPISPRFGEICNISLLVTPAIANGEIGFLSNLPIILHEPEDFAAEVVYIPLHRDGTDGQATVYWSLKPSGFNSKAVTPDDIGPFNGSVLFLSGQSDTTINITIKGDDIPEMNETVTLSLDRVNVENQVLKSGYTSRDLIILENDDPGGVFEFSPASRGPYVIKEGESVELHIIRSRGSLVKQFLHYRVEPRDSNEFYGNTGVLEFKPGEREIVITLLARLDGIPELDEHYWVVLSSHGERESKLGSATIVNITILKNDDPHGIIEFVSDGLIVMINESKGDAIYSAVYDVVRNRGNFGDVSVSWVVSPDFTQDVFPVQGTVVFGDQEFSKNITIYSLPDEIPEEMEEFTVILLNGTGGAKVGNRTTATLRIRRNDDPIYFAEPRVVRVQEGETANFTVLRNGSVDVTCMVQYATKDGKATARERDFIPVEKGETLIFEVGSRQQSISIFVNEDGIPETDEPFYIILLNSTGDTVVYQYGVATVIIEANDDPNGIFSLEPIDKAVEEGKTNAFWILRHRGYFGSVSVSWQLFQNDSALQPGQEFYETSGTVNFMDGEEAKPIILHAFPDKIPEFNEFYFLKLVNISGGSPGPGGQLAETNLQVTVMVPFNDDPFGVFILDPECLEREVAEDVLSEDDMSYITNFTILRQQGVFGDVQLGWEILSSEFPAGLPPMIDFLLVGIFPTTVHLQQHMRRHHSGTDALYFTGLEGAFGTVNPKYHPSRNNTIANFTFSAWVMPNANTNGFIIAKDDGNGSIYYGVKIQTNESHVTLSLHYKTLGSNATYIAKTTVMKYLEESVWLHLLIILEDGIIEFYLDGNAMPRGIKSLKGEAITDGPGILRIGAGINGNDRFTGLMQDVRSYERKLTLEEIYELHAMPAKSDLHPISGYLEFRQGETNKSFIISARDDNDEEGEELFILKLVSVYGGARISEENTTARLTIQKSDNANGLFGFTGACIPEIAEEGSTISCVVERTRGALDYVHVFYTISQIETDGINYLVDDFANASGTITFLPWQRSEVLNIYVLDDDIPELNEYFRVTLVSAIPGDGKLGSTPTSGASIDPEKETTDITIKASDHPYGLLQFSTGLPPQPKDAMTLPASSVPHITVEEEDGEIRLLVIRAQGLLGRVTAEFRTVSLTAFSPEDYQNVAGTLEFQPGERYKYIFINITDNSIPELEKSFKVELLNLEGGVAELFRVDGSGSGDGDMEFFLPTIHKRASLGVASQILVTIAASDHAHGVFEFSPESLFVSGTEPEDGYSTVTLNVIRHHGTLSPVTLHWNIDSDPDGDLAFTSGNITFEIGQTSANITVEILPDEDPELDKAFSVSVLSVSSGSLGAHINATLTVLASDDPYGIFIFSEKNRPVKVEEATQNITLSIIRLKGLMGKVLVSYATLDDMEKPPYFPPNLARATQGRDYIPASGFALFGANQSEATIAISILDDDEPERSESVFIELLNSTLVAKVQSRSIPNSPRLGPKVETIAQLIIIANDDAFGTLQLSAPIVRVAENHVGPIINVTRTGGAFADVSVKFKAVPITAIAGEDYSIASSDVVLLEGETSKAVPIYVINDIYPELEESFLVQLMNETTGGARLGALTEAVIIIEASDDPYGLFGFQITKLIVEEPEFNSVKVNLPIIRNSGTLGNVTVQWVATINGQLATGDLRVVSGNVTFAPGETIQTLLLEVLADDVPEIEEVIQVQLTDASGGGTIGLDRIANIIIPANDDPYGTVAFAQMVYRVQEPLERSSCANITVRRSGGHFGRLLLFYSTSDIDVVALAMEEGQDLLSYYESPIQGVPDPLWRTWMNVSAVGEPLYTCATLCLKEQACSAFSFFSASEGPQCFWMTSWISPAVNNSDFWTYRKNMTRVASLFSGQAVAGSDYEPVTRQWAIMQEGDEFANLTVSILPDDFPEMDESFLISLLEVHLMNISASLKNQPTIGQPNISTVVIALNGDAFGVFVIYNISPNTSEDGLFVEVQEQPQTLVELMIHRTGGSLGQVAVEWRVVGGTATEGLDFIGAGEILTFAEGETKKTVILTILDDSEPEDDESIIVSLVYTEGGSRILPSSDTVRVNILANDNVAGIVSFQTASRSVIGHEGEILQFHVIRTFPGRGNVTVNWKIIGQNLELNFANFSGQLFFPEGSLNTTLFVHLLDDNIPEEKEVYQVILYDVRTQGVPPAGIALLDAQGYAAVLTVEASDEPHGVLNFALSSRFVLLQEANITIQLFINREFGSLGAINVTYTTVPGMLSLKNQTVGNLAEPEVDFVPIIGFLILEEGETAAAINITILEDDVPELEEYFLVNLTYVGLTMAASTSFPPRLDSEGLTAQVIIDANDGARGVIEWQQSRFEVNETHGSLTLVAQRSREPLGHVSLFVYAQNLEAQVGLDYIFTPMILHFADGERYKNVNIMILDDDIPEGDEKFQLILTNPSPGLELGKNTIALIIVLANDDGPGVLSFNNSEHFFLREPTALYVQESVAVLYIVREPAQGLFGTVTVQFIVTEVNSSNESKDLTPSKGYIVLEEGVRFKALQISAILDTEPEMDEYFVCTLFNPTGGARLGVHVQTLITVLQNQAPLGLFSISAVENRATSIDIEEANRTVYLNVSRTNGIDLAVSVQWETVSETAFGMRGMDVVFSVFQSFLDESASGWCFFTLENLIYGIMLRKSSVTVYRWQGIFIPVEDLNIENPKTCEAFNIGFSPYFVITHEERNEEKPSLNSVFTFTSGFKLFLVQTIIILESSQVRYFTSDSQDYLIIASQRDDSELTQVFRWNGGSFVLHQKLPVRGVLTVALFNKGGSVFLAISQANARLNSLLFRWSGSGFINFQEVPVSGTTEVEALSSANDIYLIFAENVFLGDQNSIDIFIWEMGQSSFRYFQSVDFAAVNRIHSFTPASGIAHILLIGQDMSALYCWNSERNQFSFVLEVPSAYDVASVTVKSLNSSKNLIALVGAHSHIYELAYISSHSDFIPSSGELIFEPGEREATIAVNILDDTVPEKEESFKVQLKNPKGGAEIGINDSVTITILSNDDAYGIVAFAQNSLYKQVEEMEQDSLVTLNVERLKGTYGRITIAWEADGSISDIFPTSGVILFTEGQVLSTITLTILADNIPELSEVVIVTLTRITTEGVEDSYKGATIDQDRSKSVITTLPNDSPFGLVGWRAASVFIRVAEPKENTTTLQLQIARDKGLLGDIAIHLRAQPNFLLHVDNQATENEDYVLQETIIIMKENIKEAHAEVSILPDDLPELEEGFIVTITEVNLVNSDFSTGQPSVRRPGMEIAEIMIEENDDPRGIFMFHVTRGAGEVITAYEVPPPLNVLQVPVVRLAGSFGAVNVYWKASPDSAGLEDFKPSHGILEFADKQVTAMIEITIIDDAEFELTET

SEQ ID NO: 11366 - DNA, 6510 bp, Homo sapiens
attactgtatatgtatgtattcagccgtgattcccaaaggttcattttatgacagcatctttctgatttcctcacagtttattatcttcccattgcccaagtttagtaactttatattagttttggcttcgtacaggcaccactcattgggagcaacacagaaatctgtttcaaaacatcatttcaggaaaaagagaatattttagcgttgaggatctttaaaagtattgcagtactttatagaactaagttgtaggagctaagaggatcttttaattcatgctatgcaattatgtattttttgttgttgttgtattttattttattttgatttgtatgactttggaagagggtatgattttaccattcaagaaaatggacttcagatagatcaacctcctgaaataggaaacatctccattgttcgcatcataataatgaaaaatgataacgcagaaggcatcattgaatttgacccaaagtatactgccttcgaagtggaggaagatgttgggctgatcatgatcccagtggtgaggctacatggaacttatggctatgtgacagctgatttcatctctcagagctcctctgccagtcccggaggtgttgattacattttgcatggcagtacagtcacctttcagcatgggcaaaacttaagttttataaatatctccatcattgatgacaatgaaagtgaatttgaggagcccattgaaattctactcactggagctactggaggagcggtccttgggcgccacctagtgagcagaatcataatagctaagagtgactctccctttggagttataaggtttctcaatcaaagcaaaatttctattgctaatcccaattccacaatgattttatcactggtgctggagcggactggaggactcttgggagagattcaggtgaactgggagacagtaggacccaactctcaagaagccttactgccacagaatagagacattgcagacccagtgagcgggttgttctattttggagaaggagaaggaggagtgagaaccataattctgacaatctatcctcatgaagaaattgaagttgaagagacattcattattaaacttcatcttgtgaaaggagaagctaaattagactccagagctaaagatgttacattaaccatacaagagtttggtgacccaaatggagttgttcagtttgctcctgaaactttgtctaagaagacttattcagagcctctggctctggaagggcccctgctcattaccttctttgtcagaagagtcaagggcacctttggagagattatggtttactgggaattaagtagtgagtttgacattactgaagactttctttccaccagtggatttttcaccattgctgatggagagagtgaagctagctttgatgttcatttgctaccagatgaggtacctgagatagaggaagattatgtgatccagcttgtttctgtagagggaggagccgaactggatctggagaagagtatcacatggttctctgtttatgcaaatgatgacccacatggagtatttgccctgtattcggatcgccagtcaatacttattgggcagaaccttattagatccatccaaattaacataacccggcttgctggaacatttggagatgtggctgttgggcttcgaatatcatcggatcataaagaacagccgattgttaccgaaaatgcagagaggcagctggtggtcaaagatggtgccacatataaagtggacgtggtgccaataaagaatcaggtcttcctatcactgggctctaatttcactttgcaactggtgactgtgatgcttgtcggtggacgtttctatggaatgccaacaattcttcaggaagcaaaatctgctgtccttccagtctctgagaaagctgccaattctcaggtcggatttgaatccactgcttttcaactcatgaacatcactgctggcacaagccacgttatgatttctaggagaggcacatatggagctctctcggttgcctggaccactggatatgctcctgggttagaaattcctgaattcattgttgttggcaacatgaccccaacactggggagcctttcattttcccacggtgaacaaaggaaaggagttttcctgtggacgtttcctagccctggttggccagaggcctttgttcttcacctatcaggagtgcagagcagtgctcctggcggagctcaactccgatcaggtttcattgttgctgaaattgaaccaatgggcgtcttccaattttccactagctcaagaaatatcatagtgtcagaagatacacagatgatcagattacatgtacaaagactatttgggttccacagcgatcttattaaagtttcttatcagaccactgcaggaagcgccaagccactggaagattttgagcctgttcagaatggggaactgttttttcaaaaattccaaactgaggttgattttgaaataaccattattaatgatcagctttctgagatagaagaatttttttacattaaccttacttcagtagaaattaggggattacaaaagtttgatgttaattggagcccacgcctgaatctagatttcagtgttgcagtgattacaatattggataatgatgacctggcaggaatggatatttccttccccgagacaactgtggctgtagcagttgacacaactctcattcctgtagaaactgaatccaccacatacctcagcacaagcaagacgactaccattctgcagccaaccaacgtggttgccattgttactgaggcaactggtgtatctgccatccctgagaaacttgtcacccttcatggcacacctgctgtgtctgaaaagcctgatgtggccactgtaactgccaatgtttccattcatggaacattcagccttgggccatccattgtttatattgaagaggagatgaagaatggcacattcaacactgcagaagttcttatccgaagaactggtgggtttactggcaatgtcagcataacagttaaaactttcggtgaaagatgtgctcagatggaaccaaatgcattgccctttcgtggtatctatgggatttccaacctaacatgggcagttgaagaagaagactttgaagaacaaactcttacccttatattcctagatggagaaagagaacgtaaagtatcagttcaaattttggatgatgatgagcctgaggggcaggaattcttctacgtgtttctcacaaaccctcaagggggagcacagattgtggaggagaaggatgatactggatttgcagcttttgccatggttattattacagggagtgaccttcacaatggcatcataggattcagtgaggagtcccagagtggactagaactcagggaaggagctgttatgagaagattgcaccttattgtcacaagacagccaaacagggcctttgaagatgtcaaggtcttttggcgagtcacacttaacaaaacagtcgtcgtgctccagaaggatggggtaaacctggtggaggaacttcagtctgtgtcagggaccacaacctgtacaatgggtcaaacaaaatgctttatcagcattgaactcaaaccagaaaaggtaccacaggttgaagtgtatttttttgtggaactatatgaagctactgctggagcagcaataaacaacagtgccagattcgcacagattaaaatcttagaaagtgatgaatctcaaagccttgtgtatttttctgtgggttctcggctggcagtggctcacaagaaggccactttaatcagtctgcaggtggccagagattctgggacaggactaatgatgtctgttaactttagtacccaggagttgaggagtgctgaaacaattggtcgtaccatcatatctccagctatttctggaaaggattttgtgataactgaaggcacattggtctttgaacctggccagagaagcactgtattggatgtcatcctaacgccagagacaggatctttaaattcatttcctaaacgcttccagattgtcctttttgacccaaaaggtggtgccagaattgataaagtgtatgggactgccaacatcactcttgtctcagatgcagattcgcaggccatttgggggcttgcagatcagctacatcagcctgtgaatgatgatattctcaacagagtgctccataccatcagcatgaaagtggccacagaaaacacagatgaacaactcagtgccatgatgcatttaatagaaaagataactactgaaggaaaaattcaagctttcagtgttgccagccgaactcttttctatgagattctttgttctcttattaacccaaagcgcaaggacactaggggattcagtcactttgctgaagtgactgagaattttgccttttctctgctgactaatgttacttgcggctctcctggtgaaaaaagcaaaaccatccttgatagttgcccatatttgtcaatattggctcttcactggtatcctcagcaaatcaatggacacaagtttgaaggaaaggaaggagattacattcgaattccagagaggctactggatgtccaggatgcagaaataatggctgggaaaagtacatgtaaattagtccagtttacagagtatagcagccaacagtggtttataagtggaaacaatcttcctaccctaaaaaataaggtattatctttgagtgtgaaaggtcagagttcacaactcctgactaatgacaatgaggttctctacaggatttatgctgctgagcctagaattattcctcagacatctctgtgtctcctttggaatcaggctgctgcaagctggttgtctgacagtcagttttgcaaagtggttgaggaaactgcagactatgtggaatgtgcctgttcacacatgtctgtgtatgctgtctatgctcggactgacaacttgtcttcatacaatgaagccttcttcacttctggatttatatgtatctcaggtctttgcttggctgttctttcccatatcttctgtgccaggtactccatgtttgcagctaaacttctgactcacatgatggcagccagcttaggtacacagattctgtttctggcgtctgcatacgcaagtccccaactcgctgaggagagctgttcagctatggctgctgtcacacattacctgtatctttgccagtttagctggatgctcattcagtctgtgaatttctggtacgtgctggtgatgaatgatgagcacacagagaggcgatatctgctgtttttccttctgagttggggactaccagcttttgtggtgattctcctcatagttattttgaaaggaatctatcatcagagcatgtcacagatctatggactcattcatggtgacctgtgttttattccaaacgtctatgctgctttgttcactgcagctcttgttcctttgacgtgcctcgtggtggtgttcgtggtgttcatccatgcctaccaggtgaagccacagtggaaagcatatgatgatgtcttcagaggaaggacaaatgctgcagaaattccactgattttatatctctttgctctgatttccgtgacatggctttggggaggactacacatggcctacagacacttctggatgttggttctctttgtcattttcaacagtctgcagggactttatgttttcatggtttatttcattttacacaaccaaatgtgttgccctatgaaggccagttacactgtggaaatgaatgggcatcctggacccagcacagcctttttcacgcccgggagtggaatgcctcctgctggaggggaaatcagcaagtccacccagaatctcatcggtgctatggaggaggtgccacctgactgggagagagcatccttccaacagggcagtcaggccagccctgatttaaagccaagtccacaaaatggagccacgttcccgtcctctggaggatatggccaggggtcactgatagccgatgaggagtcccaggagtttgatgatttaatatttgcattaaaaactggtgctggtctcagtgtcagtgataatgaatctggtcaaggcagccaggaggggggcaccttgactgactcccagatcgtggagctcaggaggatacccatcgccgacactcacctgtagcacctcactaaccattcgactgagcacactttcatatttgtatcagcttttgtgctaaaactctctaagtacatccacctgtgtaataggaacctgtgaattgtactggatgattaatacaaacgtgattgttgtatttggagtataaattactgattgtatgtgacctgaaaattcactgctataagaaaggtggagtcagtttgtatcagttaataggatgttcatattccaaggatattagttgtttttttaatcatcctatatggctaacattgtttaatgaaagtaataatcaataaagcaatagaatctatttggt

SEQ ID NO: 11367 - protein, 1967 aa, Homo sapiens
MQLCIFCCCCILFYFDLYDFGRGYDFTIQENGLQIDQPPEIGNISIVRIIIMKNDNAEGIIEFDPKYTAFEVEEDVGLIMIPVVRLHGTYGYVTADFISQSSSASPGGVDYILHGSTVTFQHGQNLSFINISIIDDNESEFEEPIEILLTGATGGAVLGRHLVSRIIIAKSDSPFGVIRFLNQSKISIANPNSTMILSLVLERTGGLLGEIQVNWETVGPNSQEALLPQNRDIADPVSGLFYFGEGEGGVRTIILTIYPHEEIEVEETFIIKLHLVKGEAKLDSRAKDVTLTIQEFGDPNGVVQFAPETLSKKTYSEPLALEGPLLITFFVRRVKGTFGEIMVYWELSSEFDITEDFLSTSGFFTIADGESEASFDVHLLPDEVPEIEEDYVIQLVSVEGGAELDLEKSITWFSVYANDDPHGVFALYSDRQSILIGQNLIRSIQINITRLAGTFGDVAVGLRISSDHKEQPIVTENAERQLVVKDGATYKVDVVPIKNQVFLSLGSNFTLQLVTVMLVGGRFYGMPTILQEAKSAVLPVSEKAANSQVGFESTAFQLMNITAGTSHVMISRRGTYGALSVAWTTGYAPGLEIPEFIVVGNMTPTLGSLSFSHGEQRKGVFLWTFPSPGWPEAFVLHLSGVQSSAPGGAQLRSGFIVAEIEPMGVFQFSTSSRNIIVSEDTQMIRLHVQRLFGFHSDLIKVSYQTTAGSAKPLEDFEPVQNGELFFQKFQTEVDFEITIINDQLSEIEEFFYINLTSVEIRGLQKFDVNWSPRLNLDFSVAVITILDNDDLAGMDISFPETTVAVAVDTTLIPVETESTTYLSTSKTTTILQPTNVVAIVTEATGVSAIPEKLVTLHGTPAVSEKPDVATVTANVSIHGTFSLGPSIVYIEEEMKNGTFNTAEVLIRRTGGFTGNVSITVKTFGERCAQMEPNALPFRGIYGISNLTWAVEEEDFEEQTLTLIFLDGERERKVSVQILDDDEPEGQEFFYVFLTNPQGGAQIVEEKDDTGFAAFAMVIITGSDLHNGIIGFSEESQSGLELREGAVMRRLHLIVTRQPNRAFEDVKVFWRVTLNKTVVVLQKDGVNLVEELQSVSGTTTCTMGQTKCFISIELKPEKVPQVEVYFFVELYEATAGAAINNSARFAQIKILESDESQSLVYFSVGSRLAVAHKKATLISLQVARDSGTGLMMSVNFSTQELRSAETIGRTIISPAISGKDFVITEGTLVFEPGQRSTVLDVILTPETGSLNSFPKRFQIVLFDPKGGARIDKVYGTANITLVSDADSQAIWGLADQLHQPVNDDILNRVLHTISMKVATENTDEQLSAMMHLIEKITTEGKIQAFSVASRTLFYEILCSLINPKRKDTRGFSHFAEVTENFAFSLLTNVTCGSPGEKSKTILDSCPYLSILALHWYPQQINGHKFEGKEGDYIRIPERLLDVQDAEIMAGKSTCKLVQFTEYSSQQWFISGNNLPTLKNKVLSLSVKGQSSQLLTNDNEVLYRIYAAEPRIIPQTSLCLLWNQAAASWLSDSQFCKVVEETADYVECACSHMSVYAVYARTDNLSSYNEAFFTSGFICISGLCLAVLSHIFCARYSMFAAKLLTHMMAASLGTQILFLASAYASPQLAEESCSAMAAVTHYLYLCQFSWMLIQSVNFWYVLVMNDEHTERRYLLFFLLSWGLPAFVVILLIVILKGIYHQSMSQIYGLIHGDLCFIPNVYAALFTAALVPLTCLVVVFVVFIHAYQVKPQWKAYDDVFRGRTNAAEIPLILYLFALISVTWLWGGLHMAYRHFWMLVLFVIFNSLQGLYVFMVYFILHNQMCCPMKASYTVEMNGHPGPSTAFFTPGSGMPPAGGEISKSTQNLIGAMEEVPPDWERASFQQGSQASPDLKPSPQNGATFPSSGGYGQGSLIADEESQEFDDLIFALKTGAGLSVSDNESGQGSQEGGTLTDSQIVELRRIPIADTHL

SEQ ID NO: 11368 - DNA, 6723 bp, Homo sapiens
attactgtatatgtatgtattcagccgtgattcccaaaggttcattttatgacagcatctttctgatttcctcacagtttattatcttcccattgcccaagtttagtaactttatattagttttggcttcgtacaggcaccactcattgggagcaacacagaaatctgtttcaaaacatcatttcaggaaaaagagaatattttagcgttgaggatctttaaaagtattgcagtactttatagaactaagttgtaggagctaagaggatcttttaattcatgctatgcaattatgtattttttgttgttgttgtattttattttattttgatttgtatgactttggaagagggtatgattttaccattcaagaaaatggacttcagatagatcaacctcctgaaataggaaacatctccattgttcgcatcataataatgaaaaatgataacgcagaaggcatcattgaatttgacccaaagtatactgccttcgaagtggaggaagatgttgggctgatcatgatcccagtggtgaggctacatggaacttatggctatgtgacagctgatttcatctctcagagctcctctgccagtcccggaggtgttgattacattttgcatggcagtacagtcacctttcagcatgggcaaaacttaagttttataaatatctccatcattgatgacaatgaaagtgaatttgaggagcccattgaaattctactcactggagctactggaggagcggtccttgggcgccacctagtgagcagaatcataatagctaagagtgactctccctttggagttataaggtttctcaatcaaagcaaaatttctattgctaatcccaattccacaatgattttatcactggtgctggagcggactggaggactcttgggagagattcaggtgaactgggagacagtaggacccaactctcaagaagccttactgccacagaatagagacattgcagacccagtgagcgggttgttctattttggagaaggagaaggaggagtgagaaccataattctgacaatctatcctcatgaagaaattgaagttgaagagacattcattattaaacttcatcttgtgaaaggagaagctaaattagactccagagctaaagatgttacattaaccatacaagagtttggtgacccaaatggagttgttcagtttgctcctgaaactttgtctaagaagacttattcagagcctctggctctggaagggcccctgctcattaccttctttgtcagaagagtcaagggcacctttggagagattatggtttactgggaattaagtagtgagtttgacattactgaagactttctttccaccagtggatttttcaccattgctgatggagagagtgaagctagctttgatgttcatttgctaccagatgaggtacctgagatagaggaagattatgtgatccagcttgtttctgtagagggaggagccgaactggatctggagaagagtatcacatggttctctgtttatgcaaatgatgacccacatggagtatttgccctgtattcggatcgccagtcaatacttattgggcagaaccttattagatccatccaaattaacataacccggcttgctggaacatttggagatgtggctgttgggcttcgaatatcatcggatcataaagaacagccgattgttaccgaaaatgcagagaggcagctggtggtcaaagatggtgccacatataaagtggacgtggtgccaataaagaatcaggtcttcctatcactgggctctaatttcactttgcaactggtgactgtgatgcttgtcggtggacgtttctatggaatgccaacaattcttcaggaagcaaaatctgctgtccttccagtctctgagaaagctgccaattctcaggtcggatttgaatccactgcttttcaactcatgaacatcactgctggcacaagccacgttatgatttctaggagaggcacatatggagctctctcggttgcctggaccactggatatgctcctgggttagaaattcctgaattcattgttgttggcaacatgaccccaacactggggagcctttcattttcccacggtgaacaaaggaaaggagttttcctgtggacgtttcctagccctggttggccagaggcctttgttcttcacctatcaggagtgcagagcagtgctcctggcggagctcaactccgatcaggtttcattgttgctgaaattgaaccaatgggcgtcttccaattttccactagctcaagaaatatcatagtgtcagaagatacacagatgatcagattacatgtacaaagactatttgggttccacagcgatcttattaaagtttcttatcagaccactgcaggaagcgccaagccactggaagattttgagcctgttcagaatggggaactgttttttcaaaaattccaaactgaggttgattttgaaataaccattattaatgatcagctttctgagatagaagaatttttttacattaaccttacttcagtagaaattaggggattacaaaagtttgatgttaattggagcccacgcctgaatctagatttcagtgttgcagtgattacaatattggataatgatgacctggcaggaatggatatttccttccccgagacaactgtggctgtagcagttgacacaactctcattcctgtagaaactgaatccaccacatacctcagcacaagcaagacgactaccattctgcagccaaccaacgtggttgccattgttactgaggcaactggtgtatctgccatccctgagaaacttgtcacccttcatggcacacctgctgtgtctgaaaagcctgatgtggccactgtaactgccaatgtttccattcatggaacattcagccttgggccatccattgtttatattgaagaggagatgaagaatggcacattcaacactgcagaagttcttatccgaagaactggtgggtttactggcaatgtcagcataacagttaaaactttcggtgaaagatgtgctcagatggaaccaaatgcattgccctttcgtggtatctatgggatttccaacctaacatgggcagttgaagaagaagactttgaagaacaaactcttacccttatattcctagatggagaaagagaacgtaaagtatcagttcaaattttggatgatgatgagcctgaggggcaggaattcttctacgtgtttctcacaaaccctcaagggggagcacagattgtggaggagaaggatgatactggatttgcagcttttgccatggttattattacagggagtgaccttcacaatggcatcataggattcagtgaggagtcccagagtggactagaactcagggaaggagctgttatgagaagattgcaccttattgtcacaagacagccaaacagggcctttgaagatgtcaaggtcttttggcgagtcacacttaacaaaacagtcgtcgtgctccagaaggatggggtaaacctggtggaggaacttcagtctgtgtcagggaccacaacctgtacaatgggtcaaacaaaatgctttatcagcattgaactcaaaccagaaaaggtaccacaggttgaagtgtatttttttgtggaactatatgaagctactgctggagcagcaataaacaacagtgccagattcgcacagattaaaatcttagaaagtgatgaatctcaaagccttgtgtatttttctgtgggttctcggctggcagtggctcacaagaaggccactttaatcagtctgcaggtggccagagattctgggacaggactaatgatgtctgttaactttagtacccaggagttgaggagtgctgaaacaattggtcgtaccatcatatctccagctatttctggaaaggattttgtgataactgaaggcacattggtctttgaacctggccagagaagcactgtattggatgtcatcctaacgccagagacaggatctttaaattcatttcctaaacgcttccagattgtcctttttgacccaaaaggtggtgccagaattgataaagtgtatgggactgccaacatcactcttgtctcagatgcagattcgcaggccatttgggggcttgcagatcagctacatcagcctgtgaatgatgatattctcaacagagtgctccataccatcagcatgaaagtggccacagaaaacacagatgaacaactcagtgccatgatgcatttaatagaaaagataactactgaaggaaaaattcaagctttcagtgttgccagccgaactcttttctatgagattctttgttctcttattaacccaaagcgcaaggacactaggggattcagtcactttgctgaagtgactgagaattttgccttttctctgctgactaatgttacttgcggctctcctggtgaaaaaagcaaaaccatccttgatagttgcccatatttgtcaatattggctcttcactggtatcctcagcaaatcaatggacacaagtttgaaggaaaggaaggagattacattcgaattccagagaggctactggatgtccaggatgcagaaataatggctgggaaaagtacatgtaaattagtccagtttacagagtatagcagccaacagtggtttataagtggaaacaatcttcctaccctaaaaaataaggtattatctttgagtgtgaaaggtcagagttcacaactcctgactaatgacaatgaggttctctacaggatttatgctgctgagcctagaattattcctcagacatctctgtgtctcctttggaatcaggctgctgcaagctggttgtctgacagtcagttttgcaaagtggttgaggaaactgcagactatgtggaatgtgcctgttcacacatgtctgtgtatgctgtctatgctcggactgacaacttgtcttcatacaatgaagccttcttcacttctggatttatatgtatctcaggtctttgcttggctgttctttcccatatcttctgtgccaggtactccatgtttgcagctaaacttctgactcacatgatggcagccagcttaggtacacagattctgtttctggcgtctgcatacgcaagtccccaactcgctgaggagagctgttcagctatggctgctgtcacacattacctgtatctttgccagtttagctggatgctcattcagtctgtgaatttctggtacgtgctggtgatgaatgatgagcacacagagaggcgatatctgctgtttttccttctgagttggggactaccagcttttgtggtgattctcctcatagttattttgaaaggaatctatcatcagagcatgtcacagatctatggactcattcatggtgacctgtgttttattccaaacgtctatgctgctttgttcactgcagctcttgttcctttgacgtgcctcgtggtggtgttcgtggtgttcatccatgcctaccaggtgaagccacagtggaaagcatatgatgatgtcttcagaggaaggacaaatgctgcagaaattccactgattttatatctctttgctctgatttccgtgacatggctttggggaggactacacatggcctacagacacttctggatgttggttctctttgtcattttcaacagtctgcagggactttatgttttcatggtttatttcattttacacaaccaaatgtgttgccctatgaaggccagttacactgtggaaatgaatgggcatcctggacccagcacagcctttttcacgcccgggagtggaatgcctcctgctggaggggaaatcagcaagtccacccagaatctcatcggtgctatggaggaggtgccacctgactgggagagagcatccttccaacagggcagtcaggccagccctgatttaaagccaagtccacaaaatggagccacgttcccgtcctctggaggatatggccaggggtcactgatagccgatgaggagtcccaggagtttgatgatttaatatttgcattaaaaactggtgctggtctcagtgtcagtgataatgaatctggtcaaggcagccaggaggggggcaccttgactgactcccagatcgtggagctcaggaggatacccatcgccgacactcacctgtagcacctcactaaccattcgactgagcacactttcatatttgtatcagcttttgtgctaaaactctctaagtacatccacctgtgtaataggaacctgtgaattgtactggatgattaatacaaacgtgattgttgtatttggagtataaattactgattgtatgtgacctgaaaattcactgctataagaaaggtggagtcagtttgtatcagttaataggatgttcatattccaaggatattagttgtttttttaatcatcctatatggctaacattgtttaatgaaagtaataatcaataaagcaatagaatctatttggtatcatccagcttcattattgataaagaaacattgtgcatgggcaaaaaaagctaactctatatgtagatgatgacaagcaccctgtgccatcttgcatgaatccaggtgatccagattcaagacttcactgcaactagaagactttaattctgaaaactgtaaaatggtctgtctgttgatgatcctgcacataaatgttgattggagtactg

SEQ ID NO: 11369 - protein, 1967 aa, Homo sapiens; identical to SEQ ID NO: 11367

SEQ ID NO: 11370 - DNA, 1528 bp, Homo sapiens
tatacattgtttgcaaagtaaatgaaacaggttaacttcctggatgcttacttttagcagaaatatatcagatagcaaacttgctgacagatgaatcacagctttgcccacctgtaatgaggatacactgctggatcccagattctgtttctggcgtctgcatacgcaagtccccaactcgctgaggagagctgttcagctatggctgctgtcacacattacctgtatctttgccagtttagctggatgctcattcagtctgtgaatttctggtacgtgctggtgatgaatgatgagcacacagagaggcgatatctgctgtttttccttctgagttggggactaccagcttttgtggtgattctcctcatagttattttgaaaggaatctatcatcagagcatgtcacagatctatggactcattcatggtgacctgtgttttattccaaacgtctatgctgctttgttcactgcagctcttgttcctttgacgtgcctcgtggtggtgttcgtggtgttcatccatgcctaccaggtgaagccacagtggaaagcatatgatgatgtcttcagaggaaggacaaatgctgcagaaattccactgattttatatctctttgctctgatttccgtgacatggctttggggaggactacacatggcctacagacacttctggatgttggttctctttgtcattttcaacagtctgcagggactttatgttttcatggtttatttcattttacacaaccaaatgtgttgccctatgaaggccagttacactgtggaaatgaatgggcatcctggacccagcacagcctttttcacgcccgggagtggaatgcctcctgctggaggggaaatcagcaagtccacccagaatctcatcggtgctatggaggaggtgccacctgactgggagagagcatccttccaacagggcagtcaggccagccctgatttaaagccaagtccacaaaatggagccacgttcccgtcctctggaggatatggccaggggtcactgatagccgatgaggagtcccaggagtttgatgatttaatatttgcattaaaaactggtgctggtctcagtgtcagtgataatgaatctggtcaaggcagccaggaggggggcaccttgactgactcccagatcgtggagctcaggaggatacccatcgccgacactcacctgtagcacctcactaaccattcgactgagcacactttcatatttgtatcagcttttgtgctaaaactctctaagtacatccacctgtgtaataggaacctgtgaattgtactggatgattaatacaaacgtgattgttgtatttggagtataaattactgattgtatgtgacctgaaaattcactgctataagaaaggtggagtcagtttgtatcagttaataggatgttcatattccaaggatattagttgtttttttaatcatcctatatggctaacattgtttaatgaaagtaataatcaataaagcaatagaatctatttggt

SEQ ID NO: 11371 - protein, 334 aa, Homo sapiens
MAAVTHYLYLCQFSWMLIQSVNFWYVLVMNDEHTERRYLLFFLLSWGLPAFVVILLIVILKGIYHQSMSQIYGLIHGDLCFIPNVYAALFTAALVPLTCLVVVFVVFIHAYQVKPQWKAYDDVFRGRTNAAEIPLILYLFALISVTWLWGGLHMAYRHFWMLVLFVIFNSLQGLYVFMVYFILHNQMCCPMKASYTVEMNGHPGPSTAFFTPGSGMPPAGGEISKSTQNLIGAMEEVPPDWERASFQQGSQASPDLKPSPQNGATFPSSGGYGQGSLIADEESQEFDDLIFALKTGAGLSVSDNESGQGSQEGGTLTDSQIVELRRIPIADTHL

SEQ ID NO: 11372 - DNA, 669 bp, Homo sapiens
gttctcgaaatcagtgtggattcctgagacaatgtggtatgagggactcagaggaatgaaatctccattcaaattatgctctcttcatctcaaaaattacaaatttggaattaaaaaaggaagaccttcctttaagctgtaacctcctagaaagtttgccccgtggacttgtggttccctctgctgctcttccctgactacctgctaatcctacttatcagtgctgccctctcccccttacatgctgctccctttggctggaacactattcttgaatggagagtccctcctgggcctggtgccacctcatcagccatctgatttcacttcctcaggaattcccccaattagacggcattcttctgattacgcattcacaacaccccatactgttctcttgtagaacttatcacagtttataacaatatttgtgtgattattttattcaaatcttcctcccacagtaaaatgcaacctctgtgattttatgcattctgtttgggaccattcctgtttggttctccattgtaccctcagaacttaatgcagtcatctatgtaatgaataccttcgaatgaataaatgatgagagaagatacttgttgaaatcttttcagaaatacctaaaatgtgatttgtaaatgtattagtgatgaggataacaataaa

SEQ ID NO: 11373 - protein, 53 aa, Homo sapiens
MLLPLAGTLFLNGESLLGLVPPHQPSDFTSSGIPPIRRHSSDYAFTTPHTVLL

SEQ ID NO: 11374 - DNA, 735 bp, Homo sapiens
atcaatgacgccaagtggcaaggaacatcaccatctttggagacctagtggtggagttaaactactacagggaaacaactttacgtatagaggagttgagcttcctagaggaaaagaaggaaaatcattcctaatggaagatcaactattcaagaaagaaagaagagcaatgagaaagatggagtctcactctgtttctcaggctggagggcagtggcacgatctcagctcactgcaacctctgcttcttgggttcaagcgagtctcctgcctcagcctcctgagtagctgggattacaggcacctgtcaccacgctcggctaattcttgcatttttagtagagatgtggtttcaccatgttggccaggctggtctcgaactcctgacctcaggtaaactgcctgccgcctcagcctcccaaagtgttgggattacaggcatgagtcatcgtgcgcagccatgagatctgatggttttataaggggcttccccctttgctgggcactcattcttctccttcttgttgccatgtgagaaaggaaatgtttgcttccctttctgccatgattgtaagtttctggaggcctccccagtcctgtggaactagactgaggcattttgcccctgccctagagatctgtggaactgtgaacttgagagagatgatttatgatatctggcagaagaaatttctaagtggcaaagcattcaagaggaagcagagcataaaagtt

SEQ ID NO: 11375 - protein, 130 aa, Homo sapiens
MTPSGKEHHHLWRPSGGVKLLQGNNFTYRGVELPRGKEGKSFLMEDQLFKKERRAMRKMESHSVSQAGGQWHDLSSLQPLLLGFKRVSCLSLLSSWDYRHLSPRSANSCIFSRDVVSPCWPGWSRTPDLR

SEQ ID NO: 11376 - DNA, 549 bp, Homo sapiens
ggtttttccttaagcctcacaacaatttacagcattgccagcagcattcagtacattcagaacaggataatttcacccgcagctgaactagggccatgcctgggacagacagagaatggccttccagcagacatgccaagaagcaagccagggtcagtgagtgaagaggagggcaggcccatttgaagcaacacagtttatgaacaaaacccatcagaagatgtcagaagataaggatttttgtcctgatgctacacttaccagctgtccctcagtgttctacttcttaaaaaaagagagatggataaacagaggcaacccgaggataaaggccttgctcagtgtcacacatttcagtcactaaataagacacaatggatgccagtattctcatcccctcacaaataaagagccttcaagctcttgcagtcaacaagaacttttggaatgatttcactgcctgaaaaggcagatacataggtgacacccacaaataggaagaaaatcaacctgaacctgagtgtgtgggctcactgactctaagcagta

SEQ ID NO: 11377 - protein, 54 aa, Homo sapiens
MNKTHQKMSEDKDFCPDATLTSCPSVFYFLKKERWINRGNPRIKALLSVTHFSH

SEQ ID NO: 11378 - DNA, 936 bp, Homo sapiens
caatgcccagacctccagaaaccatgtgtcaagctcggattgccttagacaggtgcaatttaagaacagctttcatcctcttttctctcatattgtcacactatgtgttctgacttctggctcctttcctcacaagaagctcacccagctggaactcttatgggaccttggcaccagagaccacaaattcctctttgaagttttctaacagcaacaatggtatttctgacttggctttcttgtatttctctcacgttaacaaaattggttcagcatctaccatgggctacatgctgagctacagagtttcgctctgtcgcccaggctggagtgcagtggcgcgcgatctcggttcactgcaagctccacctcccgggttcacgccattctcctgcctcagcctcctgagtagctgggactacaggcgcccgccaccacacccaggaatccaacttgctgtttgctatcacatgtgctatacatgctgttgatgaaactgctaaaggggctgaatgtgactgacgtctttggaaggatgagacttagcgtgcctgtacagttgtgtccaaatgctgtcctcatctcccaatgaaaaggaacaaaacccatcagaagatgtcagaagataaggatttttgtcctgatgctacacttaccagctgtccctcagtgttctacttcttaaaaaaagagagatggataaacagaggcaacccgaggataaaggccttgctcagtgtcacacatttcagtcactaaataagacacaatggatgccagtattctcatcccctcacaaataaagagccttcaagctcttgcagtcaacaagaacttttggaatgatttcactgcctgaaaaggcagatacataggtgacacccacaaataggaagaaaatcaacctgaacctgagtgtgtgggctcactgactct

SEQ ID NO: 11379 - protein, 69 aa, Homo sapiens
MGYMLSYRVSLCRPGWSAVARDLGSLQAPPPGFTPFSCLSLLSSWDYRRPPPHPGIQLAVCYHMCYTCC

SEQ ID NO: 11380 - DNA, 2667 bp, Homo sapiens
aatcaacactccactcagacaatgcccagacctccagaaaccatgtgtcaagctcggattgccttagacaggtgcaatttaagaacagctttcatcctcttttctctcatattgtcacactatgtgttctgacttctggctcctttcctcacaagaagctcacccagctggaactcttatgggaccttggcaccagagaccacaaattcctctttgaagttttctaacagcaacaatggtatttctgacttggctttcttgtatttctctcacgttaacaaaattggttcagcatctaccatgggctacatgctgagctacagagtttcgctctgtcgcccaggctggagtgcagtggcgcgcgatctcggttcactgcaagctccacctcccgggttcacgccattctcctgcctcagcctcctgagtagctgggactacaggcgcccgccaccacacccaggaatccaacttgctgtttgctatcacatgtgctatacatgctgttgatgaaactgctaaaggggctgaatgtgactgacgtctttggaaggatgagacttagcgtgcctgtacagttgtgtccaaatgctgtcctcatctcccaatgaaaaggtattgtaaataaagagaaagatcagaggcttattttaaacactaaatatgagctaggagctgtcctagacactatgtaaaagttttatttagttctcactgtaatgttggccttatgttagcatcccatttttcagactgaggaaattatggctcagagaggttaagagacttattgaaggtcacacagctccacaaactttggtgtagattgaacgtgtacatgggtctatgtgactttgaatcttgcattctttacattattggaatatttcacagaaggaaaatgacatattaacatggcaataagatttctggttccagtctggttactggtcttccaagagtgttataggatgtatagcctgagctctgaagctttgttctgaagcatgctatcaatatgaacaaattggtatggaaggaagccacaaattatatactaaaatctagttcatcagaggaaaatatagttaaatacatttacattcccagaactgttaatattgaagaataaaacacacagtgggaaagagacgaagagaaaatacgcctgtttttatgacttgttgatatctacagggtttttccttaagcctcacaacaatttacagcattgccagcagcattcagtacattcagaacaggataatttcacccgcagctgaactagggccatgcctgggacagacagagaatggccttccagcagacatgccaagaagcaagccagggtcagtgagtgaagaggagggcaggcccatttgaagcaacacagtttatgtaagtgtgatctaactgctttcactggaaatgggtcagactccagttgagagaaccaggggcctgaatgaccccagcaaaatcactgtggcaattctttcaatcacctctgagaatatggccctgtgacgacataatgacgtttggattaattccagtcggctgtgttttcccctcctttcttgcctccccgtagttgatttgccaaattttttttgtttgcttaaatacgcggaactaaacaggatacattatatgacagtctgtgataaatttaccactgggaatagggaaaaagtatgggataaagaaataggtatttttcgcctctcacagctgtgattcagttctgactcaaaaggaagtgtgccacctactgaatcacagaaaccacttcctgtggctgtttggtttattctggaggagcatcaggccaagtgctgccctgccctgaccctgactggctcttcagagccaaggcattcacagcttgaggtggtttggcctcagactcttgagaacattgcatattaaattacaagtgtttcgtttcctagcaaggagtctttagcaacatgaaaacgaacgtgtgttatttgcaaaccaagtatatcattactgaacctgaatatccttactttttcataaggtacgtattccggatgaccactcttaagatctgaatgtacactggttctgtttttcctgaggggaacttgggcagtctgcagggtggcatttaccagctgagggacttcaagagcaccctttaatcagtgtggcagcactcaacttgtattcactcactcagagtatttttgagcatgtacttattgccatgtgctgtgctaggtaggggtagagggtacagtggtgaacaagaccccacagctcctgacctcatggctcatgtgttctacaccataagggaatcaagctgtgtctcccggggcaggggccttcctctgttcaccatgcagccccagcatctagcacctggcgttgcataaaggaggctctaaatcaagcttgtccaacccaaggcccacgggccacatgtggcccaggatggctttgaatgcagccaaacacaaatttgtaaactttcttaaaacattataagatttgtgtgtatgtgttttagtccatcagctattgttagtgttcatgtattttatgtgtggcccaagacaattcttctatgtggcccaaggaaaccaaagattgaacactcctgctctaaatacttgtttgttgaatagatacatg

SEQ ID NO: 11381 - protein, 69 aa, Homo sapiens; identical to SEQ ID NO: 11379

SEQ ID NO: 11382 - DNA, 718 bp, Homo sapiens
gacaatgcccagacctccagaaaccatgtgtcaagctcggattgccttagacaggtgcaatttaagaacagctttcatcctcttttctctcatattgtcacactatgtgttctgacttctggctcctttcctcacaagaagctcacccagctggaactcttatgggaccttggcaccagagaccacaaattcctctttgaagttttctaacagcaacaatggtatttctgacttggctttcttgtatttctctcacgttaacaaaattggttcagcatctaccatgggctacatgctgagctacagagtttcgctctgtcgcccaggctggagtgcagtggcgcgcgatctcggttcactgcaagctccacctcccgggttcacgccattctcctgcctcagcctcctgagtagctgggactacaggcgcccgccaccacacccaggaatccaacttgctgtttgctatcacatgtgctatacatgctgttgatgaaactgctaaaggggctgaatgtgactgacgtctttggaaggatgagacttagcgtgcctgtacagttgtgtccaaatgctgtcctcatctcccaatgaaaagctgaactagggccatgcctgggacagacagagaatggccttccagcagacatgccaagaagcaagccagggtcagtgagtgaagaggagggcaggcccatttgaagcaacacagtttatg

SEQ ID NO: 11383 - protein, 69 aa, Homo sapiens; identical to SEQ ID NO: 11379

SEQ ID NO: 11384 - DNA, 4161 bp, Homo sapiens
agcttttagccgcccgtctttgtaaggagaccactgagacgagcgggagcgcggagcagcagcctctgctgccctgactttttaagaaatctcaatgaactatttgtagagaatcactgatccggcctgcaagcattttgcacggcaaaaatatcgatcagtgttaagtgaagatcacattttatatgcgatcttgacttttttgtcttacattatatttttatagattttgttataaacatggtgctgggaaaggtgaagagtttgacaataagctttgactgtcttaatgacagcaatgtccctgtgtattctagtggggataccgtctcaggaagggtaaatttagaagttactggggaaatcagagtaaaatctcttaaaattcatgcaagaggacatgcgaaagtacgctggactgaatctagaaacgccggctccaatactgcctatacacagaattacactgaagaagtagagtatttcaaccataaagacatcttaattgggcacgaaagagatgatgataattccgaagaaggcttccacactattcattcaggaaggcatgaatatgcattcagcttcgagcttccacagacaccactcgctacctcattcgaaggccgacatggcagtgtgcgctattgggtgaaagccgaattgcacaggccttggctactaccagtaaaattaaagaaggaatttacagtctttgagcatatagatatcaacactccttcattactgtcaccccaagcaggcacaaaagaaaagacactctgttgctggttctgtacctcaggcccaatatccttaagtgccaaaattgaaaggaagggctataccccaggtgaatcaattcagatatttgctgagattgagaactgctcttcccgaatggtggtgccaaaggcagccatttaccaaacacaggccttctatgccaaagggaaaatgaaggaagtaaaacagcttgtggctaacttgcgtggggaatccttatcatctggaaagacagagacgtggaatggcaagttgctgaaaattccaccagtttctccctctatcctcgactgtagtataatccgcgtggaatattcactaatggtatatgtggatattcctggagctatggatttatttcttaatttgccacttgtcatcggtaccattcctctacatccatttggtagcagaacctcaagtgtaagcagtcagtgtagcatgaatatgaactggctcagtttatcacttcctgaaagacctgaagcaccacccagctatgcagaagtggtaacagaggaacaaaggcggaacaatcttgcaccagtgagtgcttgtgatgactttgagagagcccttcaaggaccactgtttgcatatatccaggagtttcgattcttgcctccacctctttattcagagattgatccaaatcctgatcagtcagcagatgatagaccatcctgcccctctcgttgaaggaacacttggttgaatcaagttgatgtgggttccgaactgtatctcttccggctgaggacagagaagtatcttggagacacgtttcagaggaagtggaattacttttgcccagaaaaatggcgaatacatgaaacaaccagtgatcatgctttagaagcctacagcaacattctgagactgctccaacatgcttgaagatctaagcttttctcttttaaaactggcacatactcagagcagtcttcttagcctatggtcgtacgtgtcaagacatcacgttgtaaagagggatgatttccttcttttgatttgaaaatttgcacatgctcaatgcttacattgtgcggttcgacgtcactacagcttctttttttttttttttttttttctatttttgccagactcttgatactcttaaaacttgtttgtggtcagcacaacaaggaacaaaacaaagctttgaaaaaactttaacatgaaaaaacgcactgacatttttttttatttaatatagcctggactttacctgcgtatgcacatgctcagaattgtctactaggctgactatgtatcacctcttcagcttggatccaattgtggatttatttacaaacatcaaatgccttcaagccaatcctttttgctgtatgttttgcagcctactgtagtagatacgcaacagataatgtgggaaaaaaagagataagaggaggaagctaataagagactgtcaagattgtataccttcttggtttcttttaagaatttgttgcctttctactattacagcaaagcagcattttgttactgactgcctaaaatcacttaatctcaggtgaacgcatcacttgccaaactgttggaatgctatttgtgttttgttgcactgtttttttcgtttgtttgtttgtttatttggttggctttttggagagggaaatttggaaacgggacatacacaaaagttacacacccacattccctttttatcatgacatacaagaagaaactagcagagctaagaatggagtgaagaaaggcagtatggcaggcaccagcaaagagttgagggctgttgctcttaaaaattattttttttattattattttgaaagtatggaagttttccattcactggggaaaggagggaaaagtgcatttatttttatacagagttacttaattacctccaaaacacatatgttggaaatcgcttttgctggtgcaaagtatattaatgagcaggaatacatacattgaggttatgaatagagagctcaatttgtacctttgctgtcttgctcaagcttggtatggcatgaaaactcgactttattccaaaagtaacttcaaaatttaaaatactagaacgtttgctgcgataaatcttttggatttttgtgtttttctaatgagaatactgtttttcattacctaaagaacaatttgctaaacatgagaaatcactcactttgattatgtatagattacataggaagaacaatcacatcagtaagttatagtttatattaaaggtaattttctgttggctcataacaaatataccagcattcatgatagcatttcagcattttccaaggtaccaagtgtacttattttgttgttgttgttgttgttgtattttagaaggaattcagctctgatgtttttaaagaaaaccagcatctctgatgttgcaacatacgtgtaaaatgggtgttacatctatcctgccatttaaccccacagttaataaagtggctgaaaataatagtagctctggcttggtgcttgacctggttaaatactgtcttaaagctcatacaaaacaaataggcttttccataagtggcctttaagaaaacatggaagacaattcatgtttgacaaatgctgacagggtgaagaaagcccagtgtaaaaatgaatcgcgttttaagtgattcggttaaagagtttgggctcccgtagcaaactaatactagataataaggaaatgggggtgaaatatttttttattgttgaatcattttgtgaatgtccccctcaaaaaaagctaatggaatatttggcataaagggcatttggtggttttatttttgtttgagggggattgtcagaaaatcccttttctctcttacgtctaactgactagggaacaattgttgatatgcatagcattggaatacttgtcattatatactcttacaaataacacatgaagcaagaatgaccaatattctgataattggcactggatcacaaaatgtgataaaactttaaatgtataaaactttatcaaataaagttttattttcccctttaaaatgtatttctttagaggcattacttttttaaaaatattggtcaattcctgacataagatgtgaggttcacagttgtattccagtattcaagatagattcctgatttttcaattaggaaaagtaaaatccaaaatgttagcaaaacaaagtgcaatattaaatgtttgctttatagattatattctatggctgtttgtaatttctctttttttccttttttatttggtgctgaatatgtccttgtaggctctgttttaagaaaacaatatgtgggaaatgatttaatttttcctattgctcttccttgtggaaaataaagtgttttgtttttttctgttttgtataa

SEQ ID NO: 11385 - protein, 414 aa, Homo sapiens; identical to SEQ ID NO: 1064

SEQ ID NO: 11386 - DNA, 3263 bp, Homo sapiens
agcttttagccgcccgtctttgtaaggagaccactgagacgagcgggagcgcggagcagcagcctctgctgccctgactttttaagaaatctcaatgaactatttgtagagaatcactgatccggcctgcaagcattttgcacggcaaaaatatcgatcagtgttaagtgaagatcacattttatatgcgatcttgacttttttgtcttacattatatttttatagattttgttataaacatggtgctgggaaaggtgaagagtttgacaataagctttgactgtcttaatgacagcaatgtccctgtgtattctagtggggataccgtctcaggaagggtaaatttagaagttactggggaaatcagagtaaaatctcttaaaattcatgcaagaggacatgcgaaagtacgctggactgaatctagaaacgccggctccaatactgcctatacacagaattacactgaagaagtagagtatttcaaccataaagacatcttaattgggcacgaaagagatgatgataattccgaagaaggcttccacactattcattcaggaaggcatgaatatgcattcagcttcgagcttccacagacaccactcgctacctcattcgaaggccgacatggcagtgtgcgctattgggtgaaagccgaattgcacaggccttggctactaccagtaaaattaaagaaggaatttacagtctttgagcatatagatatcaacactccttcattactgtcaccccaagcaggcacaaaagaaaagacactctgttgctggttctgtacctcaggcccaatatccttaagtgccaaaattgaaaggaagggctataccccaggtgaatcaattcagatatttgctgagattgagaactgctcttcccgaatggtggtgccaaaggcagccatttaccaaacacaggccttctatgccaaagggaaaatgaaggaagtaaaacagcttgtggctaacttgcgtggggaatccttatcatctggaaagacagagacgtggaatggcaagttgctgaaaattccaccagtttctccctctatcctcgactgtagtataatccgcgtggaatattcactaatggtatatgtggatattcctggagctatggatttatttcttaatttgccacttgtcatcggtaccattcctctacatccatttggtagcagaacctcaagtgtaagcagtcagtgtagcatgaatatgaactggctcagtttatcacttcctgaaagacctgaagcaccacccagctatgcagaagtggtaacagaggaacaaaggcggaacaatcttgcaccagtgagtgcttgtgatgactttgagagagcccttcaaggaccactgtttgcatatatccaggagtttcgattcttgcctccacctctttattcagagattgatccaaatcctgatcagtcagcagatgatagaccatcctgcccctctcgttgaaggaacacttggttgaatcaagttgatgtgggttccgaactgtatctcttccggctgaggacagagaagtatcttggagacacgtttcagaggaagtggaattacttttgcccagaaaaatggcgaatacatgaaacaaccagtgatcatgctttagaagcctacagcaacattctgagactgctccaacatgcttgaagatctaagcttttctcttttaaaactggcacatactcagagcagtcttcttagcctatggtcgtacgtgtcaagacatcacgttgtaaagagggatgatttccttcttttgatttgaaaatttgcacatgctcaatgcttacattgtgcggttcgacgtcactacagcttctttttttttttttttttttttctatttttgccagactcttgatactcttaaaacttgtttgtggtcagcacaacaaggaacaaaacaaagctttgaaaaaactttaacatgaaaaaacgcactgacatttttttttatttaatatagcctggactttacctgcgtatgcacatgctcagaattgtctactaggctgactatgtatcacctcttcagcttggatccaattgtggatttatttacaaacatcaaatgccttcaagccaatcctttttgctgtatgttttgcagcctactgtagtagatacgcaacagataatgtgggaaaaaaagagataagaggaggaagctaataagagactgtcaagattgtataccttcttggtttcttttaagaatttgttgcctttctactattacagcaaagcagcattttgttactgactgcctaaaatcacttaatctcaggtgaacgcatcacttgccaaactgttggaatgctatttgtgttttgttgcactgtttttttcgtttgtttgtttgtttatttggttggctttttggagagggaaatttggaaacgggacatacacaaaagttacacacccacattccctttttatcatgacatacaagaagaaactagcagagctaagaatggagtgaagaaaggcagtatggcaggcaccagcaaagagttgagggctgttgctcttaaaaattattttttttattattattttgaaagtatggaagttttccattcactggggaaaggagggaaaagtgcatttatttttatacagagttacttaattacctccaaaacacatatgttggaaatcgcttttgctggtgcaaagtatattaatgagcaggaatacatacattgaggttatgaatagagagctcaatttgtacctttgctgtcttgctcaagcttggtatggcatgaaaactcgactttattccaaaagtaacttcaaaatttaaaatactagaacgtttgctgcgataaatcttttggatttttgtgtttttctaatgagaatactgtttttcattacctaaagaacaatttgctaaacatgagaaatcactcactttgattatgtatagattacataggaagaacaatcacatcagtaagttatagtttatattaaaggtaattttctgttggctcataacaaatataccagcattcatgatagcatttcagcattttccaaggtaccaagtgtacttattttgttgttgttgttgttgttgtattttagaaggaattcagctctgatgtttttaaagaaaaccagcatctctgatgttgcaacatacgtgtaaaatgggtgttacatctatcctgccatttaaccccacagttaataaagtggctgaaaataatagt

SEQ ID NO: 11387 - protein, 414 aa, Homo sapiens; identical to SEQ ID NO: 1064

SEQ ID NO: 11388 - DNA, 821 bp, Homo sapiens
agcttttagccgcccgtctttgtaaggagaccactgagacgagcgggagcgcggagcagcagcctctgctgccctgactttttaagaaatctcaatgaactatttgtagagaatcactgatccggcctgcaagcattttgcacggcaaaaatatcgatcagtgttaagtgaagatcacattttatatgcgatcttgacttttttgtcttacattatatttttatagattttgttataaacatggtgctgggaaaggtgaagagtttgacaataagctttgactgtcttaatgacagcaatgtccctgtgtattctagtggggataccgtctcaggaagggtaaatttagaagttactggggaaatcagagtaaaatctcttaaaattcatgcaagaggacatgcgaaagtacgctggactgaatctagaaacgccggctccaatactgcctatacacagaattacactgaagaagtagagtatttcaaccataaagacatcttaattgggcacgaaagagatgatgataattccgaagaaggcttccacactattcattcaggaaggcatgaatatgcattcagcttcgagcttccacagacaccactcgctacctcattcgaaggccgacatggcagtgtgcgctattgggtgaaagccgaattgcacaggccttggctactaccagtaaaattaaagaaggaatttacagtctttgagcatatagatatcaacactccttcattactggtaagaattgactgaattatttattctttgtttttggcatataaatattaaagaataatcaatcacctaaa

SEQ ID NO: 11389 - protein, 174 aa, Homo sapiens [sequence omitted]

SEQ ID NO: 11390 - DNA, 558 bp, Homo sapiens
caggggactcctgtgaacgcttgttttccccttagctgaaacaaagcttgttccccgacctctccagtcgccacactgtctaccttgagttgacctgaggggacagagcaaaggctggcccgaggaaaaagggaaaggaaggcgaacttcgggcgccttcgaggggagcgaatttaaatggcccccagctcatcagctagtttttggttctgaaatccgttcaggggaatttgcacaggggacgaggaaaattgtatggagacataagcgaatcaccatgatttttaaatgaaagtatcgacgtatacatgcttttttccccctttttctcgtttaatatcagggaggcatcacgttttttgtgtatatccaatactttgctgaaggaaagttaaataatgtgccagttttttctactctgggggctaatcgtaaaggtttctacaccaagaaaactttaaaagatatttctgtaattatttaaaacgctaaataggcactttaatgatctagaaccccctcccatattttcgattatatttattttcatgccacttg

SEQ ID NO: 11391 - protein, 31 aa, Homo sapiens
MKVSTYTCFFPPFSRLISGRHHVFCVYPILC

SEQ ID NO: 11392 - DNA, 729 bp, Homo sapiens
gcgcccgtgcccgcgcaacctagcctgctggccggggggcggggcgagcgagccgcggcgcttccgctttacacgccccagccggcgaccggttccatctggctcgggccactctgacacctttagtttcggtcaactcaaggtagacagtgtggcgactggagaggtcggggaacaagctttgtttcagctaaggggaaaacaagcgttcacaggagtcccctgacacctcccactcggaagatagctaacgggggtcctgccaacccttcccatccaacttccatctgaaaaggattttctgctaaagttgggtccatggccatccagcacctgtaaggccggcaggagcgtctgccctctactcagttaaagcctgaagtcgtttcctttcgatggcccttaggaggcccaaaagaggggcgacagaacatgatgttgacacgggctgggcgcccccagaagcccgggaacaaacgtttctactttccaggtccactggtgtttggtgtacccatgtgactaatttgtccaaagagaggtctcagctgaaatgaaacctcctcagaaaaatttgttcctgacaaattataactcaaaaatcaaaaatttctaaggcctttgttattctctttatcacagcattgtactcattttcttcttagtacttagaaacgtctataattgttttacttctttgtttaccattaaatgtctgtatcctttata

SEQ ID NO: 11393 - protein, 53 aa, Homo sapiens
MALRRPKRGATEHDVDTGWAPPEAREQTFLLSRSTGVWCTHVTNLSKERSQLK

SEQ ID NO: 11394 - DNA, 2501 bp, Homo sapiens
gctttacacgccccagccggcgaccggttccatctggctcgggccactctgacacctttagtttcggcaagggatattggggtggcgaaggggaggcgggggcccgaaggcttcggaaaacgatgggggagggggcagaggatacccgtcgaagcccccccctcccccaacatttcgatattggaatcactttccttcttcctcgggccagcctttgctctgtcccctcaggtcaactcaaggtagacagtgtggcgactggagaggtcggggaacaagctttgtttcagctaaggggaaaacaagcgttcacaggagtcccctgacacctcccactcggaagatagctaacgggggtcctgccaacccttcccatccaacttccatctgaaaaggattttctgctaaagttgggtccatggccatccagcacctgtaaggccggcaggagcgtctgccctctactcagttaaagcctgaagtcgtttcctttcgatggcccttaggaggcccaaaagaggggcgacagaacatgatgttgacacgggctgggcgcccccagaagcccgggaacaaacgtttctactttccaggtccactggtgtttggtgtacccatgtgactaatttgtccaaagagagaaactaggaatattccagttggtgactgaccccttagttgggttcctagagtgagtttgatgtggaggagcccaaaatgacctgcagtgaagttggagtgtgagcaagaaataaacttttgttttttaattttctgaggttttggaagttgtagattataactgcataacctatcaatattgatatgtttcaattcttaatgaaaatttctaatattctttttgattatttctaacttattaacttaaaatgtcaaatatctataatttcagtatattctgtatcctacatttaaaaataaaaaatagaatgttgaaaatgaaatcatttcaatgagatgacaactcaaaatcttatagtatcatccagaaacatgtagaacagatttaaaaatacacagtactgagattggcaggttgagaagaagacacatatgaagggtaacttctttggaaagaagcagctatgcacagtacttaagaatgaaatttccatgtcccgttaatacatctgaaacagttttactttctatcccaaactttaatgatcctagaaagctggtttgaatcagtttttacagggttgttttggatttaaaataactaaaacttgagagctgggagaaattttatttaacacttttttatcattcatggtttaatgtttaatgaataaattcttcactaagcttatgtggtgagggtctggtggtgaaaagtactttttcaactagatatattagaatgacaacagcaaagcaagaatgtggtagggtcacataaaggagtcgtgatctgtgggaaattattttttatgattctccaagatggctgtacatataagcataaaagtcaataaacaagtgcctaacctttagctctaaattaacttttgagcgctttgaatgcctggcacaaaaatatttaggggtttggcgccatctggtggccaaatatcaacttttcagcttctcttttatgactaagaagtgaattactctgcactttccaataaacactattaataaataaaattatttaaaatgttgatttccagaacttgagaagacaaatcaaagacagatttctgttatgttacctattgttatatgacagaatttcagtcttgagtaggttcttttatacttgcatttgatttatttatgaaagcattatagacataaatctgctatctttttcttaatacaagagaagactctttccccaaaagaaattagacgtgctcaataaaatctaaatttattttttcacaattctgtaaaagattgagctaggggtgcgtgtgtgtgtgtgaatatcagaatttattttaaaaatgcaagagggagaggggaaggagctggtagtgacattgttaattgtctgctttgcaatagcaaagacttggaaccaacccaaatgtccatcaatgatagactggattaagaaaatatggcacatatacaccatggaatactatacagccataaaaaaggatgagttcatgtcttttgtagggacatggatgaagccggaaaccatcattctgagaaaactatcgcaaggacagaaaaccaaacactacatgctctcactcataggtgggaattgaacaatgagaacacttggacacagggtggggaacatcacacaccggggcctgtcgtggggtgggggaaggtgggagggatagcattaggagatacacctaatgtaaatgatgagttaatgggtgcagcacaccaacatgtgctgttgtacacgtgtacacatgtatacatatgtaacaaacctgcacgttgtacacatgtaccctagaacttaaagtataataataataaaaaaaaattgtctgctttgt

SEQ ID NO: 11395 - protein, 50 aa, Homo sapiens
MALRRPKRGATEHDVDTGWAPPEAREQTFLLSRSTGVWCTHVTNLSKERN

SEQ ID NO: 11396 - DNA, 960 bp, Homo sapiens
tttacacgccccagccggcgaccggttccatctggctcgggccactctgacacctttagtttcggcaagggatattggggtggcgaaggggaggcgggggcccgaaggcttcggaaaacgatgggggagggggcagaggatacccgtcgaagcccccccctcccccaacatttcgatattggaatcactttccttcttcctcgggccagcctttgctctgtcccctcaggtcaactcaaggtagacagtgtggcgactggagaggtcggggaacaagctttgtttcagctaaggggaaaacaagcgttcacaggagtcccctgacacctcccactcggaagatagctaacgggggtcctgccaacccttcccatccaacttccatctgaaaaggattttctgctaaagttgggtccatggccatccagcacctgtaaggccggcaggagcgtctgccctctactcagttaaagcctgaagtcgtttcctttcgatggcccttaggaggcccaaaagaggggcgacagaacatgatgttgacacgggctgggcgcccccagaagcccgggaacaaacgtttctactttccaggtccactggtgtttggtgtacccatgtgactaatttgtccaaagagagaaactaggaatattccagttggtgactgaccccttagttgggttcctagagtgagtttgatgtggaggagcccaaaatgacctgcagtgaagttggagtgtgagcaagaaataaacttttgttttttaattttctgaggttttggaagttgtagattataactgcataacctatcaatattgatatgtttcaattcttaatgaaaatttctaatattctttttgattatttctaacttattaacttaaaatgtcaaatatctataatttcagtatattctgtatcctacatttaaaaataaaaaatagaatgttgaaaatg

SEQ ID NO: 11397 - protein, 50 aa, Homo sapiens; identical to SEQ ID NO: 11395

SEQ ID NO: 11398 - DNA, 741 bp, Homo sapiens
ctctgacacctttagtttcggcaagggatattggggtggcgaaggggaggcgggggcccgaaggcttcggaaaacgatgggggagggggcagaggatacccgtcgaagcccccccctcccccaacatttcgatattggaatcactttccttcttcctcgggccagcctttgctctgtcccctcaggtcaactcaaggtagacagtgtggcgactggagaggtcggggaacaagctttgtttcagctaaggggaaaacaagcgttcacaggagtcccctgacacctcccactcggaagatagctaacgggggtcctgccaacccttcccatccaacttccatctgaaaaggattttctgctaaagttgggtccatggccatccagcacctgtaaggccggcaggagcgtctgccctctactcagttaaagcctgaagtcgtttcctttcgatggcccttaggaggcccaaaagaggggcgacagaacatgatgttgacacgggctgggcgcccccagaagcccgggaacaaacgtttctactttccaggtccactggtgtttggtgtacccatgtgactaatttgtccaaagagagatttacctcagaagacacctgtataaaaggaagaggtccctatgaagtggtgatggtccatgaggaagaggcctggaaatctaagcagggcttccagctccctgcttcctgtctaagtccaggtacttaccccacctataggtgag

SEQ ID NO: 11399 - protein, 96 aa, Homo sapiens
MALRRPKRGATEHDVDTGWAPPEAREQTFLLSRSTGVWCTHVTNLSKERFTSEDTCIKGRGPYEVVMVHEEEAWKSKQGFQLPASCLSPGTYPTYR

SEQ ID NO: 11400 - DNA, 702 bp, Homo sapiens
gcttggaagtctacagtggaagagtgagggaactttggtcagctgcttttcctctcctcagctctcctccctcatcggtttctgcttttggcctcttcaaagctgcaagagggaaggagaaaaggtcagaaagggttctttgtttgaaatcatctcctttccagcaaagactgctttaactagcataatatatgcttcatatgcagcactaatttatttggcagtctgtgttaatgctgtgctgaagaaggtaaagaacatcttccaggaagaagaatccataaggcaaaacagagaggagagtgaaaattgtagaaaagccttttctgagcctgtgctttcggagcctatgtttgctgaaggtgaaatcaaagcaaaaccttataggtcattgccggagaagccagacatttcagattaccccaagcttcttgctaataagcagagtaataacatccaagttttacattctgtgtttgaccaatcagctgaaatgaatgagcaaatctgaatacaggtatcactgaacagaacttaagagttatctatttaatggcacatttcatctgacaaaactcagagtctagtttacatattctgaattgctctgctttcttaaaaaaaagagaagggggctactattaaaatgtcattttctagtatttacatgatagagtaaataaaatgaatattgatgtggaa

SEQ ID NO: 11401 - protein, 53 aa, Homo sapiens [sequence omitted]

SEQ ID NO: 11402 - DNA, 688 bp, Homo sapiens
ggggccttctatcttcctaagagtgttctctgacagggctgttccctgcccagtgaaacaaaggaccaaagattttctcaaaaatgtttaaaaatttgacccatgtaacgcggacactccacactcacggaagtgggcagaagggggagggggaaaaaaaaggaaagaaaagcttcttcagcctcagcgcggagcagctgctcttccttacccagacgggacagtcgtggaccaccagcttgacattcccaaacgcactggcctgatactcggtgaacaccggacgcgcgaccgtgctggccgcgttcagcaacaagctgctctcgtccccggagaccagagggcttctccccaggttcagccatttaggaaagattggtgacctatctgcatgatggcattaactacaaggatcatcgaagagccacagtcacaaagccagtctctgaatatggttcaaagaaatcttataactctctgaacaggacgtgtattcgtcaacactacttggagggccggtacttccaaggaagtcacctttgcagtcgatctatgtgcactgttctcagagccagctcgcacccatgaagaacaacacaacttaccggtcataggagcagaaagtgtcaaccttgcagcaggatttggacactctgggagccaaactggatgtggaagctccaaaggt

SEQ ID NO: 11403 - protein, 60 aa, Homo sapiens [sequence omitted]

SEQ ID NO: 11404 - DNA, 1826 bp, Homo sapiens
gcattgactaaacctaactagaagccagaggccaaaggaatctgtcgatatacaagctagcttcccagtggatggagcaggatggagaagaggaagaacgggcctggagggacaaacaaagggttaaaagaaaaggtccatccacatcgtggcgctggggaacgagggggacacattccaccaggacaaccggccgtcggggcttatccgcacttacctggggagaagccctctggtctccggggacgagagcagcttgttgctgaacgcggccagcacggtcgcgcgtccggtgttcaccgagtatcaggccagtgcgtttgggaatgtcaagctggtggtccacgactgtcccgtctgggacatatttgacagtgattggtacacttctcgaaatctaattgggggcgctgacatcattgtgatcaaatacaacgttaatgacaagttttcattccatgaagtaaaggataattatattccagtgataaaaagagcattaaattcagttccagtaattattgctgctgttggtaccagacaaaatgaagagttaccttgtacatgcccactatgtacctcagacagagggagctgtgttagtacaactgaagggatccaacttgcaaaagaactaggagcgacctatcttgaactccacagccttgatgacttctacataggaaagtattttggaggagtgttggagtattttatgattcaagccttaaatcagaagacaagtgaaaaaatgaagaaaagaaaaatgagcaactcctttcatggaattagaccacctcaacttgaacaaccagaaaaaatgcctgtcttaaaggctgaagcgtcacattataactctgacttaaataacttgctgttctgctgccagtgtgtggacgtggtattttacaaccccaatttaaagaaagttgtagaggcccacaagatcgttctctgcgctgtaagccatgttttcatgctgcttttcaatgtgaagagtcccactgacattcaggattccagtatcatccgaactacccaggatctttttgctataaacagagatactgcatttccaggtgctagccatgaatcttcaggcaacccaccattacgagtcattgttaaagacgccctcttctgttcttgtttatcagacatccttcgcttcatttattcaggtatcttgtcaagtggttctggttacttacaatctcataagctttggaaatgaaatgtgcctgtgacactcaagggtactggttagttttacagtggtctttacctaccatctgagattaagattatacatgaaatattatttgctttatatataagaattggtccaagctttctgttttccttacaaatgtacttgcctcatcttttccctatcaatttcattttattgtggtaaaatacatagaacataaattttaccatcttaaccatttttaagaacacagttcagtggaattaaacacattcataatgttgtgtaactatcaccaccatccgtgtccataattctttgcatcttataaaactgaaactctatacccattaaacgatgattccccattccgacctctttccagcccctgacagccaccattctactttctgtctctgtgattttaactctcctaagtgcctcatgtaagtggaatcatacagtatttgtcattttgtgattgatgtattttacttagcataatgtcttaaaggttcatccaagttgtggcatgtatcaggattttcttccttttaaggttgataatattctgtagtacatatagaccacattttgtttacccattcattca

SEQ ID NO: 11405 - protein, 172 aa, Homo sapiens
MIQALNQKTSEKMKKRKMSNSFHGIRPPQLEQPEKMPVLKAEASHYNSDLNNLLFCCQCVDVVFYNPNLKKVVEAHKIVLCAVSHVFMLLFNVKSPTDIQDSSIIRTTQDLFAINRDTAFPGASHESSGNPPLRVIVKDALFCSCLSDILRFIYSGILSSGSGYLQSHKLWK

SEQ ID NO: 11406 - DNA, 1540 bp, Homo sapiens
cctggctctggttacggccttgcgagttgaacaaacttgctgcaggcggattggcggctgggagctctcgggctggggcgttgtatttattaatttatattccgcggcgccccgcgcgggcggctcctttgtgtccagccgccgccaccggagctcccggggcctccgcggggagcgcgtcccccgcatccgcccgacccccggggctggcacgtgctgcgcccggtccgctgagggggcggaggccccgatctccccgaccccccttctctgcttagaggaggaggagcagcggcagcggcagcaggaggcgacagctgccagccgaggaggcgcggcggagaggggactgcggtcagctgcgtccacttggggctgtgcggcggtcccgcgcccggcgatgttcccgggcactccctgagtagcggcagcttatcccccgcccgctagcccgccctggtccccggctcgctcgctggctggcgcggccccggccccgctctgcgtcggccccgccgcggtggaggcgcgcgagggggacgcggccggggatgagcggattgcgggtgaactcgccgcccgggggccccgcgaagccgtgagccgctgcttttctccgagtcgccgccctgcccttggatttgagatcatgtccatccacatcgtggcgctggggaacgagggggacacattccaccaggacaaccggccgtcggggcttatccgcacttacctggggagaagccctctggtctccggggacgagagcagcttgttgctgaacgcggccagcacggtcgcgcgtccggtgttcaccgagtatcaggccagtgcgtttgggaatgtcaagctggtggtccacgactgtcccgtctgggtaaggaagagcagctgctccgcgctgaggctgaagaagcttttctttccttttttttccccctcccccttctgcccacttccgtgagtgtggagtgtccgcgttacatgggtcaaatttttaaacatttttgagaaaatctttggtcctttgtttcactgggcagggaacagccctgtcagagaacactcttaggaagatagaaggccccagtgggaatgtggagcacttactggtacacttcacgactgtgggttgacccttggtaggcagcagacagttgaatgtgccaactccaagggacggggtcactaagtttcatcagcaaaaagcagtgtttttttatgtctaccctatgggtgatagtgtaatattggtgttctaaaaatacatccctctcaaagctcaacacaggcaaaaatacttttcactgggacagttcagaaatagttcctctggaaagcggaggaaaagacagggactgggagttaattttaaatgactcatttatagcactattaattgatctctgaaaacttaattttaataatgcaaatactctttatgtgttagccatttgtcttagtgactcataaatcagaaataacattactaatgttgtttggaaaacttttaaaaaattaaaatttgtaataattgaac

SEQ ID NO: 11407 - protein, 104 aa, Homo sapiens
MSIHIVALGNEGDTFHQDNRPSGLIRTYLGRSPLVSGDESSLLLNAASTVARPVFTEYQASAFGNVKLVVHDCPVWVRKSSCSALRLKKLFFPFFSPSPFCPLP

SEQ ID NO: 11408 - DNA, 5678 bp, Homo sapiens
cctggctctggttacggccttgcgagttgaacaaacttgctgcaggcggattggcggctgggagctctcgggctggggcgttgtatttattaatttatattccgcggcgccccgcgcgggcggctcctttgtgtccagccgccgccaccggagctcccggggcctccgcggggagcgcgtcccccgcatccgcccgacccccggggctggcacgtgctgcgcccggtccgctgagggggcggaggccccgatctccccgaccccccttctctgcttagaggaggaggagcagcggcagcggcagcaggaggcgacagctgccagccgaggaggcgcggcggagaggggactgcggtcagctgcgtccacttggggctgtgcggcggtcccgcgcccggcgatgttcccgggcactccctgagtagcggcagcttatcccccgcccgctagcccgccctggtccccggctcgctcgctggctggcgcggccccggccccgctctgcgtcggccccgccgcggtggaggcgcgcgagggggacgcggccggggatgagcggattgcgggtgaactcgccgcccgggggccccgcgaagccgtgagccgctgcttttctccgagtcgccgccctgcccttggatttgagatcatgtccatccacatcgtggcgctggggaacgagggggacacattccaccaggacaaccggccgtcggggcttatccgcacttacctggggagaagccctctggtctccggggacgagagcagcttgttgctgaacgcggccagcacggtcgcgcgtccggtgttcaccgagtatcaggccagtgcgtttgggaatgtcaagctggtggtccacgactgtcccgtctgggacatatttgacagtgattggtacacttctcgaaatctaattgggggcgctgacatcattgtgatcaaatacaacgttaatgacaagttttcattccatgaagtaaaggataattatattccagtgataaaaagagcattaaattcagttccagtaattattgctgctgttggtaccagacaaaatgaagagttaccttgtacatgcccactatgtacctcagacagagggagctgtgttagtacaactgaagggatccaacttgcaaaagaactaggagcgacctatcttgaactccacagccttgatgacttctacataggaaagtattttggaggagtgttggagtattttatgattcaagccttaaatcagaagacaagtgaaaaaatgaagaaaagaaaaatgagcaactcctttcatggaattagaccacctcaacttgaacaaccagaaaaaatgcctgtcttaaaggctgaagcgtcacattataactctgacttaaataacttgctgttctgctgccagtgtgtggacgtggtattttacaaccccaatttaaagaaagttgtagaggcccacaagatcgttctctgcgctgtaagccatgttttcatgctgcttttcaatgtgaagagtcccactgacattcaggattccagtatcatccgaactacccaggatctttttgctataaacagagatactgcatttccaggtgctagccatgaatcttcaggcaacccaccattacgagtcattgttaaagacgccctcttctgttcttgtttatcagacatccttcgcttcatttattcaggtgcttttcagtgggaagaattggaagaagatatcaggaagaagttgaaagattctggggatgtttcaaatgtaatcgagaaagttaaatgcattttaaaaacaccaggaaagattaattgcctaaggaattgcaaaacctatcaagccagaaaacctttgtggttttataacacttccctcaagtttttccttaataagccgatgcttgccgatgttgtcttcgaaattcaaggtacgacagtgccagcccacagggccatcctggtggcccgttgtgaagtgatggcagccatgtttaatggtaattacatggaagcaaagagtgtcctgattcccgtttatggtgtttccaaagagactttcttgtcatttttagaatacctgtacacagactcctgctgcccagctggcatattccaggccatgtgtctcctgatctgtgccgagatgtaccaagtgtccagactgcagcacatctgtgagctgttcatcattacccagctgcagagcatgccaagcagggaactggcatccatgaaccttgatatagttgacctgcttaaaaaggccaagtttcaccactctgattgcctttcaacctggctacttcatttcattgctactaactacctcatcttcagtcaaaagcctgaatttcaggatctttcagtggaagaacgcagttttgttgaaaagcacagatggccgtcgaatatgtacttgaagcagcttgcggaatacaggaagtatattcactcccggaaatgtcgttgcttagtaatgtaacctggagcttttatacactacatttcttttttattattatgaagaatgggatacctccaggttccagtaaaattcttctgaccgaaaccaatgtgggtgttagaaaaattaccatatagcttaatatgtttattagttctctttggaaaaaaactaccactgtggtcttaaaagggaacaaaatataccataggctaaaactaaggctttcactctagaatgcaaagctgttttgcagctgttttcccttaaagatgtcctgttgctttagtgatatttagacccctctcagttaagaaatgcttagattaaaaaaaaaaaattacgtaggattaatacagaaatttaatcatgtctgattaattgctctattaaaataaggggcatttaaagacccagcataaccatttgtataatgagaaatctaggggaaaaccaatcagtccaacatgagattttaggaatagaaatttgccggccatttggaaagtgaaatgccacttagttctcaattgatgacagtgtttgaatcatcataaaaaaaatacctgcttttcatctggacaacccaattgagccactttatctccttttggcaatctgagtaggcggggaacctaggcagggctggctttcttagcgtgtaacttgtgtagcagcacagggcccacacttagaaggaccccacacttggttcaaggctctgctatagcggaaattcttaataatgtttgaagaagggccccatgatttcattttgtgctgagccctcaaaattatgtctgtttcgtggtgggaaatatcctatgttttcttgctcaaacacctttctctctgaaagcagaaaaaggcactgatataaagggaagagaaggaggctcaccggagggaagagaacatagtgaagattcccgcctttggggaggtctggaccacccagggcctccactgccaccttggctggcaagggagaaatgtgttgtgttgtcttagctttaaaacagtcacagttcttgctctatcatagatgaacaaatactttcttgatcattctgtaagaccaggaggttggtaagagtgactaaccagcctaactttaatacacatgtataaagatgttcacagagaaagatgctctgtagagaatttgctaccgaagttggctcaagaatttgtttttagtgttatttaccaagattaggacgtcagtggcttaaattctttgaattcttttcaaggactgcaagattatttgataaagagtagcatgaatcttgtgctctaatattacacagtaagttcaaagaaaggatgtaagtcaaagacttgttacatagagggaaaatggactgggatagaggacagactgatagtttctttctttcatatcacatgtatagagaaataattatatcagaaactcacaaacctagacatggaaaaacagattactgtctattgtcagcatcattttcatctgtaagtcactactggaatatatttttcttttaatttccagtgactttagaatacacacagtttttccgacttttcaaaaatttgattaaatggttttatagtataatattgggaccccataccgttagcccttgtatgtataccaacactgccaaagtaaaacattaggtcaggcatggtggctcaggcctgtaatcccagcattttgggaggctgaggcaagtggataacttgaggtcatgagttcgaaaccagcctggccaaaacagtgaaaccccgtctctactaaaaatacaaaattagccagatgtggtggcgcacacctgtaatcccagctactcaggaagctgaggcaggaaaatcgcttgaacctgggaggtggaagttgcagtgagccgagatcgcaccactgcactccagcctgggtgacaagagcgaaactccatctcaaaaaaaaaaaaaaaaccaaagtgaaacactaaaaattccctatagatatattccaggaaatattttaattgggctgattttaattaggctgtatcattgatgattactggaatcgattttatgtcttttgtattttaatcacttgagttaatcaaccactggcaaatcccatttgacaaagattagcattgtaaaaaacagatactgtggtagatttctagaaattcattcacatttaagacttctaaaatggaataatagccttttgtttttcatgagcatattcgcacccctatatgaattacagcatttaaagttcaaaatcagtaacttttaatctaggaaattgaaaaatattaagttgcaaagcaaaaaaaggtattttcttgaaaatactatttaatgtttaactagactataggtagttccttaaggttgtttgacctgaagtggagttgggtttggaagctggtgcccagttggtgtggagtgtgtagttttgttatgaaagttctctaccacctacctgtgtgagtgacaccaacatccagatgtcacagctctccagagctagtcagaagagaaatcaaattagtgtttaaacccatttgcatattgacttgtcagtacctttaactcaatttaatataacaagaaatcgtaaaatacttataacctatcttagagaaatgagtgctggttttgagagttgttttttaactgaaagattatttctagatgggtagtgctttgtgctggtttctgcttccatatatttcccagtcattttaattagagaagatactctatggtagaactaaggcctttcctttcttggccaaagtctttaccctatttaaccctttgtatatttctgactgctcactgttcatattataggggaccagatttgtaatatagaattctccataacatgaatgaaattaattctgtccaagccagcatggtggcttcatattaagtagtaacagaagtctgaacaattggataaatttgacttccaagacagctaaacttttcaactgcaattttaaaaactacactacactgttatagttaatctgacaaaaatgtcctcaaagagtactttattttatttaaagcatctgtttaattcaacctttaataattttgcaaagaagggtatgtgtgtattttaatatagcctgacctgaatttatatgtttttagctttagtatttaactttttgtaacaaataaaccttttttaaaacaagtttaa

SEQ ID NO: 11409 - protein, 611 aa, Homo sapiens
MSIHIVALGNEGDTFHQDNRPSGLIRTYLGRSPLVSGDESSLLLNAASTVARPVFTEYQASAFGNVKLVVHDCPVWDIFDSDWYTSRNLIGGADIIVIKYNVNDKFSFHEVKDNYIPVIKRALNSVPVIIAAVGTRQNEELPCTCPLCTSDRGSCVSTTEGIQLAKELGATYLELHSLDDFYIGKYFGGVLEYFMIQALNQKTSEKMKKRKMSNSFHGIRPPQLEQPEKMPVLKAEASHYNSDLNNLLFCCQCVDVVFYNPNLKKVVEAHKIVLCAVSHVFMLLFNVKSPTDIQDSSIIRTTQDLFAINRDTAFPGASHESSGNPPLRVIVKDALFCSCLSDILRFIYSGAFQWEELEEDIRKKLKDSGDVSNVIEKVKCILKTPGKINCLRNCKTYQARKPLWFYNTSLKFFLNKPMLADVVFEIQGTTVPAHRAILVARCEVMAAMFNGNYMEAKSVLIPVYGVSKETFLSFLEYLYTDSCCPAGIFQAMCLLICAEMYQVSRLQHICELFIITQLQSMPSRELASMNLDIVDLLKKAKFHHSDCLSTWLLHFIATNYLIFSQKPEFQDLSVEERSFVEKHRWPSNMYLKQLAEYRKYIHSRKCRCLVM

SEQ ID NO: 11410 - DNA, 754 bp, Homo sapiens
ctctcgtccccggagaccagagggcttctccccaggaagtgcgggggacagcgcgcggcgaggatgggcaccagcccctgtccctggggcgcacggcacgcgctggagagagacaatggcaggacggcggcgcgtacgtacatgatctcaaatccaagggcagggcggcgactcggagaaaagcagcggctcacggcttcgcggggcccccgggcggcgagttcacccgcaatccgctcatccccggccgcgtccccctcgcgcgcctccaccgcggcggggccgacgcagagcggggccggggccgcgccagccagcgagcgagccggggaccagggcgggctagcgggcgggggataagctgccgctactcagggagtgcccgggaacatcgccgggcgcgggaccgccgcacagccccaagtggacgcagctgaccgcagtcccctctccgccgcgcctcctcggctggcagctgtcgcctcctgctgccgctgccgctgctcctcctcctctaagcagagaaggggggtcggggagatcggggcctccgccccctcagcggaccgggcgcagcacgtgccagccccgggggtcgggcggatgcgggggacgcgctccccgcggaggccccgggagctccggtggcggcggctggacacaaaggagccgcccgcgcggggcgccgcggaatataaattaataaatacaacgccccagcccgagagctcccagccgccaatccgcctgcagc

SEQ ID NO: 11411 - protein, 98 aa, Homo sapiens
MGTSPCPWGARHALERDNGRTAARTYMISNPRAGRRLGEKQRLTASRGPRAASSPAIRSSPAASPSRASTAAGPTQSGAGAAPASERAGDQGGLAGGG

SEQ ID NO: 11412 - DNA, 415 bp, Homo sapiens
tatcactatgttgctcaagctagactcaaactcctggactcaagggatcctcccgcctcagccttccaagtcactgggattataagtgcatgccatcccacgcagctactctcttgaatactcgagaaagccaagcactacaattgtgtggctgcttcccaggtattttaggaaatgcaccattcttcgccaaattaagatttttttaaaagccactagtatataatctgcttgaaaggaagattaaatttctcttatccacctttctactcactgctcatcactataaatgaatgcaacaaaagtttctcacagtcatcgataatatcaatattgtgagtatatcttctttaacattgtaatattaatgtttctttatattattgggtgaataaaagccatttatatttgatgg

SEQ ID NO: 11413 - protein, 39 aa, Homo sapiens [sequence omitted]

SEQ ID NO: 11414 - DNA, 2106 bp, Homo sapiens
ctcaataccccaagcaatacctgcaactgaggattcttcccggggagaccgcagcccatcggcatggctcaagagtttgtgaactgcaaaatccagcctgggaaggtggttgtgttcatcaagcccacctgcccgtactgcaggagggcccaagagatcctcagtcaattgcccatcaaacaagggcttctggaatttgtcgatatcacagccaccaaccacactaacgagattcaagattatttgcaacagctcacgggagcaagaacggtgagtttcattttaaacggctagggaaaggctcccggattgccttttcttgtcagagctgtgcctttctttaggataaggctgcggctccgtacttcaaggcgtccagagggctgtgcggggcggggggtgtgggggagggcgccttagagaggatctcggtcacttgaatgagcggcggcactgcagccaaaggtcttcacggggcagaagagggagtacagctgatgtctgctgtgcggcagggtgcctcgagtctttattggtaaagattgtataggcggatgcagtgatctagtctctttgcaacagagtggggaactgctgacgcggctaaagcagattggagctctgcagtaaccacagtggagtctcactctgtcgtccaggctggaatgcagtggtgcgatcttggctcactgcaagctcctcctcctgggttcacgccattctcctgcctcagcctcctgaggagctgggagcacaggcgcccaccaccacgcccggctaattttttttgtattttttgtaaagacggggtttcaccgtgttagccaggatggtctcgatctcctgaccttgtgatccacctgcctcggccttccaaagtgctgggattacaggcatgagccgccacatccggcccattttaaccacttttaagtatatgattcattggcatgaagtacattcacactgctgtgcagtcatcaccaccaccatctccagaacatgtttcttcttcccaaactgaaactctgtacccaataaacactaactccctgtttccccctttccccagcccctggcaaccacccaatttggctgggggttttttcaatacttccctagaaatctggtttttcatgtaattctcgttcttatccctccttacattcttacattcttttgtagctatggaaccaagaacactgtgtatggtgaatatttaacataataacattacctgtcttctgtgatcttcccaatgcacagattccagtatctggcttaactttttgattattcattttgactcatttttccctaacacacttttgccaatttttaaaaatcctatcattattactgctttcctctgtaatattttctaattagcaaggtaaaacttaatattagcagcttcaattacttgagtgagaggatgactgaaaatcaaattttcctattactccaaatctggtcaatttgtaaatttaatatacagatttgccaacaatgaaataataaacaataagctttatttccaaaaagaacaaatgctttcatttttattaggcaaaaatactaagtctttttttgagacggagtctcactcggtcacccaagcttgagtgtggtggcgccatcttggctcactgcaacctctgcctcacaggttcaagcgattctcctgcctctgcctcccgtgtagctgggattacaggcacacgtcaccatgcccagctaatttttgtatttttagtagagacggggtttcaccatgttggtcaggctgtttttgaactgacttcaggtgatctgctcacctcagccttccaaagtgctcagattacaggcatgagctacggcacctggccgtaagtcagtctttaacactgacagaaacaactgcaactggctccaaaatactctacagaaagctgcaagcccagaattaatttaatcaacacaaatacatttgcttctttttgaacttctaaaatctttcactagagggctcatgacttgtttaaaacttatttcaatacccagtgtaagaaacctttccattctaaaaattaaagcagtgaatctgaagagaggtctggcttg

SEQ ID NO: 11415 - protein, 32 aa, Homo sapiens
MSGGTAAKGLHGAEEGVQLMSAVRQGASSLYW

SEQ ID NO: 11416 - DNA, 377 bp, Homo sapiens
catgtgtctcctgatctgtgccgagatgtaccaagtgtccagactgcagcacatctgtgagctgttctcccttttccctgcttggcagccagaaccctgaggatgaggcccaacccccagctgtgaagctggagagactgaatggctcaaaagaaaaggtgtccaggaaccaataattgggggatctcccagtgaggcaaccagatctgtacctgttcatttattctttaatttgttcactcaagaaagagcctactatctgccaagcagtcttgatgctgcagatacagcggtaaatagacaccaatccctgacctcaaggcacttatattctaatagtgaagagacagtaaactaaataaatcataccatatatt

SEQ ID NO: 11417 - protein, 32 aa, Homo sapiens
MCLLICAEMYQVSRLQHICELFSLFPAWQPEP

SEQ ID NO: 11418 - DNA, 2572 bp, Homo sapiens
ttgatgacagtgtttgaatcatcataaaaaaaatacctgcttttcatctggacaacccaattgagccactttatctccttttggcaatctgagtaggcggggaacctaggcagggctggctttcttagcgtgtaacttgtgtagcagcacagggcccacacttagaaggaccccacacttggttcaaggctctgctatagcggaaattcttaataatgtttgaagaagggccccatgatttcattttgtgctgagccctcaaaattatgtctgtttcgtggtgggaaatatcctatgttttcttgctcaaacacctttctctctgaaagcagaaaaaggcactgatataaagggaagagaaggaggctcaccggagggaagagaacatagtgaagattcccgcctttggggaggtctggaccacccagggcctccactgccaccttggctggcaagggagaaatgtgttgtgttgtcttagctttaaaacagtcacagttcttgctctatcatagatgaacaaatactttcttgatcattctgtaagaccaggaggttggtaagagtgactaaccagcctaactttaatacacatgtataaagatgttcacagagaaagatgctctgtagagaatttgctaccgaagttggctcaagaatttgtttttagtgttatttaccaagattaggacgtcagtggcttaaattctttgaattcttttcaaggactgcaagattatttgataaagagtagcatgaatcttgtgctctaatattacacagtaagttcaaagaaaggatgtaagtcaaagacttgttacatagagggaaaatggactgggatagaggacagactgatagtttctttctttcatatcacatgtatagagaaataattatatcagaaactcacaaacctagacatggaaaaacagattactgtctattgtcagcatcattttcatctgtaagtcactactggaatatatttttcttttaatttccagtgactttagaatacacacagtttttccgacttttcaaaaatttgattaaatggttttatagtataatattgggaccccataccgttagcccttgtatgtataccaacactgccaaaacagtgaaaccccgtctctactaaaaatacaaaattagccagatgtggtggcgcacacctgtaatcccagctactcaggaagctgaggcaggaaaatcgcttgaacctgggaggtggaagttgcagtgagccgagatcgcaccactgcactccagcctgggtgacaagagcgaaactccatctcaaaaaaaaaaaaaaaaccaaagtgaaacactaaaaattccctatagatatattccaggaaatattttaattgggctgattttaattaggctgtatcattgatgattactggaatcgattttatgtcttttgtattttaatcacttgagttaatcaaccactggcaaatcccatttgacaaagattagcattgtaaaaaacagatactgtggtagatttctagaaattcattcacatttaagacttctaaaatggaataatagccttttgtttttcatgagcatattcgcacccctatatgaattacagcatttaaagttcaaaatcagtaacttttaatctaggaaattgaaaaatattaagttgcaaagcaaaaaaaggtattttcttgaaaatactatttaatgtttaactagactataggtagttccttaaggttgtttgacctgaagtggagttgggtttggaagctggtgcccagttggtgtggagtgtgtagttttgttatgaaagttctctaccacctacctgtgtgagtgacaccaacatccagatgtcacagctctccagagctagtcagaagagaaatcaaattagtgtttaaacccatttgcatattgacttgtcagtacctttaactcaatttaatataacaagaaatcgtaaaatacttataacctatcttagagaaatgagtgctggttttgagagttgttttttaactgaaagattatttctagatgggtagtgctttgtgctggtttctgcttccatatatttcccagtcattttaattagagaagatactctatggtagaactaaggcctttcctttcttggccaaagtctttaccctatttaaccctttgtatatttctgactgctcactgttcatattataggggaccagatttgtaatatagaattctccataacatgaatgaaattaattctgtccaagccagcatggtggcttcatattaagtagtaacagaagtctgaacaattggataaatttgacttccaagacagctaaacttttcaactgcaattttaaaaactacactacactgttatagttaatctgacaaaaatgtcctcaaagagtactttattttatttaaagcatctgtttaattcaacctttaataattttgcaaagaagggtatgtgtgtattttaatatagcctgacctgaatttatatgtttttagctttagtatttaactttttgtaacaaataaaccttttttaaaacaagtttaa

SEQ ID NO: 11419 - protein, 55 aa, Homo sapiens [sequence omitted]

SEQ ID NO: 11420 - DNA, 2089 bp, Homo sapiens
ctttcttgatcattctgtaagaccaggaggttggtaagagtgactaaccagcctaactttaatacacatgtataaagatgttcacagagaaagatgctctgtagagaatttgctaccgaagttggctcaagaatttgtttttagtgttatttaccaagattaggacgtcagtggcttaaattctttgaattcttttcaaggactgcaagattatttgataaagagtagcatgaatcttgtgctctaatattacacagtaagttcaaagaaaggatgtaagtcaaagacttgttacatagagggaaaatggactgggatagaggacagactgatagtttctttctttcatatcacatgtatagagaaataattatatcagaaactcacaaacctagacatggaaaaacagattactgtctattgtcagcatcattttcatctgtaagtcactactggaatatatttttcttttaatttccagtgactttagaatacacacagtttttccgacttttcaaaaatttgattaaatggttttatagtataatattgggaccccataccgttagcccttgtatgtataccaacactgccaaagtaaaacattaggtcaggcatggtggctcaggcctgtaatcccagcattttgggaggctgaggcaagtggataacttgaggtcatgagttcgaaaccagcctggccaaaacagtgaaaccccgtctctactaaaaatacaaaattagccagatgtggtggcgcacacctgtaatcccagctactcaggaagctgaggcaggaaaatcgcttgaacctgggaggtggaagttgcagtgagccgagatcgcaccactgcactccagcctgggtgacaagagcgaaactccatctcaaaaaaaaaaaaaaaaccaaagtgaaacactaaaaattccctatagatatattccaggaaatattttaattgggctgattttaattaggctgtatcattgatgattactggaatcgattttatgtcttttgtattttaatcacttgagttaatcaaccactggcaaatcccatttgacaaagattagcattgtaaaaaacagatactgtggtagatttctagaaattcattcacatttaagacttctaaaatggaataatagccttttgtttttcatgagcatattcgcacccctatatgaattacagcatttaaagttcaaaatcagtaacttttaatctaggaaattgaaaaatattaagttgcaaagttgtttgacctgaagtggagttgggtttggaagctggtgcccagttggtgtggagtgtgtagttttgttatgaaagttctctaccacctacctgtgtgagtgacaccaacatccagatgtcacagctctccagagctagtcagaagagaaatcaaattagtgtttaaacccatttgcatattgacttgtcagtacctttaactcaatttaatataacaagaaatcgtaaaatacttataacctatcttagagaaatgagtgctggttttgagagttgttttttaactgaaagattatttctagatgggtagtgctttgtgctggtttctgcttccatatatttcccagtcattttaattagagaagatactctatggtagaactaaggcctttcctttcttggccaaagtctttaccctatttaaccctttgtatatttctgactgctcactgttcatattataggggaccagatttgtaatatagaattctccataacatgaatgaaattaattctgtccaagccagcatggtggcttcatattaagtagtaacagaagtctgaacaattggataaatttgacttccaagacagctaaacttttcaactgcaattttaaaaactacactacactgttatagttaatctgacaaaaatgtcctcaaagagtactttattttatttaaagcatctgtttaattcaacctttaataattttgcaaagaagggtatgtgtgtattttaatatagcctgacctgaatttatatgtttttagctttagtatttaactttttgtaacaaataaaccttttttaaaacaagtttaa

SEQ ID NO: 11421 - protein, 55 aa, Homo sapiens [sequence omitted]

SEQ ID NO: 11422 - DNA, 629 bp, Homo sapiens
tttgcaacagagtggggaactgctgacgcggctaaagcagattggagctctgcagtaaccacagatctcataggaaatgttcaacaattctgtgaaaggtcacaggacccaattggagaaatcatatgaaaagcatagttggtcttggtgtcatatggatcagaggcacaagtgcagaggctgtggtcatgcggaacactctgttatttaagatggctatccagataatcctgaacactgtgtatttattttatttagactaccagcaaagattaaagcatgaaatgtaaaacatctgataaaacttacagccccctacaccaagagtgtatctgtgaaagagctcctacactttgaaaacttaagaatcccttatcatgaagtttgcctgttctagaattgtaagattgttaatttccttcaatctctagtgacaacacttaatttcttttctaataaaaaaaacctatagatgattcagtgatttttgtccaattcatttgcatgttctcaagacattaaggaatgttatgcgaaatacactaacttaaaactgtgtttatatttggccctgccattataaataaagacacgtgctgctgtcactcactgagtacaaatggctgata

SEQ ID NO: 11423 - protein, 54 aa, Homo sapiens
MKSIVGLGVIWIRGTSAEAVVMRNTLLFKMAIQIILNTVYLFYLDYQQRLKHEM

SEQ ID NO: 11424 - DNA, 3731 bp, Homo sapiens
ccgcctcagcctcccaaagtgctgggattacaggcgtgagccacggcgcccggcctgatcctgcagtcttaattattctataaagtagctgtatctagtaggtaatcagcaggacatgattatggaaagttagtggcttcaatcaagccatgtacttggtaaaacctgtttttgttttgctatagtcacagctcctaaattagtgccttcatttatttctcctctaatgcacttttctttacatagatctgagtttctgaactatatcatttcccttctctctgaagaacttctttgggcatttcttgcaaggtgattccattggtaacacattccctcaagttttgtttaccttagaaagtatttctccttcgcatttgaatgatgattttactggatgcaacaaatatttttaagcacctactatgtaccagacacttttatgtacattggggaaaaaattctgccttttctgccatgaaaaaaacccttctgcctttgttgaacctatattctagtgggggagacaaacaaatacagtaataaaacagtatgttgggagttggtaagtggcacgtgctatgaggaaaagtaggaaaggtagggaggaagcatcagggtccagttttaaatggagccattgggtctcactgagaagggaacattcgagcagatatctataggagctgagggagatgggtgtacacaatttacaggtagagtgaatgcaaaggtcctggggtagacgtttgcctggcaggtttgtggaatagtaaggaagccagtatagttgcagcactgtgagccagtaggagagttagtggaggtgaggtctgagagctaataggagcttggaagaactgtgactggtactcggtgtgagatgagatgcccctggtgggtgctgagcagacgagtcacttgatctgaccccattttgaaagggccactctggcagctgtggggagaagagacagtagggcaaaggtgaaggttgaagctgggagacattgggaggctatagtagttattcaggtgacagatgaaggtggcttataccagggaggtagccgaggagtgttgagaaattgcttttgagtagttgcatttgtgtaaccctagctagcgtacaggagatgttgcctggctgaggctggggaaacctagtgcaggagaataagaaccacaggattaccaaactcgttttggggtggcagttctttcctctccttgacagtagcggactctcaagttcctctaaagaggaggctgggacgggaagggacaggaggggaagcagcacagggtatttcctcttctttgctcaactttatcaacagtacttcttgctttggtttcactgccacagcacccccgtgccgtctgtacagcctgccattcagctcccgttaggggtaccattcactgatacgatttatggcagttttgcagttgtccagactagaggatgggtgtgagggtaaaggagcctttcgcttctttgccagacactgagcacaaaactccacgctgggagcagcctggtcacatttcagggtcatctcaggaggctggggggcagctccagggctgtgggttttcaaagcctcagttatcctgtgagagcacagggaatagccatggaaatgtgcaagatttgtttttaatttttagactttatttttaatgcctaccttcacccagaccccctttttaataaaagtgctgtaagaacttatccacaataatgaagccccttttctcacctttctcactttttggacaatttgctccaattattatgctttctgaggaaagcccaaagctttgaaaaatagtctcattgctttctgcctccacctctccctcccctccagtgcgttcctggtactcggggagaggcccgctggctctgatgacgcggtgacctccatggggcttttttcttcactgccaggcagccttggtggaacactcctggcctataaattcagccacgttgagggtatttcctcctccctcgcgattctaaaagccctctggaattctggaatgtgtctgctcctagcagcagggaggaagtgtgtaactagagaggagcctattcagcaggtgtcatgactgtggcttggcgtgggtgacgcaccctcatccggggtgagttaaccatcttatgatggaccagcgattaaaggagactcaaacaccactacacccccctggttgaggacagagctcacttgtgttgctttgttttgctttctttgttttgctctgtcgtccaggtgtgagtgcaatggcaccatcacagcttactgcagcctcgacctcccgggccaaagcaatccttccacttcagcctcctgagtagctgggactacaggcatgcaccgccatgcctggctaatttttgtattttttgtagagacggggtctcacgatgttacctaggctagtcttgaactcctgggctcaagcgaccctcccacctcagcctcacaaaagtagtaggattacattcatgagccactgtgcctggccctcacctgtgttttaacaacacagagagatgattgtacttaataaaccatggacctgaaaaatcagagacgtaatgcaaatacttttccagctgtatttagaaacgaactccttccttcctgattgctgtgacccagtttacaatcttaggtgtggtccctgatgcagagaaagcagagttcaatctaggtggtctgactgcagccaatcagaattctccttctgaaacatgtttctgtagagtgaaatttttaaatccctttgacaagttggacaagctcatgcatagcacacaacttgaaaactcttctggcgtaaaaacattctcgagttaataatgttaccccttataacagaaaggaagtcctgtcctgtgagcatatacataaggaggttttaaagtgatttgaaaagtttggaatcacgggaaatatttagtggtaggatagaaatgttctgtctaatctagtaatgtagtaatgtcctgggtcgtgtgcttttttaggtgcctcgagtctttattggtaaagattgtataggcggatgcagtgatctagtctctttgcaacagagtggggaactgctgacgcggctaaagcagattggagctctgcagtaaccacagatctcataggaaatgttcaacaattctgtgaaaggtcacaggacccaattggagaaatcatatgaaaagcatagttggtcttggtgtcatatggatcagaggcacaagtgcagaggctgtggtcatgcggaacactctgttatttaagatggctatccagataatcctgaacactgtgtatttattttatttagactaccagcaaagattaaagcatgaaatgtaaaacatctgataaaacttacagccccctacaccaagagtgtatctgtgaaagagctcctacactttgaaaacttaagaatcccttatcatgaagtttgcctgttctagaattgtaagattgttaatttccttcaatctctagtgacaacacttaatttcttttctaataaaaaaaacctatagatgattcagtgatttttgtccaattcatttgcatgttctcaagacattaaggaatgttatgcgaaatacactaacttaaaactgtgtttatatttggccctgccattataaataaagacacgtgctgctgtcactcactgagtacaaatggctgata

SEQ ID NO: 11425 - protein, 72 aa, Homo sapiens
MGVRVKEPFASLPDTEHKTPRWEQPGHISGSSQEAGGQLQGCGFSKPQLSCESTGNSHGNVQDLFLIFRLYF

SEQ ID NO: 11426 - DNA, 1769 bp, Homo sapiens
ctcaataccccaagcaatacctgcaactgaggattcttcccggggagaccgcagcccatcggcatggctcaagagtttgtgaactgcaaaatccagcctgggaaggtggttgtgttcatcaagcccacctgcccgtactgcaggagggcccaagagatcctcagtcaattgcccatcaaacaagggcttctggaatttgtcgatatcacagccaccaaccacactaacgagattcaagattatttgcaacagctcacgggagcaagaacggtgagtttcattttaaacggctagggaaaggctcccggattgccttttcttgtcagagctgtgcctttctttaggataaggctgcggctccgtacttcaaggcgtccagagggctgtgcggggcggggggtgtgggggagggcgccttagagaggatctcggtcacttgaatgagcggcggcactgcagccaaaggtcttcacggggcagaagagggagtacagctgatgtctgctgtgcggcagggtgcctcgagtctttattggtaaagattgtataggcggatgcagtgatctagtctctttgcaacagagtggggaactgctgacgcggctaaagcagattggagctctgcagtaaccacagaacaggccccatgctgacgtccctcctcaagagctggatggcattgcaaatgatgacagcacttctggtggatgaatttgggggcacaaacagcttttttcctcttttggctcagtatttaaaagtggaccaacttgctcttaatcacagggccaagaaggttgacgggccatcttggttttcttctggatgtgctctttggttttcagaagactgtgacaagttctggcccaggattcgctcactgaccctcaattgtcctctttggcatgcgtttcttactgttctccatgtgtcggcatgtctctacctctaagccagtgtttttcaactatgtttatccagactccttctccacaatgatgaatccacagttggttatctgctactgcccattagctaaaatcattttgctgcttgactttatggagtttgtattatgaaatcagtgggtattttgaatgtgttctttctaactacatgcatctctccactcaactccaccccatcccatcccaccttgaaaatcactgctctgaaccagtgttctccaccttgtcctccacagatctcataggaaatgttcaacaattctgtgaaaggtcacaggacccaattggagaaatcatatgaaaagcatagttggtcttggtgtcatatggatcagaggcacaagtgcagaggctgtggtcatgcggaacactctgttatttaagatggctatccagataatcctgaacactgtgtatttattttatttagactaccagcaaagattaaagcatgaaatgtaaaacatctgataaaacttacagccccctacaccaagagtgtatctgtgaaagagctcctacactttgaaaacttaagaatcccttatcatgaagtttgcctgttctagaattgtaagattgttaatttccttcaatctctagtgacaacacttaatttcttttctaataaaaaaaacctatagatgattcagtgatttttgtccaattcatttgcatgttctcaagacattaaggaatgttatgcgaaatacactaacttaaaactgtgtttatatttggccctgccattataaataaagacacgtgctgctgtcactcactgagtacaaatggctgata

SEQ ID NO: 11427 - protein, 32 aa, Homo sapiens; identical to SEQ ID NO: 11415

SEQ ID NO: 11428 - DNA, 1201 bp, Homo sapiens
ctcaataccccaagcaatacctgcaactgaggattcttcccggggagaccgcagcccatcggcatggctcaagagtttgtgaactgcaaaatccagcctgggaaggtggttgtgttcatcaagcccacctgcccgtactgcaggagggcccaagagatcctcagtcaattgcccatcaaacaagggcttctggaatttgtcgatatcacagccaccaaccacactaacgagattcaagattatttgcaacagctcacgggagcaagaacggtgagtttcattttaaacggctagggaaaggctcccggattgccttttcttgtcagagctgtgcctttctttaggataaggctgcggctccgtacttcaaggcgtccagagggctgtgcggggcggggggtgtgggggagggcgccttagagaggatctcggtcacttgaatgagcggcggcactgcagccaaaggtcttcacggggcagaagagggagtacagctgatgtctgctgtgcggcagggtgcctcgagtctttattggtaaagattgtataggcggatgcagtgatctagtctctttgcaacagagtggggaactgctgacgcggctaaagcagattggagctctgcagtaaccacagatctcataggaaatgttcaacaattctgtgaaaggtcacaggacccaattggagaaatcatatgaaaagcatagttggtcttggtgtcatatggatcagaggcacaagtgcagaggctgtggtcatgcggaacactctgttatttaagatggctatccagataatcctgaacactgtgtatttattttatttagactaccagcaaagattaaagcatgaaatgtaaaacatctgataaaacttacagccccctacaccaagagtgtatctgtgaaagagctcctacactttgaaaacttaagaatcccttatcatgaagtttgcctgttctagaattgtaagattgttaatttccttcaatctctagtgacaacacttaatttcttttctaataaaaaaaacctatagatgattcagtgatttttgtccaattcatttgcatgttctcaagacattaaggaatgttatgcgaaatacactaacttaaaactgtgtttatatttggccctgccattataaataaagacacgtgctgctgtcactcactgagtacaaatggctgata

SEQ ID NO: 11429 - protein, 32 aa, Homo sapiens; identical to SEQ ID NO: 11415

SEQ ID NO: 11430 - DNA, 1525 bp, Homo sapiens
ggctcaataccccaagcaatacctgcaactgaggattcttcccggggagaccgcagcccatcggcatggctcaagagtttgtgaactgcaaaatccagcctgggaaggtggttgtgttcatcaagcccacctgcccgtactgcaggagggcccaagagatcctcagtcaattgcccatcaaacaagggcttctggaatttgtcgatatcacagccaccaaccacactaacgagattcaagattatttgcaacagctcacgggagcaagaacggtgcctcgagtctttattggtaaagattgtataggcggatgcagtgatctagtctctttgcaacagagtggggaactgctgacgcggctaaagcagattggagctctgcagtaaccacagaacaggccccatgctgacgtccctcctcaagagctggatggcattgcaaatgatgacagcacttctggtggatgaatttgggggcacaaacagcttttttcctcttttggctcagtatttaaaagtggaccaacttgctcttaatcacagggccaagaaggttgacgggccatcttggttttcttctggatgtgctctttggttttcagaagactgtgacaagttctggcccaggattcgctcactgaccctcaattgtcctctttggcatgcgtttcttactgttctccatgtgtcggcatgtctctacctctaagccagtgtttttcaactatgtttatccagactccttctccacaatgatgaatccacagttggttatctgctactgcccattagctaaaatcattttgctgcttgactttatggagtttgtattatgaaatcagtgggtattttgaatgtgttctttctaactacatgcatctctccactcaactccaccccatcccatcccaccttgaaaatcactgctctgaaccagtgttctccaccttgtcctccacagatctcataggaaatgttcaacaattctgtgaaaggtcacaggacccaattggagaaatcatatgaaaagcatagttggtcttggtgtcatatggatcagaggcacaagtgcagaggctgtggtcatgcggaacactctgttatttaagatggctatccagataatcctgaacactgtgtatttattttatttagactaccagcaaagattaaagcatgaaatgtaaaacatctgataaaacttacagccccctacaccaagagtgtatctgtgaaagagctcctacactttgaaaacttaagaatcccttatcatgaagtttgcctgttctagaattgtaagattgttaatttccttcaatctctagtgacaacacttaatttcttttctaataaaaaaaacctatagatgattcagtgatttttgtccaattcatttgcatgttctcaagacattaaggaatgttatgcgaaatacactaacttaaaactgtgtttatatttggccctgccattataaataaagacacgtgctgctgtcactcactgagtacaaatggctgata

SEQ ID NO: 11431 - protein, 106 aa, Homo sapiens; identical to SEQ ID NO: 1068

SEQ ID NO: 11432 - DNA, 1235 bp, Homo sapiens
gtaagcactttatgcttccccagaggtgactaaactctgatcattgccaatgggcaggcactccccaaatgtccaaggacaacaaagatacccagagtgtctttcatagctaccaatgattaaatagcaagtattgcattcctgggcattgctaactagtgaagtataccagatggaaatgtcttcgaagctgtccctttaaaactcgagcaagctaccaggcaaactccgcctccagggaggttccttattaaataggagccaactggctgggtcggggctcaataccccaagcaatacctgcaactgaggattcttcccggggagaccgcagcccatcggcatggctcaagagtttgtgaactgcaaaatccagcctgggaaggtggttgtgttcatcaagcccacctgcccgtactgcaggagggcccaagagatcctcagtcaattgcccatcaaacaagggcttctggaatttgtcgatatcacagccaccaaccacactaacgagattcaagattatttgcaacagctcacgggagcaagaacggtgcctcgagtctttattggtaaagattgtataggcggatgcagtgatctagtctctttgcaacagagtggggaactgctgacgcggctaaagcagattggagctctgcagtaaccacagatctcataggaaatgttcaacaattctgtgaaaggtcacaggacccaattggagaaatcatatgaaaagcatagttggtcttggtgtcatatggatcagaggcacaagtgcagaggctgtggtcatgcggaacactctgttatttaagatggctatccagataatcctgaacactgtgtatttattttatttagactaccagcaaagattaaagcatgaaatgtaaaacatctgataaaacttacagccccctacaccaagagtgtatctgtgaaagagctcctacactttgaaaacttaagaatcccttatcatgaagtttgcctgttctagaattgtaagattgttaatttccttcaatctctagtgacaacacttaatttcttttctaataaaaaaaacctatagatgattcagtgatttttgtccaattcatttgcatgttctcaagacattaaggaatgttatgcgaaatacactaacttaaaactgtgtttatatttggccctgccattataaataaagacacgtgctgctgtcactcactgagtacaaatggctgata

SEQ ID NO: 11433 - protein, 106 aa, Homo sapiens; identical to SEQ ID NO: 1068

SEQ ID NO: 11434 - DNA, 3585 bp, Homo sapiens
ccgcctcagcctcccaaagtgctgggattacaggcgtgagccacggcgcccggcctgatcctgcagtcttaattattctataaagtagctgtatctagtaggtaatcagcaggacatgattatggaaagttagtggcttcaatcaagccatgtacttggtaaaacctgtttttgttttgctatagtcacagctcctaaattagtgccttcatttatttctcctctaatgcacttttctttacatagatctgagtttctgaactatatcatttcccttctctctgaagaacttctttgggcatttcttgcaaggtgattccattggtaacacattccctcaagttttgtttaccttagaaagtatttctccttcgcatttgaatgatgattttactggatgcaacaaatatttttaagcacctactatgtaccagacacttttatgtacattggggaaaaaattctgccttttctgccatgaaaaaaacccttctgcctttgttgaacctatattctagtgggggagacaaacaaatacagtaataaaacagtatgttgggagttggtaagtggcacgtgctatgaggaaaagtaggaaaggtagggaggaagcatcagggtccagttttaaatggagccattgggtctcactgagaagggaacattcgagcagatatctataggagctgagggagatgggtgtacacaatttacaggtagagtgaatgcaaaggtcctggggtagacgtttgcctggcaggtttgtggaatagtaaggaagccagtatagttgcagcactgtgagccagtaggagagttagtggaggtgaggtctgagagctaataggagcttggaagaactgtgactggtactcggtgtgagatgagatgcccctggtgggtgctgagcagacgagtcacttgatctgaccccattttgaaagggccactctggcagctgtggggagaagagacagtagggcaaaggtgaaggttgaagctgggagacattgggaggctatagtagttattcaggtgacagatgaaggtggcttataccagggaggtagccgaggagtgttgagaaattgcttttgagtagttgcatttgtgtaaccctagctagcgtacaggagatgttgcctggctgaggctggggaaacctagtgcaggagaataagaaccacaggattaccaaactcgttttggggtggcagttctttcctctccttgacagtagcggactctcaagttcctctaaagaggaggctgggacgggaagggacaggaggggaagcagcacagggtatttcctcttctttgctcaactttatcaacagtacttcttgctttggtttcactgccacagcacccccgtgccgtctgtacagcctgccattcagctcccgttaggggtaccattcactgatacgatttatggcagttttgcagttgtccagactagaggatgggtgtgagggtaaaggagcctttcgcttctttgccagacactgagcacaaaactccacgctgggagcagcctggtcacatttcagggtcatctcaggaggctggggggcagctccagggctgtgggttttcaaagcctcagttatcctgtgagagcacagggaatagccatggaaatgtgcaagatttgtttttaatttttagactttatttttaatgcctaccttcacccagaccccctttttaataaaagtgctgtaagaacttatccacaataatgaagccccttttctcacctttctcactttttggacaatttgctccaattattatgctttctgaggaaagcccaaagctttgaaaaatagtctcattgctttctgcctccacctctccctcccctccagtgcgttcctggtactcggggagaggcccgctggctctgatgacgcggtgacctccatggggcttttttcttcactgccaggcagccttggtggaacactcctggcctataaattcagccacgttgagggtatttcctcctccctcgcgattctaaaagccctctggaattctggaatgtgtctgctcctagcagcagggaggaagtgtgtaactagagaggagcctattcagcaggtgtcatgactgtggcttggcgtgggtgacgcaccctcatccggggtgagttaaccatcttatgatggaccagcgattaaaggagactcaaacaccactacacccccctggttgaggacagagctcacttgtgttgctttgttttgctttctttgttttgctctgtcgtccaggtgtgagtgcaatggcaccatcacagcttactgcagcctcgacctcccgggccaaagcaatccttccacttcagcctcctgagtagctgggactacaggcatgcaccgccatgcctggctaatttttgtattttttgtagagacggggtctcacgatgttacctaggctagtcttgaactcctgggctcaagcgaccctcccacctcagcctcacaaaagtagtaggattacattcatgagccactgtgcctggccctcacctgtgttttaacaacacagagagatgattgtacttaataaaccatggacctgaaaaatcagagacgtaatgcaaatacttttccagctgtatttagaaacgaactccttccttcctgattgctgtgacccagtttacaatcttaggtgtggtccctgatgcagagaaagcagagttcaatctaggtggtctgactgcagccaatcagaattctccttctgaaacatgtttctgtagagtgaaatttttaaatccctttgacaagttggacaagctcatgcatagcacacaacttgaaaactcttctggcgtaaaaacattctcgagttaataatgttaccccttataacagaaaggaagtcctgtcctgtgagcatatacataaggaggttttaaagtgatttgaaaagtttggaatcacgggaaatatttagtggtaggatagaaatgttctgtctaatctagtaatgtagtaatgtcctgggtcgtgtgcttttttaggtgcctcgagtctttattggtaaagattgtataggcggatgcagtgatctagtctctttgcaacagagtggggaactgctgacgcggctaaagcagattggagctctgcagtaaccacagatctcataggaaatgttcaacaattctgtgaaaggtcacaggacccaattggagaaatcatatgaaaagcatagttggtcttggtgtcatatggatcagaggcacaagtgcagaggctgtggtcatgcggaacactctgttatttaagatggctatccagataatcctgaacactgtgtatttattttatttagactaccagcaaagattaaagcatgaaatgtaaaacatctgataaaacttacagccccctacaccaagagtgtatctgtgaaagagctcctacactttgaaaacttaagaatcccttatcatgaagtttgcctgttctagaattgtaagattgttaatttccttcaatctctagtgacaacacttaatttcttttctaataaaaaaaacctatagatgattcagtg

SEQ ID NO: 11435 - protein, 72 aa, Homo sapiens; identical to SEQ ID NO: 11425

SEQ ID NO: 11436 - DNA, 1055 bp, Homo sapiens
ctcaataccccaagcaatacctgcaactgaggattcttcccggggagaccgcagcccatcggcatggctcaagagtttgtgaactgcaaaatccagcctgggaaggtggttgtgttcatcaagcccacctgcccgtactgcaggagggcccaagagatcctcagtcaattgcccatcaaacaagggcttctggaatttgtcgatatcacagccaccaaccacactaacgagattcaagattatttgcaacagctcacgggagcaagaacggtgagtttcattttaaacggctagggaaaggctcccggattgccttttcttgtcagagctgtgcctttctttaggataaggctgcggctccgtacttcaaggcgtccagagggctgtgcggggcggggggtgtgggggagggcgccttagagaggatctcggtcacttgaatgagcggcggcactgcagccaaaggtcttcacggggcagaagagggagtacagctgatgtctgctgtgcggcagggtgcctcgagtctttattggtaaagattgtataggcggatgcagtgatctagtctctttgcaacagagtggggaactgctgacgcggctaaagcagattggagctctgcagtaaccacagatctcataggaaatgttcaacaattctgtgaaaggtcacaggacccaattggagaaatcatatgaaaagcatagttggtcttggtgtcatatggatcagaggcacaagtgcagaggctgtggtcatgcggaacactctgttatttaagatggctatccagataatcctgaacactgtgtatttattttatttagactaccagcaaagattaaagcatgaaatgtaaaacatctgataaaacttacagccccctacaccaagagtgtatctgtgaaagagctcctacactttgaaaacttaagaatcccttatcatgaagtttgcctgttctagaattgtaagattgttaatttccttcaatctctagtgacaacacttaatttcttttctaataaaaaaaacctatagatgattcagtg

SEQ ID NO: 11437 - protein, 32 aa, Homo sapiens; identical to SEQ ID NO: 11415

SEQ ID NO: 11438 - DNA, 1623 bp, Homo sapiens
ctcaataccccaagcaatacctgcaactgaggattcttcccggggagaccgcagcccatcggcatggctcaagagtttgtgaactgcaaaatccagcctgggaaggtggttgtgttcatcaagcccacctgcccgtactgcaggagggcccaagagatcctcagtcaattgcccatcaaacaagggcttctggaatttgtcgatatcacagccaccaaccacactaacgagattcaagattatttgcaacagctcacgggagcaagaacggtgagtttcattttaaacggctagggaaaggctcccggattgccttttcttgtcagagctgtgcctttctttaggataaggctgcggctccgtacttcaaggcgtccagagggctgtgcggggcggggggtgtgggggagggcgccttagagaggatctcggtcacttgaatgagcggcggcactgcagccaaaggtcttcacggggcagaagagggagtacagctgatgtctgctgtgcggcagggtgcctcgagtctttattggtaaagattgtataggcggatgcagtgatctagtctctttgcaacagagtggggaactgctgacgcggctaaagcagattggagctctgcagtaaccacagaacaggccccatgctgacgtccctcctcaagagctggatggcattgcaaatgatgacagcacttctggtggatgaatttgggggcacaaacagcttttttcctcttttggctcagtatttaaaagtggaccaacttgctcttaatcacagggccaagaaggttgacgggccatcttggttttcttctggatgtgctctttggttttcagaagactgtgacaagttctggcccaggattcgctcactgaccctcaattgtcctctttggcatgcgtttcttactgttctccatgtgtcggcatgtctctacctctaagccagtgtttttcaactatgtttatccagactccttctccacaatgatgaatccacagttggttatctgctactgcccattagctaaaatcattttgctgcttgactttatggagtttgtattatgaaatcagtgggtattttgaatgtgttctttctaactacatgcatctctccactcaactccaccccatcccatcccaccttgaaaatcactgctctgaaccagtgttctccaccttgtcctccacagatctcataggaaatgttcaacaattctgtgaaaggtcacaggacccaattggagaaatcatatgaaaagcatagttggtcttggtgtcatatggatcagaggcacaagtgcagaggctgtggtcatgcggaacactctgttatttaagatggctatccagataatcctgaacactgtgtatttattttatttagactaccagcaaagattaaagcatgaaatgtaaaacatctgataaaacttacagccccctacaccaagagtgtatctgtgaaagagctcctacactttgaaaacttaagaatcccttatcatgaagtttgcctgttctagaattgtaagattgttaatttccttcaatctctagtgacaacacttaatttcttttctaataaaaaaaacctatagatgattcagtg

SEQ ID NO: 11439 - protein, 32 aa, Homo sapiens; identical to SEQ ID NO: 11415

SEQ ID NO: 11440 - DNA, 728 bp, Homo sapiens
ggctcaataccccaagcaatacctgcaactgaggattcttcccggggagaccgcagcccatcggcatggctcaagagtttgtgaactgcaaaatccagcctgggaaggtggttgtgttcatcaagcccacctgcccgtactgcaggagggcccaagagatcctcagtcaattgcccatcaaacaagggcttctggaatttgtcgatatcacagccaccaaccacactaacgagattcaagatctctttgcaacagagtggggaactgctgacgcggctaaagcagattggagctctgcagtaaccacagatctcataggaaatgttcaacaattctgtgaaaggtcacaggacccaattggagaaatcatatgaaaagcatagttggtcttggtgtcatatggatcagaggcacaagtgcagaggctgtggtcatgcggaacactctgttatttaagatggctatccagataatcctgaacactgtgtatttattttatttagactaccagcaaagattaaagcatgaaatgtaaaacatctgataaaacttacagccccctacaccaagagtgtatctgtgaaagagctcctacactttgaaaacttaagaatcccttatcatgaagtttgcctgttctagaattgtaagattgttaatttccttcaatctctagtgacaacacttaatttcttttctaataaaaaaaacctatagatgattcagtg

SEQ ID NO: 11441 - protein, 102 aa, Homo sapiens
MAQEFVNCKIQPGKVVVFIKPTCPYCRRAQEILSQLPIKQGLLEFVDITATNHTNEIQDLFATEWGTADAAKADWSSAVTTDLIGNVQQFCERSQDPIGEII

SEQ ID NO: 11442 - DNA, 1379 bp, Homo sapiens
ggctcaataccccaagcaatacctgcaactgaggattcttcccggggagaccgcagcccatcggcatggctcaagagtttgtgaactgcaaaatccagcctgggaaggtggttgtgttcatcaagcccacctgcccgtactgcaggagggcccaagagatcctcagtcaattgcccatcaaacaagggcttctggaatttgtcgatatcacagccaccaaccacactaacgagattcaagattatttgcaacagctcacgggagcaagaacggtgcctcgagtctttattggtaaagattgtataggcggatgcagtgatctagtctctttgcaacagagtggggaactgctgacgcggctaaagcagattggagctctgcagtaaccacagaacaggccccatgctgacgtccctcctcaagagctggatggcattgcaaatgatgacagcacttctggtggatgaatttgggggcacaaacagcttttttcctcttttggctcagtatttaaaagtggaccaacttgctcttaatcacagggccaagaaggttgacgggccatcttggttttcttctggatgtgctctttggttttcagaagactgtgacaagttctggcccaggattcgctcactgaccctcaattgtcctctttggcatgcgtttcttactgttctccatgtgtcggcatgtctctacctctaagccagtgtttttcaactatgtttatccagactccttctccacaatgatgaatccacagttggttatctgctactgcccattagctaaaatcattttgctgcttgactttatggagtttgtattatgaaatcagtgggtattttgaatgtgttctttctaactacatgcatctctccactcaactccaccccatcccatcccaccttgaaaatcactgctctgaaccagtgttctccaccttgtcctccacagatctcataggaaatgttcaacaattctgtgaaaggtcacaggacccaattggagaaatcatatgaaaagcatagttggtcttggtgtcatatggatcagaggcacaagtgcagaggctgtggtcatgcggaacactctgttatttaagatggctatccagataatcctgaacactgtgtatttattttatttagactaccagcaaagattaaagcatgaaatgtaaaacatctgataaaacttacagccccctacaccaagagtgtatctgtgaaagagctcctacactttgaaaacttaagaatcccttatcatgaagtttgcctgttctagaattgtaagattgttaatttccttcaatctctagtgacaacacttaatttcttttctaataaaaaaaacctatagatgattcagtg

SEQ ID NO: 11443 - protein, 106 aa, Homo sapiens; identical to SEQ ID NO: 1068

SEQ ID NO: 11444 - DNA, 1089 bp, Homo sapiens
gtaagcactttatgcttccccagaggtgactaaactctgatcattgccaatgggcaggcactccccaaatgtccaaggacaacaaagatacccagagtgtctttcatagctaccaatgattaaatagcaagtattgcattcctgggcattgctaactagtgaagtataccagatggaaatgtcttcgaagctgtccctttaaaactcgagcaagctaccaggcaaactccgcctccagggaggttccttattaaataggagccaactggctgggtcggggctcaataccccaagcaatacctgcaactgaggattcttcccggggagaccgcagcccatcggcatggctcaagagtttgtgaactgcaaaatccagcctgggaaggtggttgtgttcatcaagcccacctgcccgtactgcaggagggcccaagagatcctcagtcaattgcccatcaaacaagggcttctggaatttgtcgatatcacagccaccaaccacactaacgagattcaagattatttgcaacagctcacgggagcaagaacggtgcctcgagtctttattggtaaagattgtataggcggatgcagtgatctagtctctttgcaacagagtggggaactgctgacgcggctaaagcagattggagctctgcagtaaccacagatctcataggaaatgttcaacaattctgtgaaaggtcacaggacccaattggagaaatcatatgaaaagcatagttggtcttggtgtcatatggatcagaggcacaagtgcagaggctgtggtcatgcggaacactctgttatttaagatggctatccagataatcctgaacactgtgtatttattttatttagactaccagcaaagattaaagcatgaaatgtaaaacatctgataaaacttacagccccctacaccaagagtgtatctgtgaaagagctcctacactttgaaaacttaagaatcccttatcatgaagtttgcctgttctagaattgtaagattgttaatttccttcaatctctagtgacaacacttaatttcttttctaataaaaaaaacctatagatgattcagtg

SEQ ID NO: 11445 - protein, 106 aa, Homo sapiens; identical to SEQ ID NO: 1068

SEQ ID NO: 11446 - DNA, 724 bp, Homo sapiens
ggctcaataccccaagcaatacctgcaactgaggattcttcccggggagaccgcagcccatcggcatggctcaagagtttgtgaactgcaaaatccagcctgggaaggtggttgtgttcatcaagcccacctgcccgtactgcaggagggcccaagagatcctcagtcaattgcccatcaaacaagggcttctggaatttgtcgatatcacagccaccaaccacactaacgagattcaagattatttgcaacagctcacgggagcaagaacggtgcctcgagtctttattggtaaagattgtataggcggatgcagtgatctagtctctttgcaacagagtggggaactgctgacgcggctaaagcagattggagctctgcagtaaccacagggccaagaaggttgacgggccatcttggttttcttctggatgtgctctttggttttcagaagactgtgacaagttctggcccaggattcgctcactgaccctcaattgtcctctttggcatgcgtttcttactgttctccatgtgtcggcatgtctctacctctaagccagtgtttttcaactatgtttatccagactccttctccacaatgatgaatccacagttggttatctgctactgcccattagctaaaatcattttgctgcttgactttatggagtttgtattatgaaatcagtgggtattttgaatgtgttctttctaactacat

SEQ ID NO: 11447 - protein, 106 aa, Homo sapiens; identical to SEQ ID NO: 1068

SEQ ID NO: 11448 - DNA, 1815 bp, Homo sapiens
aacccactccagtccccttctgcactgtggaagctttgttcttttgctctttgcaataaatcttgctactgctcactctttgcgtccacactgcctttatgagctgtaacactcactgcgaaggtctgcagcttcactcctgaagccagccacaagaccacgaacccaccagaaggaagaaactccgaacacatctgaacatcagaaggaacaaactctggacacactgcctttaagaactgtaatactcaccgtgagggcccgcggcttcattcttgaagtcagtgagaccaagaacccaccaattccagacacagtgggatcacagagagagccaacagtccaggccatgacaagctggcacccagctctgcttcacatgatcaaactgcatcacggaagctgcacacgatgacaccctgtctggaaagtttttgccagagggcaaaagactgcaagcagaatatccctttgccatttctcattcaggactggccgttgtctgaaagcaaacctcaaggacaggacttctggactccgcagccacttcaggctgctgctccatcgcatgaattccagcaggtggcgctgcaccccgcgcggacccggcttgcctctcggccccagggaggtcggttgatgagcagtcgggaagtgggtctgcgcgcaccccgctgcagctgtggcaaacgcaaacgatgacacacaggcttgacgagggcctttgtcagaagcaatggggatctggcgtcaccgcacaatggaaaacaaagtgcttctgcctggctggccagaatgcacgtttgctcactattgatgctggggcatttacaggcagaatgagttcatgtgaaatttcaggatctgccatgactcagattcactttctgtaaaccagagtcaacattacatttccctttactctgggccattccttgaatttttaggtcaccagttgtttttgtactaactgaagggatttgagtatttcacaagcaccttatttttattagcatttttagggcattaccaatttgggacggatctgtagtgtgagagattgttgtcactcttagctccaaacataggttgactttatatattatttacatgttcagaattatactgtgtagaaattcaaatgaaacttgcaaaatacttttctggcaggaagccctggagaggatcgttcatggaaacaaggatgacgactggggtaagaaatgcaggtgactcgtgagtggtcagggagtggaagagaagacggctggaaggttttagcattcagaaaaaaaatggagacaactagagttgatctgaagattatggcagaattcaatattgggggaaagaaacaagatgggggttagaaattagaaacagcagagctccacaggttggaaaggttggaaaggatttgagcaagagaacaaggagcctgctaatagcaccctgggtttacatcaagagaagcacctggagagaattaactcgggaggaggtgggggcatgggaaaccttttcatctccaagagcgggcaggaacagcagctggcctgaacttgaaggtacaccaggtagcttgcgtgggccaggagaaggtgattctcttctatgcctctctccaacgccctgcttctgatgctgctcctctacctgtattgaggggaagatacatccctaagaagttccctgaaccccattctttgttgtggctaactggtccccttggaatttttctactaattttcaattccccctctcacctggtgaaatcttgaatcttactgttcaataaaagttcttctaccgaaa

SEQ ID NO: 11449 - protein, 96 aa, Homo sapiens; identical to SEQ ID NO: 1070

SEQ ID NO: 11450 - DNA, 1796 bp, Homo sapiens
agaccacgaacccaccagaaggaagaaactccgaacacatctgaacatcagaaggaacaaactctggacacactgcctttaagaactgtaatactcaccgtgagggcccgcggcttcattcttgaagtcagtgagaccaagaacccaccaattccagacacagtgggatcacagagagagccaacagtccaggccatgacaagctggcacccagctctgcttcacatttgtccaactggcgtggctgtagctccttcctgcaaggcaatgctgaagaagctatggaagcaagaaggaagcatggattctaaaaactgacaacaaaccacttacccctattgctcttcttcctaaagctaaaggatcaaactgcatcacggaagctgcacacgatgacaccctgtctggaaagtttttgccagagggcaaaagactgcaagcagaatatccctttgccatttctcattcaggactggccgttgtctgaaagcaaacctcaaggacaggacttctggactccgcagccacttcaggctgctgctccatcgcatgaattccagcaggtggcgctgcaccccgcgcggacccggcttgcctctcggccccagggaggtcggttgatgagcagtcgggaagtgggtctgcgcgcaccccgctgcagctgtggcaaacgcaaacgatgacacacaggcttgacgagggcctttgtcagaagcaatggggatctggcgtcaccgcacaatggaaaacaaagtgcttctgcctggctggccagaatgcacgtttgctcactattgatgctggggcatttacaggcagaatgagttcatgtgaaatttcaggatctgccatgactcagattcactttctgtaaaccagagtcaacattacatttccctttactctgggccattccttgaatttttaggtcaccagttgtttttgtactaactgaagggatttgagtatttcacaagcaccttatttttattagcatttttagggcattaccaatttgggacggatctgtagtgtgagagattgttgtcactcttagctccaaacataggttgactttatatattatttacatgttcagaattatactgtgtagaaattcaaatgaaacttgcaaaatacttttctggcaggaagccctggagaggatcgttcatggaaacaaggatgacgactggggtaagaaatgcaggtgactcgtgagtggtcagggagtggaagagaagacggctggaaggttttagcattcagaaaaaaaatggagacaactagagttgatctgaagattatggcagaattcaatattgggggaaagaaacaagatgggggttagaaattagaaacagcagagctccacaggttggaaaggttggaaaggatttgagcaagagaacaaggagcctgctaatagcaccctgggtttacatcaagagaagcacctggagagaattaactcgggaggaggtgggggcatgggaaaccttttcatctccaagagcgggcaggaacagcagctggcctgaacttgaaggtacaccaggtagcttgcgtgggccaggagaaggtgattctcttctatgcctctctccaacgccctgcttctgatgctgctcctctacctgtattgaggggaagatacatccctaagaagttccctgaaccccattctttgttgtggctaactggtccccttggaatttttctactaattttcaattccccctctcacctggtgaaatcttgaatcttactgttcaataaaagttcttctaccgaaa

SEQ ID NO: 11451 - protein, 96 aa, Homo sapiens; identical to SEQ ID NO: 1070

SEQ ID NO: 11452 - DNA, 695 bp, Homo sapiens
gtcagtgtagaaagcccaggcattgtcccatagctggccctgtgtgtttgcactgattcctcagaataagtttgcagatagcttaacttccagaattcctgagtttcactagtcccccttctttatgatgaattggaaaaagggtatattctgggataaagcaagaggaaactgggtgcagcaaagatccctagaccatttttcccagtggcccattgctcctgctgcttttttcataccagctgaatctccctaaaccccacgtctgcggcaaagtcttcgtggtgaaacaggcagtcttcagtacaagaagcgtcaatctcagatcttactcatttccaacctgtaccaatcaaaggccctcccagccaagataaaagcaaagtctccctcctccagagcacatgggaatggccccccagtagctggggcatgcaagctaatgaagtttcatcttccacctctatccaaatatgaccttgctgataccatctcctattagatgacaaatccggatgtttctattgcatggttgttatttgccacatgcttcctggacaagtttctagccagctgccatgtgtcaggacactcaggcagcctgtggaaagctgcacatggtgaggaacagagggctccagtcaaacgaccaatgccaacaaccatgtaagtgagcttggaagtggattccccag

SEQ ID NO: 11453 - protein, 55 aa, Homo sapiens
MTNPDVSIAWLLFATCFLDKFLASCHVSGHSGSLWKAAHGEEQRAPVKRPMPTTM

SEQ ID NO: 11454 - DNA, 6272 bp, Homo sapiens
cttacatagtggaggtggagatcctcctctccaaggaccacccgcgtagggcgagattccccaattctgacttttcactactatcccccacaggggcggggctccaactccaggtaaccagaccaggcaacctggacttccaattagcaggggagtccccaagccagcctggccaatctcggccggctagccaagacgaccagacgtgacgtcagacatgattaagttggcgcgtcacctagacgtcagcctcttacctctcggacgtcccgtcccaggagcaaaactctagtgactttgggcccgcccccgtgagagtggagggcggccgatgagggcggttctgaagggaacaagaccaatgagacgagcccggggcggggcgcggggccggagggtggggcgggtggcggcggtggcagtccgaggtctggctccgcgcagtatatgacagtacgtcagcagcgggatggccctagcagtggcggcggctgcagaagcccaagcagccgcggccgcagtggaggctagagccggagcggcggcggcggcggcaccccggggagtttaagatggcggcgggggggacagggggcctgcgggaggagcagcgctatgggctgtcgtgcggacggctggggcaggacaacatcaccgtactgcatgtgaagctcaccgagacggcgatccgggcgctcgagacttaccagagccacaagaatttaattccttttcgaccttcaatccagttccaaggactccacgggcttgtcaaaattcccaaaaatgatcccctcaatgaagttcataactttaacttttatttgtcaaatgtgggcaaagacaaccctcagggcagctttgactgcatccagcaaacattctccagctctggagcctcccagctcaattgcctgggatttatacaagataaaattacagtgtgtgcaacaaacgactcgtatcagatgacacgagaaagaatgacccaggcagaggaggaatcccgcaaccgaagcacaaaagttatcaaacccggtggaccatatgtagggaaaagagtgcaaattcggaaagcacctcaagctgtttcagatacagttcctgagaggaaaaggtcaacccccatgaaccctgcaaatacaattcgaaagacacatagcagcagcaccatctctcagaggccatacagggacagggtgattcacttactggccctgaaggcctacaagaaaccggagctacttgctagactccagaaagatggtgtcaatcaaaaagacaagaactccctgggagcaattctgcaacaggtagccaatctgaattctaaggacctctcatataccttaaaggattatgtttttaaagagcttcaaagagactggcctggatacagtgaaatagacagacggtcattggagtcagtgctctctagaaaactaaatccgtctcagaatgctgcaggcaccagccgttcagaatctcctgtatgttctagtagagacgctgtatcttctcctcagaaacggcttttggattcagagtttattgatcctttaatgaataaaaaagcccgaatatctcacctgacgaacagagtaccaccaacactaaatggtcatttgaatcccaccagtgaaaaatctgctgcaggcctcccgctgccccctgcggctgctgccatccctacccctccaccgctgccttcaacctatctgcccatctcacatcctcctcagattgtaaattctaactccaactcccctagcactccagaaggccgggggactcaagacctacctgttgacagttttagtcaaaacgatagtatctatgaggaccagcaagacaaatatacctctaggacttctctggaaaccttaccccctggttccgttctactaaagtgtccaaagcctatggaagaaaaccattcaatgtctcacaaaaagtccaaaaagaagtctaaaaaacataaggaaaaggaccaaataaaaaagcacgacattgagactattgaggaaaaggaggaagatcttaagagagaagaggaaattgccaagctaaataactccagtccaaattccagtggaggagttaaagaggattgcactgcctccatggaaccttcagcaattgaactcccagattatttgataaaatatatcgctatcgtctcctatgagcaacgccagaattataaggatgacttcaatgcagagtatgatgagtacagagctttgcatgccaggatggagactgtagctagaagatttatcaaactagatgcacaaagaaagcgcctttctccaggctcaaaagagtatcagaatgttcatgaagaagtcttacaagaatatcagaagataaagcagtctagtcccaattaccatgaagaaaaatacagatgtgaatatcttcataacaagctggctcacatcaaaaggctaataggtgaatttgaccaacagcaagcagagtcatggtcctagaactctgcttggaccagaagatgtgaataaacttaagcttatttatttaaaattccaaatgagttgctctagattctaaaaaggtgaaactttggctgttgaaagtttcagtattagtaaacttgagttactttttcttttccattttactttgcttccctgcatttcgaagctgctctttctggtcctccccaccaccccacccccaagacttgtgtttgttaatagaaataatttttttaggtattggggatccattgtctatatttcaaatcagttttttttcctcaaaaacttgtgtttgttattagaaatgattttttagatattggggatccagtgtccacacttaaaagttgtatgtgtttaaaaaacaacaacagtaatgtgcaaggtgaaatgcttttggataaacgtaagcctattttctgacgtttcttaatgcaaactctttgccttaaatggtagaatatttagaaatttgcacaaaattaaaaaaataaacattgtcttggagggttaaaaaatagaaaggtgtatgtgtatagattcacatacacatatgtatatacaggctgacttgatctagaacattaaatccgccctgcaagttaaccccccattgcaatggttgccttaaggtgtttgctagttgtgtacatagtgtggttaatcattagctacactgcttcccacttgattagagcaatgggaagcatactgtggcctaccagcatctggaagtgtgtgctcgatctgtatgtgtgcagaggtggtgtggatgtgagcgtgcatgaaggaaaaaaagctgctactcctagtaggccaaacgctcaggttaaacaactgacgagtgttactgtagggtgtttttttgtttttttgttttttttcttctatcaaattgctacttttgttgtggaagacaaaagcatttccatttcaacgagtttgtcagctttattaatgttgggcaaaaattgatatgtcatgaaaatgaaacagatctatagttttgggacaaaattataaaatgaaatgtgtaggtaacctatttatatactgctataaagtattttttgaagagagatatgcaaagaagctattacctacataagaggtatatttaaagattttttttttcatcctggtgccaggaatataaaaaagagtggatatatttaaccataacatactgtgattcatcaaacagcacaaactttcatttcatggagtttatctgttgacattgatttaaactgtcacttgttttatcatgtgggaacataagttatgtggtcaaaaatataaggattttgaattaatgttgattcaagttgtattgtcttattgtattgtcttttcaaagtgctgccagttgaaaagggaagcattatgtttacaaatctgttttgaaatgtttgccaaaattttggtagtgtctttaataaagatgtttgtctccagcatccagaaaaataaatgaataactttgttgtgtatcactgtaaaccagaaaaatgttggttatctagaaaacttgagagagcatgtagattaacttttctctttggagttctaaaacattaactggaaagattagataatatactaaatgtatacagaagtatacagactatacaaagactgaaacaagtcccttttgcactacaactctataacattaccgcagaaattttggttctatgtagcatggacctcctaaggaattctgtttcttttagcattgagatccctggtgctctttttttacctcagaattggtacaatcattattaaacgttaatttatttcaaactttttaattgaaaaaaggaaagggaaacttaattggggataaattcaggcatcatattattatgatagagtctcctgagtggttcgtctataggtaatgaactcattggtgttatttcttggacatcttggccttttaatcaaagactgtgtgctgctatttgctatgagcaaggtttctcaaaagcaaaaggtgcttggaccatttggatcacctgagttagaatctctaggtatagggcccaagtatctgcattttcacaggtttcttgtaggtgactttctgcaagctaaagtatgagaaccattggcttggatgtagttctaaacttttaggtctgtaaatcttgaaatcttgaactgaaggtcaactattggcttttttttttttttaatgtccatcatgtcagcaggtgcaaatcacttttcccctttgcatgatctgaggcacctcctcagttgtttcactgccaactcttgtttcagaacctgtttacaaacaagccttccagttggtgaatggttagccattggagctcctaccctgtacatcagcacatcttctggtttacaagttgggtaacaatgaaagctggagatgctaaatggaaatccagcattgcatacccttagacctgatcacataccagtaaaagccttaatttagatgttagttgtatgtgttggacagatccttgcaaaagtgtgtctgtctattagttgtaaatttgaaaattataaatctctgaatctgctactatccaagtttcatcccttttgaagatgaggcatgagcctattaaaatatttataatcatttttcgtcccctactgcaagacttttagattcttacaaatgattactacaggaatagtggccacttaatgtcagttactccggtggaagaatttatctagttttttttcttttcttttttggaaggatggtgtgaaaaatagcaagattagagaatgagttgtatagttttttctatcacatttcatctaaaatgatttgaaggacttttgaagatttttaccaacatccttaaatcaactccaggttggatgaacaactgatttaaaacaaactaagagaacattaactagatgtgggctttttaaaatatataggtattgcatttcctaccttgttatttattccactttgaatactttagagggcttaactttcaactctttaaggtagtaatggatagttttatacttgttctcacaaaattgttatggtcagtttatatcattgctccatgcattgattataaaaattcagtattaattttttctgatcttataagctttataggagttttcttttctcttataaagtgtttcaccttatgtaaaacaaatgcctgcttgcatattggaagatgttgaaattagttttagacaaaagtggtccatcaattcagacactctgcttggatgccttacccttttcattagtgcattctttgcttctgaaacttggcagaaactcgttagccagtccactgcctttctgacaatgtgtggagtcacgtatgcttggtatatgcctttactacttttaaagttctacagtttattacttgcccaagtgttactaaatccttttcttatgtgtactggatggagaaaaaattatagccagcactttgagaggaaagttttcagaaacaatattaactggcactactaactgaaggccacaggagatgctatcaatgttatttgtaatctgaagattgaacaaggctgtgaggctcatttcaaactattttgaggtgttaaaatatatatatgctgtttctcagctgttccactcaaaccgtgttaggactctcaaaggtaaaatgtcacaggggcttttcagttgttacagagctcagcagctgtggttgcccctgttctacaccaatttcagttcaataaaaatgttaactttgcaattct

SEQ ID NO: 11455 - protein, 640 aa, Homo sapiens
MAAGGTGGLREEQRYGLSCGRLGQDNITVLHVKLTETAIRALETYQSHKNLIPFRPSIQFQGLHGLVKIPKNDPLNEVHNFNFYLSNVGKDNPQGSFDCIQQTFSSSGASQLNCLGFIQDKITVCATNDSYQMTRERMTQAEEESRNRSTKVIKPGGPYVGKRVQIRKAPQAVSDTVPERKRSTPMNPANTIRKTHSSSTISQRPYRDRVIHLLALKAYKKPELLARLQKDGVNQKDKNSLGAILQQVANLNSKDLSYTLKDYVFKELQRDWPGYSEIDRRSLESVLSRKLNPSQNAAGTSRSESPVCSSRDAVSSPQKRLLDSEFIDPLMNKKARISHLTNRVPPTLNGHLNPTSEKSAAGLPLPPAAAAIPTPPPLPSTYLPISHPPQIVNSNSNSPSTPEGRGTQDLPVDSFSQNDSIYEDQQDKYTSRTSLETLPPGSVLLKCPKPMEENHSMSHKKSKKKSKKHKEKDQIKKHDIETIEEKEEDLKREEEIAKLNNSSPNSSGGVKEDCTASMEPSAIELPDYLIKYIAIVSYEQRQNYKDDFNAEYDEYRALHARMETVARRFIKLDAQRKRLSPGSKEYQNVHEEVLQEYQKIKQSSPNYHEEKYRCEYLHNKLAHIKRLIGEFDQQQAESWS

SEQ ID NO: 11456 - DNA, 1978 bp, Homo sapiens
cacataataatacaaagtgtaaagatagattgatttttatttaagttctgccctcaaattaatttttagaggagataagagtaaaatctgatcatttcaatttagtaatggttataatgttttcttgttgtgacaacaagttgctaaatgctgagctggggacatttttgtaactggttatcacagaaattataacttggacacataattctagcttttttgcagaataaaaggcctctgtaagaagaaaataattaagttgcaagagcctggaaaaatggagagggaaagagcaaacaaatctgactttggatagctttgaaaatgaacaaatgtgcaaaatagctagaatgtaaaagggaaaatggaatctgggctgtctgaacactttttttctattagtagcatctcatggtggacaatgttaaactatgctgtttagcccttttcatttccagagtaaagatcattttagatttaaaatgtgttacttctgcttaacagtagtgtgaaagctatacttattggggaatgatacagtatgaaaccataatgctggttatcatctcttaactaacaggaacttgagaaaccttgctgagtaccctctcatctgaggtagtgtatggttttagagttctctaggagggccttgaaaggcagctatcacctaccacttagttggcccaggaagggtcagttgtctgcagccacctgggcgacagagcaagacaccatctcaaaaaaataataaaaaacctaaattatcaacctttgaataattcatacttaacgaaaatatttctaatttttatgtaataagaatacttttacttgtagttaagctatcaaaactgtttaaaattttttccatcaccacataaacagccaactgtagaactacaacaatttttcgtaaaagtaggacaacttttttcttaaaaatgccagtgtaaccaaataatctcttctataatagcaacacagttgttgaccacacaactgtggtcattgaataatttccctaaggaaattattaaataaaatactgaaggtatgcttttgagaaagcacgataaatatataacaaattaagtctaagttttaagatcggtttagctgtgttgctaatatatgcttatccccaggaacctctttttaccccggggctccctctggtgtacagtcaatacagcccatgcctaggaaggactgcttcactgcttggctggcagtgtaccttttatagctaagacaccaggagggcagctttacatcagcagactatcactgtctcaattatacttagaaaattaaacctctacactgtctaattcagcatgaataaaaatattaatgaggacactaagtttgctcactgcatcacttttctcacattttctgctaggcgtctgtgatattagtaatttaaacaaactgatgggcttatataagaccatttggagaggactgaactccaagattttatggcagtgaagaatatatgtgtacccccaaggggcatcctgaatctcctgccacctgcctgaaattgctttgaaatctcaatttttatttcaaaaactcaagggaagtttgcattaatgataggaacacagagtgcaaagaaccaggccagttccttatgtgatcccagttcccagatctacaaataagtaatactgtaatatgtaataggccaggcgcagtggctcacgcctataatcctagcactttgggaggccaaggcgggtggatcacttggggccaggggttcgagaccagactgggcaacatgacgaaaccctgtctctactaaaaatacaaaaattagccgggcatggtggcatgtacctgtaatctcagctactcaggaggctgaggcacgagaatcggttgagcccaggaggtagaggttgcagtgagctgagatcgcgccactgccctctggcctgggcgacagagcaagactccgtct

SEQ ID NO: 11457 - protein, 41 aa, Homo sapiens
MVLEFSRRALKGSYHLPLSWPRKGQLSAATWATEQDTISKK

SEQ ID NO: 11458 - DNA, 1562 bp, Homo sapiens
aactagcagtccctttggggccaattgatgtaattattttcagtgtaaatcctaaaggttgcctgttttaggttaggagatgatagtaaaaatacctaatgctctgtttttatacctcatactaggtagccaatctgaattctaaggacctctcatataccttaaaggattatgtttttaaagagcttcaaagagactggcctggatacagtgaaatagacagacggtcattggagtcagtgctctctagaaaactaaatccgtctcagaatgctgcaggcaccagccgttcagaatctcctgtatgttctagtagagacgctgtatcttctcctcaggtatgtcataaacatagaattatagacctgacatagatattaggggcctctaatcaggtcctctgatgtataagtgaaggaaatgagacccggagaagctggacagcttgcctgcccaaagccatctggttatggctgagcttagcctagaatttaggtcttggcttccagcccagaactttctccactacacagcactgcttgtcagagtacttaatgtctaccttgctttccatttttaaagtttacattttgttgtaagattatctactttccaatttggtcactaactagaagacttacccagtcccaaacaattatcagattatatggaaaattgaagatacttaattttgtctgtcaacatgttccagaagaatattttttggggaaaatggatttacaatcaacaaataaacaaaaatgatggcatgtttccatgttttctttttaattggatccttatcagagtactcccaatcagattcttctccagtttagagttttcccccaagagattcagctcatccaagaaaaaggtgagaaggtcctaggcagtactagagtgaagcctgcctgattctcagctgattggccaaactcagaactctctcggtgttctgggtgcttttgacagacagtgggacgcacctccccaccccagtactgctgacacagtgtcttccctctctctctctggaccttactcccaagaattagtgagaagcccacagatgtgtggagaacactaagcataccctgggcaaacagccattcgcacatcagaaaatattagaaacttattgtgaggaacagagggggaacaaaaaagaaaaaggaaaaaaagcaggtctgtccttgcatatatacaatgtctgtggaagtctcacttttaatgccaactattatgaaactacttctactctgatcaaattatatactaggtgccaaataaatggtgttaaattgaaaacaaaataatgagttgattaaccattattttctttcaagccagaatacaagctacagcattacatttaagcataaatgtgaatttatattttatagttttcaactatctaaatttcctttttaacttaaatactattattgttgttgacagattaggctactattaccatgattttttttaaagtacttccacctaattttaatggaccaattattaagacttatcttccaatctggtaaagagatatgtaa

SEQ ID NO: 11459 - protein, 62 aa, Homo sapiens
MFQKNIFWGKWIYNQQINKNDGMFPCFLFNWILIRVLPIRFFSSLEFSPKRFSSSKKKVRRS

SEQ ID NO: 11460 - DNA, 418 bp, Homo sapiens
gggggttgaccttttcctctcaggaactgtatctgaaacagcttgaggtgctttccgaatttgcactcttttccctaaagtccagtggaaatgacattgttacacatttgtgggttacaatatgagcacctcagtttccacaattctgatttaggtacctcttcatttctagaggaaataataataaataatatgtataatgcatgtattttggtcattttgctacagaaagataataactagtaacacaaactgtaacaacagacttgataacttatatcttaaataaatatatgccatttctgaaaagcaaactataatacagtgaacatggtgaaatgtcagaaatacctgtcagacctctctaagaacacactcttggctgagcattacgttagtaatttcacacgttcagaag

SEQ ID NO: 11461 - protein, 50 aa, Homo sapiens
MTLLHICGLQYEHLSFHNSDLGTSSFLEEIIINNMYNACILVILLQKDNN

SEQ ID NO: 11462 - DNA, 569 bp, Homo sapiens
aatcatctctccattcaggaactcagcacagctgctaccatgaggagactgcgaggctccacattttcattttgcgctgggcctcacaagtgatgtagccagtgctacagaggccattgggaatcaaaagatgaactttcaggctgtatttggcagatgcatgggcccagtggtgaactctaatgggtaccaaaagcagcattcactagaagatggcctccaggaacccttcagcaacaaaagatcaaagtgccttcaggcttcccaataactgcctacaacagtgaatggccttttctgccattcccaatgagtaagctttaaaaaaaaacagaagatctggcaacattgggccaccttatgttcacctggcaacaatcagctgaaccaagaaatcactgagccctttaaacctcccagctcactaccgtccagcatcttcagtccctatgacattgtatctgccctctttcactcatttggatatccagtggtccctgaaggcatctgaattggtgacctctgtaccaaagatgtgagaaacagtcattaaatatgcagcaacctgg

SEQ ID NO: 11463 - protein, 46 aa, Homo sapiens
MNFQAVFGRCMGPVVNSNGYQKQHSLEDGLQEPFSNKRSKCLQASQ

SEQ ID NO: 11464 - DNA, 704 bp, Homo sapiens
agaatatcagagttttgccagaaacccttgagtctggagtggtacggctggagtccagattgcagtctgtggaggagtggacaggagaccaagaaattctcgagttctcttcagagaccaactggggatcaacaattcaatttaattctgacacccaaggaagaagagagtgcacctgatgtagtagccactgtaagaactgtgttggagaatgatccgattggccagtgcaagagggattgcagagaagaagaaaccacaagcagaaaaaccagatgaggaaattaagctaaatattaactatctcaagaatattcccagaagtgactgctaaatttaaatccctgctcacaatgaaatactgtacagcaggggttctcaaactttttggtcttaggacccttacagccttaaaaattattgagaactccaaagaactttcaattatgtgggtcataactactgatacttactgtattataacttgaaactgaaaaaatttttaaatatttataaacatttaaaaataataaacccattgtaagctaatgtaaatagcatgtttttattaaaaatcactttgttttccaaagcaaaaaatgtagtgagaagagaggccttcttttacattttaatatctggcttatgagaaaatagctgagtttctcatttctgcttctccatttaatctgttggtgtatatt

SEQ ID NO: 11465 - protein, 44 aa, Homo sapiens
MKYCTAGVLKLFGLRTLTALKIIENSKELSIMWVITTDTYCIIT

SEQ ID NO: 11466 - DNA, 1296 bp, Homo sapiens
atgaatatttccagtggaccaaattgtaggttaactgctgaagaaagacattcttcaatccaagagggacttttctcaagatgtccactagaacataaaggaccccaaacagatgtagcagtggatccaagagtagtcaacggggttaaccgaaagtgccatttggatgagaggagtgctggtgaggggccccaggacgtgtctgctttgggtctggatccctcaggtgcccgtttggtgacaggaggatatgactctgatgttaagttttgggattttgctggaatggatgcttcttttaaggcatttcaatcccttcagccctggctggtgaattaccagatctccgtcaagtgcagtaaccagttcaagttggaagtgtgtcttttgaatgcagaaaacaaggtcgtggacaaccaggctgggacccagggccagctgaaggtgctgggtgccaacctctggtggccatacctgatgcacgaacaccccgcctacctgtactcgtgggaggatggtgattgctcacaccaaagccttggacccctcccagcctgtgacctttgtgaccaactccacctacgcagcagacaagggggtgagcctgggggtgtttactttaccctcctacaagcctcagagtatttcgaaacgccctttaccatctctgacgacggcatctatggctcaacattttttgtagccacaggctttcacggactccacgtcatcattggatcaactttcctcactatttgcctcatccgccaactaacatttcactttacatctaaacatcacttcggctttgaagccgccgcctgcaccatagttgtagctggggtctttctactcatccgcttccaccccctagcagaaaatagcccgccaacccaaaccctcacactatgtttaggcgctataactaccctactcgcagcagtctgcgccctcacacaaaatgatatcaaaaaaatcgtggccttctctacttcaagccaattgggactcataatagtcacaatcggcatcaaccagccatacctagcattcctacacatctgtacccacgccttcttcaaagccatgctatttgtatgctccggatccattatccataacctcaacaatgaacaagacattcgaaaaataggaggactactcaaaactatacccctcacttcaacctccctcaccattggcagcctagcacttgcaggaataccctttctcacaggtttctactccaaagacctcatcatcgaaaccacaaacatatcatacaccaacgcctga

SEQ ID NO: 11467 - protein, 431 aa, Homo sapiens [sequence omitted]

SEQ ID NO: 11468 - DNA, 446 bp, Homo sapiens
agcatatctttccttagttcagcctctgcatgagaacccagctttgcctgacaccttgattgcagccttgataagaccgccactctctcaacaccttctctgttgtctctgaagaatggaccttctactcttggtgctgtgtcccagggaagcaatggacatgaaatcctcctatgtaggctgagaacttatcccctagaaattatttccccagaaaagcaaatatacttttgacggagctctttaacactactatcattcagtaacattttcaatgaaaccatcttttgttaactctctggggtactgacaccatttaattcactgagaacagataataaacagaacatttaattcactgggagaaaataaacagaaagcctaattccacttggctgaatctgcctaagtccaacttttgcatataataaatgtttaaaataacg

SEQ ID NO: 11469 - protein, 60 aa, Homo sapiens [sequence omitted]

SEQ ID NO: 11470 - DNA, 443 bp, Homo sapiens
tatacctgcaaacaacaacaatgacaaaaacataaaattctgacctcatgaagcttttatcctagtaatggaaatagacaataggccactctctcaacaccttctctgttgtctctgaagaatggaccttctactcttggtgctgtgtcccagggaagcaatggacatgaaatcctcctatgtaggctgagaacttatcccctagaaattatttccccagaaaagcaaatatacttttgacggagctctttaacactactatcattcagtaacattttcaatgaaaccatcttttgttaactctctggggtactgacaccatttaattcactgagaacagataataaacagaacatttaattcactgggagaaaataaacagaaagcctaattccacttggctgaatctgcctaagtccaacttttgcatataataaatgttt

SEQ ID NO: 11471 - protein, 51 aa, Homo sapiens
ATLSTPSLLSLKNGPSTLGAVSQGSNGHEILLCRLRTYPLEIISPEKQIYF

SEQ ID NO: 11472 - DNA, 915 bp, Homo sapiens
gggctggtgaattaccagatctccgtcaagtgcagtaaccagttcaagttggaagtgtgtcttttgaatgcagaaaacaaggtcgtggacaaccaggctgggacccagggccagctgaaggtgctgggtgccaacctctggtggccgtacctgatgcacgaacaccccgcctacctgtactcgtgggagggcaggccagatggggctcaggctgtcggggcgctcacagctggcactttggctgtcgtaggtgtggctgactgcacagaagtcactggggcctttgacttctacacactccctgtggggctccgcactgtggccgtcaccgagagccagttcctcatcagcgggaaacctttctatttccacggcgtcaacaagcatgaggatgcggacatccaagggaagggcttcgactgtccgctgctggtgaaggacttcaacctgctttgctggcttggcgccaacaccttctgccccagccactatccctacacggaggagatgctgcagatatgttaccggtatgggattgtggtcatcgatgagtgtcctgctccctcgggccacaccgtgaccctctgtcccttcccttctggcccgctggcaactcttcaacaacgtgtctatgcatcaccatatgtgggtggtggaggaaccggtgctaagagacaagaaccacccgccatcatgatgtggtctgtggccaacgagcctgcgtccttcctggaatctgctggctactccttcaagatggtgattgctcacaccaaagccttggacccctcccagcctgtgacctttgtgaccaactccacctacgcagcagacaagggggtaaacaaagagcaccagaaattttcagtctttgggaaatatcgagaagagaatattctaaccaaactctcttga

SEQ ID NO: 11473 - protein, 253 aa, Homo sapiens
MHEHPAYLYSWEGRPDGAQAVGALTAGTLAVVGVADCTEVTGAFDFYTLPVGLRTVAVTESQFLISGKPFYFHGVNKHEDADIQGKGFDCPLLVKDFNLLCWLGANTFCPSHYPYTEEMLQICYRYGIVVIDECPAPSGHTVTLCPFPSGPLATLQQRVYASPYVGGGGTGAKRQEPPAIMMWSVANEPASFLESAGYSFKMVIAHTKALDPSQPVTFVTNSTYAADKGVNKEHQKFSVFGKYREENILTKLS

SEQ ID NO: 11474 - DNA, 677 bp, Homo sapiens
agggctggtgaattaccagatctccgtcaagtgcagtaaccagttcaagttggaagtgtgtcttttgaatgcagaaaacaaggtcgtggacaaccaggctgggacccagggccagctgaaggtgctgggtgccaacctctggtggccgtacctgatgcacgaacaccccgcctacctgtactcgtgggaggtgtggctgactgcacagaagtcactggggcctttgacttctacacactccctgtggggctccgcactgtggccgtcaccgagagccagttcctcatcagcgggaaacctttctatttccacggcgtcaacaagcatgaggatgcggacatccaagggaagggcttcgactgtccgctgctggtgaaggacttcaacctgctttgctggcttggcgccaacaccttctgccccagccactatccctacacggaggagatgctgcagatatgttaccggtatgggattgtggtcatcgatgagtgtcctgctgtgggcctgatgctgccatgagtccctgctgcgcacccgctctgcctggccagccctcgggccacaccgtgaccctctgtcccttcccttctggcccgctggcaactcttcaacaacgtgtctatgcatcaccatatgtgggtggtggaggaaccggtgctaagagacaagaacca

SEQ ID NO: 11475 - protein, 73 aa, Homo sapiens
MHEHPAYLYSWEVWLTAQKSLGPLTSTHSLWGSALWPSPRASSSSAGNLSISTASTSMRMRTSKGRASTVRCW

SEQ ID NO: 11476 - DNA, 906 bp, Homo sapiens
atggggttcaatgtggaggggggaggggctgctgcggcagctgcaggagccgatgtgccaggcctccttcttctcatgccggcatccatgctttcagctgtgaagggggcaggaatcagcgaggtgtactgggctgagtcccgggagtgggaacatgtggcaggaaggggatctgaggaggagaacaggggtcctggtggtctgtgcttcttcccagacacaggagctgtagaggggacctctgcagcagatgctaggggggccactaggcccaggcagtcttgggacttgggtctgtcctgctgtgcatccatagtgggtgctttagaaacgggagacccaccagaagcccctgttgcaagtgaggacaaagtgtgggaaggccgtgagggtctgcaatccgagatggccttgtcctcaacctgcagtgcactgttgatccgctgtaatgccgcctctttttccaggtgcaggtcttcagcagtgacccggtacccccgctctaagggaggtggcagcatcaaaggctcccctcgcctgcgtggcagcaggggaatcttgtgtctatggggcctagaggcctgagatctgggggagccaccccttggggcgagtgtctgccctggtgctgtatctgccgccttttcacaccgtgtgtgacccgaagagacagcctgaagcctgtcctcactcactgtcattgcgtaactgagggtcagctggcagtgggatgaggctggctccctcctctgctttagccccggcaagtctcccgtggagctgtaggagctggagatggcatttcttttggtgcacgagctcgcccaggaggtctgggatgtctggttatatctgatttctgagctctgggcattcagttctgtctgcagaggcccgggcctgggc

SEQ ID NO: 11477 - protein, 194 aa, Homo sapiens
MGFNVEGGGAAAAAAGADVPGLLLLMPASMLSAVKGAGISEVYWAESREWEHVAGRGSEEENRGPGGLCFFPDTGAVEGTSAADARGATRPRQSWDLGLSCCASIVGALETGDPPEAPVASEDKVWEGREGLQSEMALSSTCSALLIRCNAASFSRCRSSAVTRYPRSKGGGSIKGSPRLRGSRGILCLWGLEA

SEQ ID NO: 11478 - DNA, 978 bp, Homo sapiens
aagttagcaaccgaaggcgtccttagcagcagtggccgctgagatgtacgaacttccggttctccgggcagctgccactgctgtagcttctgccacctgccacgaccgggcctctccctggcgtttggtcacctctgcttcattctccaccgcgcctatggtccctcttggagccagcgtggcgggcctggcggctcccgggtggtgagagagcggtccgggaacgatgaaggcctcgcagtgctgctgctgtctcagccacctcttggcttccgtcctcctcctgctgttgctgcctgaactaagcgggcccctggcagtcctgctgcaggcagccgaggccgcgccaggtcttgggcctcctgaccctagaccacggacattaccgccgctgccaccgggccctacccctgcccagcagccgggccgtggtctggctgaagctgcggggccgcggggctccgagggaggcaatggcagcaaccctgtggccgggcttgagacggacgatcacggagggaaggccggggaaggctcggtgggtggcggccttgctgtgagccccaaccctggcgacaagcccatgacccagcgggccctgaccgtgttgatggtggtgagcggcgcggtgctggtgtacttcgtggtcaggacggtcaggatgagaagaagaaaccgaaagactaggagatatggagttttggacactaacatagaaaatatggaattgacacctttagaacaggatgatgaggatgatgacaacacgttgtttgatgccaatcatcctcgaagataagaatgtgccttttgatgaaagaactttatctttctacaatgaagagtggaatttctatgtttaaggaataagaagccactatatcaatgttgggggggtatttaagttacatatattttaacaacctttaatttgctgttgcaataaataccgtatccttttattatatctttatatgt

SEQ ID NO: 11479 - protein, 190 aa, Homo sapiens; identical to SEQ ID NO: 1076

SEQ ID NO: 11480 - DNA, 1353 bp, Homo sapiens
aagttagcaaccgaaggcgtccttagcagcagtggccgctgagatgtacgaacttccggttctccgggcagctgccactgctgtagcttctgccacctgccacgaccgggcctctccctggcgtttggtcacctctgcttcattctccaccgcgcctatggtccctcttggagccagcgtggcgggcctggcggctcccgggtggtgagagagcggtccgggaacgatgaaggcctcgcagtgctgctgctgtctcagccacctcttggcttccgtcctcctcctgctgttgctgcctgaactaagcgggcccctggcagtcctgctgcaggcagccgaggccgcgccaggtcttgggcctcctgaccctagaccacggacattaccgccgctgccaccgggccctacccctgcccagcagccgggccgtggtctggctgaagctgcggggccgcggggctccgagggaggcaatggcagcaaccctgtggccgggcttgagacggacgatcacggagggaaggccggggaaggctcggtgggtggcggccttgctgtgagccccaaccctggcgacaagcccatgacccagcgggccctgaccgtgttgatggtggtgagcggcgcggtgctggtgtacttcgtggtcaggacggtcaggatgagaagaagaaaccgaaagactaggagatatggagttttggacactaacatagaaaatatggaattgacacctttagaacaggatgatgaggatgatgacaacacgttgtttgatgccaatcatcctcgaagataagaatgtgccttttgatgaaagaactttatctttctacaatgaagagtggaatttctatgtttaaggaataagaagccactatatcaatgttgggggggtatttaagttacatatattttaacaacctttaatttgctgttgcaataaataccgtatccttttattatatctttatatgtatagaagtactctgttaatgggctcagagatgttggggataaagtatactgtaataatttatctgtttgaaaattactataaaacggtgttttctgatcggtttttgtttcctgcttaccatatgattgtaaattgttttatgtattaatcagttaatgctaattatttttgctgatgtcatatgttaaagagctataaattccaacaaccaactggtgtgtaaaaataatttaaaatttcctttactgaaaggtatttcccatttttgtggggaaaagaagccaaatttattactttgtgttggggtttttaaaatattaagaaatgtctaagttattgtttgcaaaacaataaatatgattttaaattctctt

SEQ ID NO: 11481 - protein, 190 aa, Homo sapiens; identical to SEQ ID NO: 1076

SEQ ID NO: 11482 - DNA, 1411 bp, Homo sapiens
aagttagcaaccgaaggcgtccttagcagcagtggccgctgagatgtacgaacttccggttctccgggcagctgccactgctgtagcttctgccacctgccacgaccgggcctctccctggcgtttggtcacctctgcttcattctccaccgcgcctatggtccctcttggagccagcgtggcgggcctggcggctcccgggtggtgagagagcggtccgggaacgatgaaggcctcgcagtgctgctgctgtctcagccacctcttggcttccgtcctcctcctgctgttgctgcctgaactaagcgggcccctggcagtcctgctgcaggcagccgaggccgcgccaggtcttgggcctcctgaccctagaccacggacattaccgccgctgccaccgggccctacccctgcccagcagccgggccgtggtctggctgaagctgcggggccgcggggctccgagggaggcaatggcagcaaccctgtggccgggcttgagacggacgatcacggagggaaggccggggaaggctcggtgggtggcggccttgctgtgagccccaaccctggcgacaagcccatgacccagcgggccctgaccgtgttgatggtggtgagcggcgcggtgctggtgtacttcgtggtcaggacggtcaggatgagaagaagaaaccgaaagactaggagatatggagttttggacactaacatagaaaatatggaattgacacctttagaacaggatgatgaggatgatgacaacacgttgtttgatgccaatcatcctcgaagataagaatgtgccttttgatgaaagaactttatctttctacaatgaagagtggaatttctatgtttaaggaataagaagccactatatcaatgttgggggggtatttaagttacatatattttaacaacctttaatttgctgttgcaataaataccgtatccttttattatatctttatatgtatagaagtactctgttaatgggctcagagatgttggggataaagtatactgtaataatttatctgtttgaaaattactataaaacggtgttttctgatcggtttttgtttcctgcttaccatatgattgtaaattgttttatgtattaatcagttaatgctaattatttttgctgatgtcatatgttaaagagctataaattccaacaaccaactggtgtgtaaaaataatttaaaatttcctttactgaaaggtatttcccatttttgtggggaaaagaagccaaatttattactttgtgttggggtttttaaaatattaagaaatgtctaagttattgtttgcaaaacaataaatatgattttaaattctcttaaagtggtccaaattatgtgtttataaaataaacataagactatagaattaaaaatta

SEQ ID NO: 11483 - protein, 190 aa, Homo sapiens; identical to SEQ ID NO: 1076

SEQ ID NO: 11484 - DNA, 633 bp, Homo sapiens
aagttaagggatgatttcaagtgctcggaaagtacagcaaataaggaaatatccagagcattgacagtagtggagtgatttgcttgtacctgatttatttggaggctggagctacaacctgtgctcatcagtgtgactgagagtccccagtctgcatattctccgtacttggctacttgatgctgatcctctggtgaggtctactgctgacccagacaatgcaagctctggtctttaccctttgcccatcagccctttccctcctcctctgacaccaactttcatcttccctgcagccagagttttccaggcatgaaaaagtgactctcttctcagatatgacaggcagaaaagctgccacttacactgagtgcactttgggtctttagaggaaagtaaggggaattcaaatgaggggaacccttcatgtagcttcgcagttaactaactttgatgactgtttatctttcatcttcacagctgtttttttgaagcaaatatatttaaggaaaatagtaaactagatcctaaagtttaaaatacctttccttgttgtatcctctgctttctttttccttgtctattaagtttaagacaaatttacaatgaaaataaagtggacctctgatggta

SEQ ID NO: 11485 - protein, 37 aa, Homo sapiens
MRGTLHVASQLTNFDDCLSFIFTAVFLKQIYLRKIVN

SEQ ID NO: 11486 - DNA, 498 bp, Homo sapiens
cccggtgctgggtaaattagagaaaatgaggaacaaaaccacacctggaatctgaaactaaaattaactttttccagcaatgtcctattgtgtccggaattggtgggttcttggtctcactgacttcaagaatgaagccgcggaccctcgcgctgtcagaaagagataaatgaattcttagagtttgggtgcacagaatattgtcttatggaacttcaaaaatcgttagatccatcttcataaaaagaactcttgcagtcaaataacctgtttccaggaaaggaatggccatggcatatagaccaacctcgacttgcgtatgaaactacactaatgggcatcaagtttatttgaattcgagatataaactgaacgtctgccagagaagaattgatttgatatttttatataatctgtattttagtaaactaaagtctatgtatgtaatctgatatatatgtaataaataaatatgcataataaatagcaggccagagt

SEQ ID NO: 11487 - protein, 30 aa, Homo sapiens
ILRVWVHRILSYGTSKIVRSIFIKRTLAVK

SEQ ID NO: 11488 - DNA, 641 bp, Homo sapiens
cccggtgctgggtaaattagagaaaatgaggaacaaaaccacacctggaatctgaaactaaaattaactttttccagcaatgtcctattgtgtccggaattggtgggttcttggtctcactgacttcaagaatgaagccgcggaccctcgcgctcaaaatactcttatttgagcctaagaagagaactaagaggagaaaggaatgtgcagctgtgagggtcttaaaagcaaatgaatctaaggtctgtttcctagtgctacctttagggtctcttacccttggaactctacacagctgtcagaaagagataaatgaattcttagagtttgggtgcacagaatattgtcttatggaacttcaaaaatcgttagatccatcttcataaaaagaactcttgcagtcaaataacctgtttccaggaaaggaatggccatggcatatagaccaacctcgacttgcgtatgaaactacactaatgggcatcaagtttatttgaattcgagatataaactgaacgtctgccagagaagaattgatttgatatttttatataatctgtattttagtaaactaaagtctatgtatgtaatctgatatatatgtaataaataaatatgcataataaatagcaggccagagt

SEQ ID NO: 11489 - protein, 84 aa, Homo sapiens [sequence omitted]

SEQ ID NO: 11490 - DNA, 6057 bp, Homo sapiens
tgacgcccccgaacccagctgcagaagctgccgccacctccaatgcacaaggtgtctcatctgaaaagaaacctgagccccagggaggcggcgcggagcgaccctggcagagctggcgcaaacagggcgagaggtcgctgggcagcgttcgaggaccagagggagctcggccacagaagaccccagtgatctgatcccgggatcccggctccaagctctcctcgcattttacagatttcacccccgcgactatctccccaaaacggagcctttatatcaagagaaggtgcgggagctggggcaaccaggactttctcgggcacccaagatgcgctccattaggaagaggtggacgatctgcacaataagtctgctcctgatcttttataagacaaaagaaatagcaagaactgaggagcaccaggagacgcaactcatcggagatggtgaattgtctttgagtcggtcacttgtcaatagctctgataaaatcattcgaaaggctggctcttcaatcttccagcacaatgtagaaggttggaaaatcaattcctctttggtcctagagataaggaagaacatacttcgtttcttagatgcagaacgagatgtgtcagtggtcaagagcagttttaagcctggtgatgtcatacactatgtgcttgacaggcgccggacactaaacatttctcatgatctacatagcctcctacctgaagtttcaccaatgaagaatcgcaggtttaagacctgtgcagttgttggaaattctggcattctgttagacagtgaatgtggaaaggagattgacagtcacaattttgtaataaggtgtaatctagctcctgtggtggagtttgctgcagatgtgggaactaaatcagattttattaccatgaatccatcagttgtacaaagagcatttggaggctttcgaaatgagagtgacagagaaaaatttgtgcatagactttccatgctgaatgacagtgtcctttggattcctgctttcatggtcaaaggaggagagaagcacgtggagtgggttaatgcattaatccttaagaataaactgaaagtgcgaactgcctatccgtcattgagacttattcatgctgtcagaggttactggctgaccaacaaagttcctatcaaaagacccagcacaggtcttctcatgtatacacttgccacaagattctgtgatgaaattcacctgtatggattctggcccttccctaaggatttaaatggaaaagcggtcaaatatcattattatgatgacttaaaatataggtacttttccaatgcaagccctcacagaatgccattagaattcaaaacattaaatgtgctacataatagaggagctctaaaactgacaacaggaaagtgtgtaaagcaataaagcacattttgaaacaaacaatatgcacttcttttctgaagatgcttccgaagatttgaaaataggatccaaaacacggctgggtttcagcatccaccaatgaactgaaaggtgaataaaggacgttcatgagaaatcgactaccagctgatgaaatacctgcaaagtgctctaaaaattaaatattttgactttaagggtcctagtaagtgccacttccactaagaatacagtttgaatgtataatcagtagtgtttacaagatccaacagtgcactcatcattagttaacaaagcaaatatgttcatcactgtcaggctgcccacagcaacaccaagcatattagaagaggaaccccaggaacgcaactcagaccttgggaaattaaaccatccttgtcagcagaagccaagatggaagcagtttgagcaatgaaatccgtaagattaaacaactcaagtaaatgcttcagtcaggactctgagtctgatcatgaattttatgttttaatttatgttttttttttgtcttctggaatctcttttggtttggatattgggatgcttagaaatcctttctgagatgcatatgagtgaggaaataaactttaagtaattatttttaaagttcttatactttttaaaagctatcacacaaagacttttttttttttttttgtctcgctctgttgcccaggctggagtacagtggcgcgatctcagctcactgcaagctccgcctcccaagttcactccattctcctgcctcagcctccggagtagctgggactgcaggcgcctgccaccacgcctggctaattttttgtatttttagtggagacggattttcaccgtgttagccaggatggtctcaatctcctgacctcgtgatccacccgccttggcctcccaaagtgctgggattacaggcgtgagccaccgtgcctggccgacatttttaaaaaagttttattttgcacggctctaaacctccatgttattttccagtggtgtagaaggtaccagctaaagtgaaccactatgtaatattaggccattctaaaggaaagatgttccatgtcatcagagatggtaaaataggccgggaaaaaaaaatctttggtaccaaagattacacttgtgtttctacacagcaaaccatttttctttcatgaaaataatatattattaacatgaatatattattttgctattaatgtgaaagttgtctctaaatattttttaattttcaaactcatactttattttcatttgaaatgtttttcacaccttttgcattacataataattttgtggaagcattttgccctttagaataaatattagattgatatagctgaaatgtgacttccagttctttgatattccccttgttattcaaatagaaatatggaaatgctttatatattactgttaaatttcttagtgcagaaataacattattaatagagtattgttttcaaaacagagatgattaatttcaagaggtttaacagtgaaattgtgtcaatattttgcatttaaaatgaatttaattgaccgatattttctgtagttaaatttagtcacaatatcacatatgttcttcaagaaacacatgaaattattaataaagtaattaaaaaatttttaatgtataacagaattgaccaataggccagttttctggtaacttatgatagtagattgtttctttagaaactgggcagaagctctgcattctcacttgtactttgatttcttatttcttgggcaggcaatttgaggaaagaagaaatggcatggggaatatatatgttttgtttcttagggaaaacagtctgagaaatgaataaaaagcatgaagtacgtgtgtgtgtgtgtgtgttaccatggaaaaggatattcacagtagtacagttctcaatatttttaattagatgtcatatttttttaatatagtaaaaccttgggatatagaatattacatcttttgagaatgtatgtgtctctaagtaagtaaaatctaatgcgtataggagactgatagctaaaaatgaatggaacattaatgtacttttataattaaacctcttatctatcagaaattgtaagagaatagatacatgttttgaatgtaaagttgaaaagtctggtttacttaataaattgaaagtgatttataaaatctaaatttggactacttgcaaatgataagctattctagtagcctttagtttaaatccaacagaaatctagaagtcacaagcaaatatcttaaaggtaaaatccatctgggcactcatttaaagtatatcttaaaaaagcagcagcaaggtaccttgccatttttagcatattttcttcctttttcttttttcttttttttttttttttgagatggagtctcactctgtcacacaggctggaatgcagtgatgccatctcagctcactgcaacctccacctcctgggttcaagtgattctcgtgcctcagcctcccaagtagctggggttacaggcgcccaccaccacactcggctaattttgtgtttttagtagagacaaagtttcaccatgttggccaggctggtcttgaacttcctgacctcaggttatccacccacctcagcctcccaaagtgctgggattacaggtgtgagccaccgcagccggaccatttttagtatattttcagtaaatacatttaaacaatgttaaggccacagcacacatatctcagccattcattgttctgtgcattgatgtttatctcatagatgcattgagtagtgcctttttagctttttcacattactttgtcaccatatcctttgtgttctctaaatacattgcccacttccaaaaatgttcagcatgaaaaaaagggcttcagtgtcgattgagattgcttttgttcatctcagggatttcaatagtcaagaatgaattcagttaaaggtatttagggttcaaagaagacaaactgtacaagcccatttcattccttgttgtatacctttccatctgccctcccattttaactatctactgtggcctttttatggaaacagagcaagatcaatgaaggctaatggcaagaataagaaaaagagttgagatttaaccaatagcggagcataaaggatcatgacaaaatcaaattataaaagcatacttgaaataggtggagctttttcttttgaaaatatatattcacaattttaatattttaatttattttttactatttaaccctgtacttggcaatgctcaggcagctgattgtgaaatattcttgtcctttacagaacatggttgttattgtgctgttgacatgaatagaccatggaaacattttcatcattattattcagcctgtgctgtagttaatgttaagttgctgaaataaaaagtgagcaagtaatagattttcttggcaaatctaatgattcagcccacaggactgttgaaactactgcggaagtttttctatctgaaagaaggtgctgggcattcaaatgtgttcatgtattgtatatcatatgaattgtatatcaattactaatgggaatttctacatatatgcttacaaaagcaatttatttaagtaatgctaggggtagtgtacataccaattagttattcagctactatacagaaaaaggatgaacaaattaatttatttctaattgagccagttagacataatgcatataacgtgatatttggttcatgaaagagttgttttcatgtggttattgtagggagtatatataattgtggaaggggtatgggaagagttgtgtatagttagttgttatctctacaagtttgaaagttttcccatcaaacattatcaatataccaatgttttaaaaattgagtgagggttattatttgtatttgatgaaagaaaatccaaataaagcccacctagaaatagatattttattatatatgtgctatagatatacctatatagtacaaatagacatgtgtgatgcatatatacaatgttatatatgtgtatatgtctgtatacacactgagtctgtaatatgtatacactaaatttgtgttatgctaacatcttcagggtctgcactgtgaactcccctggagataagtaagtccactttagaataaagaagttcttttgagacttcagttactaacgtgctttaagaggtatctactttataactgaattctatgtcgttcatacgtagagttacagtaagggtctagtatgtccaaatcttaataataaagaagaaaagtaaaggcttcaagctagcaatgtattcgaattacagttttcagattgtggctccaggccttgtgtttctcatttaagtagcaccttttaataaaaaccgtttctttgtgtaggcaaaagcacaagtgtttcaaatgtaaatagcaggaaaaaaaaagagtttacagagatagcattgctgcacagaataattgctactgagtatttcttatagaatttgtggaactgaaagatgaggtttattctgtcaagttcaagttcattctgttcaacactgttttcttattgtttgtgtatagcaaccgggtattattgttttatcatttgtaaaattgtaaaataaattaatccctttttttcactgtt

SEQ ID NO: 11491 - protein, 359 aa, Homo sapiens; identical to SEQ ID NO: 1078

SEQ ID NO: 11492 - DNA, 3599 bp, Homo sapiens
tgacgcccccgaacccagctgcagaagctgccgccacctccaatgcacaaggtgtctcatctgaaaagaaacctgagccccagggaggcggcgcggagcgaccctggcagagctggcgcaaacagggcgagaggtcgctgggcagcgttcgaggaccagagggagctcggccacagaagaccccagtgatctgatcccgggatcccggctccaagctctcctcgcattttacagatttcacccccgcgactatctccccaaaacggagcctttatatcaagagaaggtgcgggagctggggcaaccaggactttctcgggcacccaagatgcgctccattaggaagaggtggacgatctgcacaataagtctgctcctgatcttttataagacaaaagaaatagcaagaactgaggagcaccaggagacgcaactcatcggagatggtgaattgtctttgagtcggtcacttgtcaatagctctgataaaatcattcgaaaggctggctcttcaatcttccagcacaatgtagaaggttggaaaatcaattcctctttggtcctagagataaggaagaacatacttcgtttcttagatgcagaacgagatgtgtcagtggtcaagagcagttttaagcctggtgatgtcatacactatgtgcttgacaggcgccggacactaaacatttctcatgatctacatagcctcctacctgaagtttcaccaatgaagaatcgcaggtttaagacctgtgcagttgttggaaattctggcattctgttagacagtgaatgtggaaaggagattgacagtcacaattttgtaataaggtgtaatctagctcctgtggtggagtttgctgcagatgtgggaactaaatcagattttattaccatgaatccatcagttgtacaaagagcatttggaggctttcgaaatgagagtgacagagaaaaatttgtgcatagactttccatgctgaatgacagtgtcctttggattcctgctttcatggtcaaaggaggagagaagcacgtggagtgggttaatgcattaatccttaagaataaactgaaagtgcgaactgcctatccgtcattgagacttattcatgctgtcagaggttactggctgaccaacaaagttcctatcaaaagacccagcacaggtcttctcatgtatacacttgccacaagattctgtgatgaaattcacctgtatggattctggcccttccctaaggatttaaatggaaaagcggtcaaatatcattattatgatgacttaaaatataggtacttttccaatgcaagccctcacagaatgccattagaattcaaaacattaaatgtgctacataatagaggagctctaaaactgacaacaggaaagtgtgtaaagcaataaagcacattttgaaacaaacaatatgcacttcttttctgaagatgcttccgaagatttgaaaataggatccaaaacacggctgggtttcagcatccaccaatgaactgaaaggtgaataaaggacgttcatgagaaatcgactaccagctgatgaaatacctgcaaagtgctctaaaaattaaatattttgactttaagggtcctagtaagtgccacttccactaagaatacagtttgaatgtataatcagtagtgtttacaagatccaacagtgcactcatcattagttaacaaagcaaatatgttcatcactgtcaggctgcccacagcaacaccaagcatattagaagaggaaccccaggaacgcaactcagaccttgggaaattaaaccatccttgtcagcagaagccaagatggaagcagtttgagcaatgaaatccgtaagattaaacaactcaagtaaatgcttcagtcaggactctgagtctgatcatgaattttatgttttaatttatgttttttttttgtcttctggaatctcttttggtttggatattgggatgcttagaaatcctttctgagatgcatatgagtgaggaaataaactttaagtaattatttttaaagttcttatactttttaaaagctatcacacaaagacttttttttttttttttgtctcgctctgttgcccaggctggagtacagtggcgcgatctcagctcactgcaagctccgcctcccaagttcactccattctcctgcctcagcctccggagtagctgggactgcaggcgcctgccaccacgcctggctaattttttgtatttttagtggagacggattttcaccgtgttagccaggatggtctcaatctcctgacctcgtgatccacccgccttggcctcccaaagtgctgggattacaggcgtgagccaccgtgcctggccgacatttttaaaaaagttttattttgcacggctctaaacctccatgttattttccagtggtgtagaaggtaccagctaaagtgaaccactatgtaatattaggccattctaaaggaaagatgttccatgtcatcagagatggtaaaataggccgggaaaaaaaaatctttggtaccaaagattacacttgtgtttctacacagcaaaccatttttctttcatgaaaataatatattattaacatgaatatattattttgctattaatgtgaaagttgtctctaaatattttttaattttcaaactcatactttattttcatttgaaatgtttttcacaccttttgcattacataataattttgtggaagcattttgccctttagaataaatattagattgatatagctgaaatgtgacttccagttctttgatattccccttgttattcaaatagaaatatggaaatgctttatatattactgttaaatttcttagtgcagaaataacattattaatagagtattgttttcaaaacagagatgattaatttcaagaggtttaacagtgaaattgtgtcaatattttgcatttaaaatgaatttaattgaccgatattttctgtagttaaatttagtcacaatatcacatatgttcttcaagaaacacatgaaattattaataaagtaattaaaaaatttttaatgtataacagaattgaccaataggccagttttctggtaacttatgatagtagattgtttctttagaaactgggcagaagctctgcattctcacttgtactttgatttcttatttcttgggcaggcaatttgaggaaagaagaaatggcatggggaatatatatgttttgtttcttagggaaaacagtctgagaaatgaataaaaagcatgaagtacgtgtgtgtgtgtgtgtgttaccatggaaaaggatattcacagtagtacagttctcaatatttttaattagatgtcatatttttttaatatagtaaaaccttgggatatagaatattacatcttttgagaatgtatgtgtctctaagtaagtaaaatctaatgcgtataggagactgatagctaaaaatgaatggaacattaatgtacttttataattaaacctcttatctatcagaaattgtaagagaatagatacatgttttgaatgtaaagttgaaaagtctggtttacttaataaattgaaagtgatttataaaatct

SEQ ID NO: 11493 - protein, 359 aa, Homo sapiens; identical to SEQ ID NO: 1078

SEQ ID NO: 11494 - DNA, 1845 bp, Homo sapiens
gctgcagaagctgccgccacctccaatgcacaaggtgtctcatctgaaaagaaacctgagccccagggaggcggcgcggagcgaccctggcagagctggcgcaaacagggcgagaggtcgctgggcagcgttcgaggaccagagggagctcggccacagaagaccccagtgatctgatcccgggatcccggctccaagctctcctcgcattttacagatttcacccccgcgactatctccccaaaacggagcctttatatcaagagaaggtgcgggagctggggcaaccaggactttctcgggcacccaagatgcgctccattaggaagaggtggacgatctgcacaataagtctgctcctgatcttttataagacaaaagaaatagcaagaactgaggagcaccaggagacgcaactcatcggagatggtgaattgtctttgagtcggtcacttgtcaatagctctgataaaatcattcgaaaggctggctcttcaatcttccagcacaatgtagaaggttggaaaatcaattcctctttggtcctagagataaggaagaacatacttcgtttcttagatgcagaacgagatgtgtcagtggtcaagagcagttttaagcctggtgatgtcatacactatgtgcttgacaggcgccggacactaaacatttctcatgatctacatagcctcctacctgaagtttcaccaatgaagaatcgcaggtttaagacctgtgcagttgttggaaattctggcattctgttagacagtgaatgtggaaaggagattgacagtcacaattttgtaataaggtgagctttcttctgctttttgagattgtaagtttttcaaagatattttacttgggggtggaaaactgttagaaaattttaaagtattactaaaacctcaaacaaatatttgtctatgatatccttttctgtgcaacatttaaattacatttaccctggaatagaatattataattattgcgtagttgaaagaaaaagtgatcctgtcatagcaacaagattcacacagctttttttggtgaggtgaggggggaggcaaatggcaattttattaaatttaatattccacacaaacttttttcttagtatctcttcttcatactcattagttttgtgtgattttatttgttgtataaagattatgaatattactatggaatgatgtaatagatttatgttaatgttactttttattaataattatctaggagatagtaagaacatagtttagcaagtttatatttgatatcctgagccatatttctttaatttctctttatatgtggtatttgtgtatgttagtatatttgaattttatgtttttttaacataattaagcgtgcatgtttgtttttcattaacggttaaaagatatttgatgaattgtgtgtttgattaacctattaactgaaaaaaactcaacagtagaaatggaattataatcacatcataaatataagcagtttttaatgatcaatttttatatctgtacagtttttttggattgttttagttccttagaaaaattagctaaatgacagaaacatggatattgaaatatgaaatagtacaatataaagatagatagaaaagtatgctgagttgacatgttgaaaaacacagtctcttgaagatatactggaatacattatttttgaatattttgaatattttttgaatatttttaaataaagtcttaaaagcataaataggtaactacttttaaaaaaaaagtcatgagaaatcacactcaagcattatcaagtgaagaaaattcataatagcaaataaaactgcaaacattttacctt

SEQ ID NO: 11495 - protein, 168 aa, Homo sapiens; identical to SEQ ID NO: 1080

SEQ ID NO: 11496 - DNA, 5331 bp, Homo sapiens
cccacgccgcgccttccggttggtccttgaggcgacgggtgaggcacagctgagcgccaaagccacaggctggggcgctaacgcccccgctcagcgctctgcgctccagacagctgcgagctggagtaggaaggttcaggcggtggcggagagtgcgctggaggctggagggccaggaggcgggaagcttcccgcacgggggcgctgtcacctgcctgtgggaggagccagagagggacctggctctgctgctctgaagcaccggagtcgggagaacccatccagacatgaagagcgccaaaggtattgagaacttggcttttgtcccctccagcccagacatcctgcgccgcttgtctgcgtcgccctcccaaatcgaagtctctgccttgtcctctgacccccaaagagagaattctcagccacaggagcttcagaagccccaggagccccagaagtcaccagagccatctctgccttcagcccctcccaatgtctccgaagagaagctccggtcactgtcgctgtccgagtttgaggaggggtcttacggctggaggaacttccatcctcaatgtctccagcgctgcaacacacctggaggctttctgcttcactactgcctcttggccgtcacgcaaggtattgtagttaatggcctagtaaatattagcatttccactgttgagaagcgttatgaaatgaagagttccctgactggcctgatttcatcaagctacgatatttcattctgtttgttgtctttatttgtatcattctttggtgaaagaggacataagccgagatggcttgcatttgcagcctttatgattggactgggagcacttgtattctcattgccacaatttttcagtggagaatataaattggggtctctttttgaagacacttgtgtaacaacaaggaatagcaccagttgtacatcttcaacttcttcactttctaactacttgtatgtcttcatcttgggacaactattgctgggggcaggaggaactcctctttatactctgggaacagcctttcttgatgattctgtgcccacacacaagtcttctctctatataggaaccggttatgctatgtcaatcttaggccctgctattggctatgtattgggaggacaactgctaaccatatacattgatgttgctatgggagaaagcactgatgtcactgaggatgatccgcgatggttgggagcttggtggattgggtttcttctatcatggatctttgcttggtctttaataatacctttttcttgctttccaaaacatttaccaggtacagcagaaattcaagctggaaaaacttcccaggctcatcagagtaatagtaatgcagatgtgaaatttggaaaaagtattaaagattttccagctgctctaaagaatttgatgaagaatgctgtctttatgtgtttagttctatcaacttcttcagaagccttaattactactggatttgctacatttttacctaaatttatagaaaatcaattcggattgacatccagcttcgcagctactcttggaggggctgttttaattcctggagctgctctcggtcaaattttaggtggcttccttgtttcaaaattcagaatgacatgtaaaaacacaatgaagtttgcactgttcacatctggagttgcacttacgctgagttttgtatttatgtatgccaaatgtgaaaatgagccatttgctggtgtatctgaatcatataatgggactggagaattgggaaacttgatagccccttgtaatgccaattgtaactgttcgcgatcatattattatcctgtctgtggagatggagtccaatatttttctccctgctttgcaggctgttcaaacccagttgcacacaggaagccaaaggtatattacaactgttcctgtattgaaaggaaaacagaaataacatccactgcagaaacttttggttttgaagctaaagctggaaaatgtgaaactcattgtgcgaaactgcccatattcctttgcattttctttattgtaattatttttacctttatggccggtactcctataactgtgtctatcctaaggtgtgttaatcacagacaacggtccctagccttgggaatacaatttatggtccttcgattattagggacaattcctggaccaattatatttggtttcacaatagacagcacatgtattctttgggatataaatgattgtggaattaaaggagcttgctggatttatgataacatcaagatggcccatatgctagtagccataagtgttacttgtaaagttatcaccatgttcttcaatggatttgcaatctttttgtataaaccacctccatcagccacagatgtgtcatttcataaagagaatgcagttgtgactaatgttttagcagaacaggatctcaacaaaatagtaaaagaagggtgaaatgggaaaagagaagactgttttacacctggaaaatttacctcgatttttaagaacacacattgccatggcaggattatctatccaatatggacaatcatatttacaaaattgatgtttttataatcaaatgtatttttttacttatgtagtttttgttttatgcaagaaacagacctgtgccttcaaagcccacgtaaagcctcaaaacacagcacacacacacacgagcacacacacacacacacacacgaacacacacacacacacacacacgcacacatacacacttatttcctattcccattgtctaggtatgaaatcctcaagcaataacaagaaaaaaggcccacaattagaaaaatttacatttaaaaaaaatgttgtttctatccccattacaacttgtttaattttaattttcattgtcaatattttgagcttagaacatttatggtataaaaatttaaactaatcaaagttgtgtgatgatttccgggaattattattgaaagcctatgaatttaaaaccaggtttaccatgtaatttgtttttaaatttatgtatactagcctggcctttctccaagcaaattattgaactattagaatatgttagttatcatccttgtgtcttagtatatagtgaatacagaaacatcagcattgtatacacatattttcactttaactcaagaattccaggaggtaatttgttgatattacaatttttaacacatttatgattctgtgataatattattcaattgcatatatttcagaggaaagtaccagtcagtaaagaaaaatgccaactaaacatgaaactattgatcaatacttatatacctttaatttttcctatttgaaaagccaaccacttaacacattactcatagcacctaagacagtgccttgcatagtgtagtcatctattattattgtttaattagaatattaaaccctaccctttaactcagcagtccccaaccttttttgcatcagggaccatttttgtggaagacaatttttccatgggggaagaaggtatggttttgagatgaaactgctccacctcagaccatcaggcattagttagattctcataaggagagtgcaacctagatcccttgcatgtgcagttcccaatggagtgtgcactcctatgagaatctaatgccactactgatctaacaagaggtggagctcaggcagtaatgctcactcacctgcctctcagctcaccaactgtgtggcccgattcctaacaggccacacacagcccagggctggggacccctgctttaactgatgcattgatttgataaagtattttacaagcctgataatgttataaccctgtttattcaggtcagatttatgccaactttgctgagaatatggagggtatagatgagtgaacatcaacaaacataacttctaccatggttaagaattttacttaggaaaagtattgaagttcaaatccagatagtattacatttgaaattgttataagggttattaatttaataaaattcatcatcaggtttcccctataagctttctcctaggttaattttccacaagcattgttttatatacactgtaatcaggataacacaagcttagtgttagatcttgtaggaaaccaagattagaaacattagaaatttgcagaatttaagaaattatgttttgtggtaatctatggccaacgatgttagaacctagcgcaattgtaaagtgaaattcaaggagaaggaatgaggagttagggaagcagcatacttgaatattagagaaggagaggagctgtgggtcaggaatcagagagacctgctaaaaccagacagatataaacaccaaagacggaagccaaataggtagccaaaaatccagatatttgagaagcaggaaatttatagcaaccaaagaaatagggcaagagaggcaggtgaacacacatgatacctcaattgacaatcttcctcccaccaagccagacacgttgtaaatgctgcttcctattggagcccagaaaaaaggaaaaggaaagtttaggctttctttgtcctttgtgtggaagcagggaattggattgaagactttcatagttgtaacataaaggcaaatcctgaggaactcactgatggagatgtgaaatggcagtaaggaagaaaacagaataactgaacaaatatattagtctagggccacttaatttagaggaagaaaaaaaatcaacccatccatagaaatagtttgataaacaggtcactaaatcattggcgtttataaagattcttagctatcaagggctgcattgtattttatatactcagttttataaggtgatactttttaaataagcgctttaatgaaaatggttagactgaaaataattttggtccttaaaaggagtcaggagcttttatatataaggtacatattttaaaagaatacctcctttataacagggttttacagacactaccataatttataatcattattttttacttttgggttcacctagatcatatgagttgatgtgatacttctagaacaaaattattcatagtgcgttttttgtaatttatgattgttaagtaagcttgacttataaattgacattgtaattgtgtacataattggatatatgtgttaaaatttaacatttagatttacttaattgtagaaaatacaaatgtaaaacttacacatggaaagaactgtatgcagttgactttactatgtaaattggagggaaacaaagttttagatccattttctttcaaaattttctttattgtaaagtatgcaaaatatatattcataccatttattaaatcagaatgtttataca

SEQ ID NO: 11497 - protein, 724 aa, Homo sapiens; identical to SEQ ID NO: 1082

SEQ ID NO: 11498 - DNA, 672 bp, Homo sapiens
caggatatggagaaatggggagttgtagtcctttaacaggccagcttaaactctgtcaattggctaaagattcttagtacaattgatgcaccagaaaaaaaaaatgattagccttgaatctagcatacattcttagtgctaataacaatgatgtgctgattatatcattgctatttactttcagggttgtacctgacaaactgcgttctctggccttgggtgtaagctatgtgattttgagaatatttgggactattcctggaccatcaatctttaaaatgtcaggagaaacttcttgtattttacgggatgttaataaatgtggacacacaggacgttgttggatatataacaagacaaaaatggctttcttattggtaggaatatgttttctttgcaaactatgcactatcatcttcactactattgcatttttcatatacaaacgtcgtctaaatgagaacactgacttcccagatgtaactgtgaagaatccaaaagttaagaaaaaagaagaaactgacttgtaactggatcatcattgtattctccaagatttgtttctgtgcccaactttcagaagaggaaaatcacacattatgtttacataagtagcaaaaatatatttatggtgatctgcattttcataataaagtgtcctattgtgaaaca

SEQ ID NO: 11499 - protein, 83 aa, Homo sapiens
MSGETSCILRDVNKCGHTGRCWIYNKTKMAFLLVGICFLCKLCTIIFTTIAFFIYKRRLNENTDFPDVTVKNPKVKKKEETDL

SEQ ID NO: 11500 - DNA, 2473 bp, Homo sapiens
tttgcctcctgccctaggagaaacgttcgctctggaggcttgggcggcaagagccccttgtggccaccgagtcctccgacgccctcgccaggctggcctttgggttggcccaggcaggacgggcagccgagagcactcgggccgcgtcgccaggagccgcccagggtgagccatgttcgtaggcgtcgcccggcactctgggagccaggatgaagtctcaaggggagtagagccgctggaggccgcgcgggcccagcctgctaaggacaggagggccaagggaaccccgaagtcctcgaagcccgggaaaaaacaccggtatctgagactacttccagaggccttgataaggttcggcggtttccgaaaaaggaaaaaagccaagtcctcagtttccaagaagccgggagaagtggatgacagtttggagcagccctgtggtttgggctgcttagtcagcacctgctgtgagtgttgcaataacattcgctgcttcatgattttctactgcatcctgctcatatgtcaaggtgtggtgtttggtcttatagatgtcagcattggcgattttcagaaggaatatcaactgaaaaccattgagaagttggcattggaaaagagttacgatatttcatctggcctggtagcaatatttatagcattctatggagacagaaaaaaagtaatatggtttgtagcttcctcctttttaataggacttggatcacttttatgtgcttttccatccattaatgaagaaaataaacaaagtaaggtaggaattgaagatatttgcgaagaaataaaggttgtcagtggttgccagagcagtggtatatcattccaatcaaaatacctgtctttcttcatccttgggcagactgtgcagggaatagcaggaatgcctctttatatccttggaataacctttattgatgagaatgttgctacacactcagctggtatctatttaggtattgcagaatgtacatcaatgattggatatgctctgggttatgtgctaggagcaccactagttaaagtccctgagaatactacttctgcaacaaacactacagtcaataatggtagtccagaatggctatggacttggtggattaattttctttttgccgctgtcgttgcatggtgtacattaataccattgtcatgctttccaaacaatatgccaggttcaacacggataaaagctaggaaacgtaaacagcttcatttttttgacagcagacttaaagatctgaaacttggaactaatatcaaggatttatgtgctgctctttggattctgatgaagaatccagtgctcatatgcctagctctgtcaaaagctacagaatatttagttattattggagcttctgaatttttgcctatatatttagaaaatcagtttatattaacacccactgtggcaactacacttgcaggacttgttttaattccaggaggtgcacttggccagcttctgggaggtgtcattgtttccacattagaaatgtcttgtaaagcccttatgagatttataatggttacatctgtgatatcacttatactgcttgtgtttattatttttgtacgctgtaatccagtgcaatttgctgggatcaatgaagattatgatggaacagggaagttgggaaacctcacggctccttgcaatgaaaaatgtagatgctcatcttcaatttattcttctatatgtggaagagatgatattgaatatttttctccctgctttgcagggtgtacatattctaaagcacaaaaccaaaaaaagatgtactacaattgttcttgcattaaagaaggattaataactgcagatgcagaaggtgattttattgatgccagacccgggaaatgtgatgcaaagtgctataagttacctttgttcattgcttttatcttttctacacttatattttctggtttttctggtgtaccaatcgtcttggccatgacgcgggttgtacctgacaaactgcgttctctggccttgggtgtaagctatgtgattttgagaatatttgggactattcctggaccatcaatctttaaaatgtcaggagaaacttcttgtattttacgggatgttaataaatgtggacacacaggacgttgttggatatataacaagacaaaaatggctttcttattggtaggaatatgttttctttgcaaactatgcactatcatcttcactactattgcatttttcatatacaaacgtcgtctaaatgagaacactgacttcccagatgtaactgtgaagaatccaaaagttaagaaaaaagaagaaactgacttgtaactggatcatcattgtattctccaagatttgtttctgtgcccaactttcagaagaggaaaatcacacattatgtttacataagtagcaaaaatatatttatggtgatctgcattttcataataaagtgtcctattgtgaaac

SEQ ID NO: 11501 - protein, 719 aa, Homo sapiens; identical to SEQ ID NO: 1084

SEQ ID NO: 11502 - DNA, 2339 bp, Homo sapiens
tttgcctcctgccctaggagaaacgttcgctctggaggcttgggcggcaagagccccttgtggccaccgagtcctccgacgccctcgccaggctggcctttgggttggcccaggcaggacgggcagccgagagcactcgggccgcgtcgccaggagccgcccagggtgagccatgttcgtaggcgtcgcccggcactctgggagccaggatgaagtctcaaggggagtagagccgctggaggccgcgcgggcccagcctgctaaggacaggagggccaagggaaccccgaagtcctcgaagcccgggaaaaaacaccggtatctgagactacttccagaggccttgataaggttcggcggtttccgaaaaaggaaaaaagccaagtcctcagtttccaagaagccgggagaagtggatgacagtttggagcagccctgtggtttgggctgcttagtcagcacctgctgtgagtgttgcaataacattcgctgcttcatgattttctactgcatcctgctcatatgtcaaggtgtggtgtttggtcttatagatgtcagcattggcgattttcagaaggaatatcaactgaaaaccattgagaagttggcattggaaaagagttacgatatttcatctggcctggtagcaatatttatagcattctatggagacagaaaaaaagtaatatggtttgtagcttcctcctttttaataggacttggatcacttttatgtgcttttccatccattaatgaagaaaataaacaaagtaaggtaggaattgaaggtattgcagaatgtacatcaatgattggatatgctctgggttatgtgctaggagcaccactagttaaagtccctgagaatactacttctgcaacaaacactacagtcaataatggtagtccagaatggctatggacttggtggattaattttctttttgccgctgtcgttgcatggtgtacattaataccattgtcatgctttccaaacaatatgccaggttcaacacggataaaagctaggaaacgtaaacagcttcatttttttgacagcagacttaaagatctgaaacttggaactaatatcaaggatttatgtgctgctctttggattctgatgaagaatccagtgctcatatgcctagctctgtcaaaagctacagaatatttagttattattggagcttctgaatttttgcctatatatttagaaaatcagtttatattaacacccactgtggcaactacacttgcaggacttgttttaattccaggaggtgcacttggccagcttctgggaggtgtcattgtttccacattagaaatgtcttgtaaagcccttatgagatttataatggttacatctgtgatatcacttatactgcttgtgtttattatttttgtacgctgtaatccagtgcaatttgctgggatcaatgaagattatgatggaacagggaagttgggaaacctcacggctccttgcaatgaaaaatgtagatgctcatcttcaatttattcttctatatgtggaagagatgatattgaatatttttctccctgctttgcagggtgtacatattctaaagcacaaaaccaaaaaaagatgtactacaattgttcttgcattaaagaaggattaataactgcagatgcagaaggtgattttattgatgccagacccgggaaatgtgatgcaaagtgctataagttacctttgttcattgcttttatcttttctacacttatattttctggtttttctggtgtaccaatcgtcttggccatgacgcgggttgtacctgacaaactgcgttctctggccttgggtgtaagctatgtgattttgagaatatttgggactattcctggaccatcaatctttaaaatgtcaggagaaacttcttgtattttacgggatgttaataaatgtggacacacaggacgttgttggatatataacaagacaaaaatggctttcttattggtaggaatatgttttctttgcaaactatgcactatcatcttcactactattgcatttttcatatacaaacgtcgtctaaatgagaacactgacttcccagatgtaactgtgaagaatccaaaagttaagaaaaaagaagaaactgacttgtaactggatcatcattgtgattgcagatcatttgaggatcagagtgtgaaaacgagtttctcttttacagattctccaagatttgtttctgtgcccaactttcagaagaggaaaatcacacattatgtttacataagtagcaaaaatatatttatggtgatctgcattttcataataaagtgtcctattgtgaaac

SEQ ID NO: 11503 - protein, 657 aa, Homo sapiens
MFVGVARHSGSQDEVSRGVEPLEAARAQPAKDRRAKGTPKSSKPGKKHRYLRLLPEALIRFGGFRKRKKAKSSVSKKPGEVDDSLEQPCGLGCLVSTCCECCNNIRCFMIFYCILLICQGVVFGLIDVSIGDFQKEYQLKTIEKLALEKSYDISSGLVAIFIAFYGDRKKVIWFVASSFLIGLGSLLCAFPSINEENKQSKVGIEGIAECTSMIGYALGYVLGAPLVKVPENTTSATNTTVNNGSPEWLWTWWINFLFAAVVAWCTLIPLSCFPNNMPGSTRIKARKRKQLHFFDSRLKDLKLGTNIKDLCAALWILMKNPVLICLALSKATEYLVIIGASEFLPIYLENQFILTPTVATTLAGLVLIPGGALGQLLGGVIVSTLEMSCKALMRFIMVTSVISLILLVFIIFVRCNPVQFAGINEDYDGTGKLGNLTAPCNEKCRCSSSIYSSICGRDDIEYFSPCFAGCTYSKAQNQKKMYYNCSCIKEGLITADAEGDFIDARPGKCDAKCYKLPLFIAFIFSTLIFSGFSGVPIVLAMTRVVPDKLRSLALGVSYVILRIFGTIPGPSIFKMSGETSCILRDVNKCGHTGRCWIYNKTKMAFLLVGICFLCKLCTIIFTTIAFFIYKRRLNENTDFPDVTVKNPKVKKKEETDL

SEQ ID NO: 11504 - DNA, 2521 bp, Homo sapiens
tttgcctcctgccctaggagaaacgttcgctctggaggcttgggcggcaagagccccttgtggccaccgagtcctccgacgccctcgccaggctggcctttgggttggcccaggcaggacgggcagccgagagcactcgggccgcgtcgccaggagccgcccagggtgagccatgttcgtaggcgtcgcccggcactctgggagccaggatgaagtctcaaggggagtagagccgctggaggccgcgcgggcccagcctgctaaggacaggagggccaagggaaccccgaagtcctcgaagcccgggaaaaaacaccggtatctgagactacttccagaggccttgataaggttcggcggtttccgaaaaaggaaaaaagccaagtcctcagtttccaagaagccgggagaagtggatgacagtttggagcagccctgtggtttgggctgcttagtcagcacctgctgtgagtgttgcaataacattcgctgcttcatgattttctactgcatcctgctcatatgtcaaggtgtggtgtttggtcttatagatgtcagcattggcgattttcagaaggaatatcaactgaaaaccattgagaagttggcattggaaaagagttacgatatttcatctggcctggtagcaatatttatagcattctatggagacagaaaaaaagtaatatggtttgtagcttcctcctttttaataggacttggatcacttttatgtgcttttccatccattaatgaagaaaataaacaaagtaaggtaggaattgaagatatttgcgaagaaataaaggttgtcagtggttgccagagcagtggtatatcattccaatcaaaatacctgtctttcttcatccttgggcagactgtgcagggaatagcaggaatgcctctttatatccttggaataacctttattgatgagaatgttgctacacactcagctggtatctatttaggtattgcagaatgtacatcaatgattggatatgctctgggttatgtgctaggagcaccactagttaaagtccctgagaatactacttctgcaacaaacactacagtcaataatggtagtccagaatggctatggacttggtggattaattttctttttgccgctgtcgttgcatggtgtacattaataccattgtcatgctttccaaacaatatgccaggttcaacacggataaaagctaggaaacgtaaacagcttcatttttttgacagcagacttaaagatctgaaacttggaactaatatcaaggatttatgtgctgctctttggattctgatgaagaatccagtgctcatatgcctagctctgtcaaaagctacagaatatttagttattattggagcttctgaatttttgcctatatatttagaaaatcagtttatattaacacccactgtggcaactacacttgcaggacttgttttaattccaggaggtgcacttggccagcttctgggaggtgtcattgtttccacattagaaatgtcttgtaaagcccttatgagatttataatggttacatctgtgatatcacttatactgcttgtgtttattatttttgtacgctgtaatccagtgcaatttgctgggatcaatgaagattatgatggaacagggaagttgggaaacctcacggctccttgcaatgaaaaatgtagatgctcatcttcaatttattcttctatatgtggaagagatgatattgaatatttttctccctgctttgcagggtgtacatattctaaagcacaaaaccaaaaaaagatgtactacaattgttcttgcattaaagaaggattaataactgcagatgcagaaggtgattttattgatgccagacccgggaaatgtgatgcaaagtgctataagttacctttgttcattgcttttatcttttctacacttatattttctggtttttctggtgtaccaatcgtcttggccatgacgcgggttgtacctgacaaactgcgttctctggccttgggtgtaagctatgtgattttgagaatatttgggactattcctggaccatcaatctttaaaatgtcaggagaaacttcttgtattttacgggatgttaataaatgtggacacacaggacgttgttggatatataacaagacaaaaatggctttcttattggtaggaatatgttttctttgcaaactatgcactatcatcttcactactattgcatttttcatatacaaacgtcgtctaaatgagaacactgacttcccagatgtaactgtgaagaatccaaaagttaagaaaaaagaagaaactgacttgtaactggatcatcattgtgattgcagatcatttgaggatcagagtgtgaaaacgagtttctcttttacagattctccaagatttgtttctgtgcccaactttcagaagaggaaaatcacacattatgtttacataagtagcaaaaatatatttatggtgatctgcattttcataataaagtgtcctattgtg

SEQ ID NO: 11505 - protein, 719 aa, Homo sapiens; identical to SEQ ID NO: 1084

SEQ ID NO: 11506 - DNA, 827 bp, Homo sapiens
aaaaaggaaaaaagccaagtcctcagtttccaagaagccgggagaagtggatgacagtttggagcagccctgtggtttgggctgcttagtcagcacctgctgtgagtgttgcaataacattcgctgcttcatgattttctactgcatcctgctcatatgtcaaggtgtggtgtttggtcttatagatgtcagcattggcgattttcagaaggaatatcaactgaaaaccattgagaagttggcattggaaaagagtattgcagaatgtacatcaatgattggatatgctctgggttatgtgctaggagcaccactagttaaagtccctgagaatactacttctgcaacaaacactacagtcaataatggtagtccagaatggctatggacttggtggattaattttctttttgccgctgtcgttgcatggtgtacattaataccattgtcatgctttccaaacaatatgccaggttcaacacggataaaagctaggaaacgtaaacagcttcatttttttgacagcagacttaaagatctgaaacttggaactaatatcaaggatttatgtgctgctctttggattctgatgaagaatccagtgctcatatgcctagctctgtcaaaagctacagaatatttagttattattggagcttctgaatttttgcctatatatttagaaaatcagtttatattaacacccactgtggcaactacacttgcaggacttgttttaattccaggaggtgcacttggccagcttctgggaggtgtcattgtttccacattagaaatgtcttgtaaagcccttatgagatttataa

SEQ ID NO: 11507 - protein, 231 aa, Homo sapiens
MIFYCILLICQGVVFGLIDVSIGDFQKEYQLKTIEKLALEKSIAECTSMIGYALGYVLGAPLVKVPENTTSATNTTVNNGSPEWLWTWWINFLFAAVVAWCTLIPLSCFPNNMPGSTRIKARKRKQLHFFDSRLKDLKLGTNIKDLCAALWILMKNPVLICLALSKATEYLVIIGASEFLPIYLENQFILTPTVATTLAGLVLIPGGALGQLLGGVIVSTLEMSCKALMRF

SEQ ID NO: 11508 - DNA, 331 bp, Homo sapiens
gttcaacacggataaaagctaggaaacgtaaacagcttcatttttttgacagcagacttaaagatctgaaacttggaactaatatcaaggatttatgtgctgctctttggattctgatgaagaatccagtgctcatatgcctagctctgtcaaaagctacagaatatttagttattattggagcttctgaatttttgcctatatatttagaaaatcagtttatattaacacccactgtggcaactacacttgcaggtagatttaccttcttattgtcatttcaaaaattttgcactgtcttattgtatgtacttatgaaatacttgaaata

SEQ ID NO: 11509 - protein, 31 aa, Homo sapiens
MCCSLDSDEESSAHMPSSVKSYRIFSYYWSF

SEQ ID NO: 11510 - DNA, 737 bp, Homo sapiens
aacgtcattctgataccaaaacctggcagagacacaagtgaaataagaacgcttcaggccaatatccctgatgaacataaatgcaaacattctcaaaaaaatactagcaaactgaatccaggtgcatgtcaaaaaactaaaccaccacaattgagtaggcttttatttctgggatgcaaggttggttcaacatacacaaatcactaaatgtgattcaccacataaacagaactaaaaacaaaagcacatgatcatctcgatagatgcagaaaatccttttgataaaattcaatatcctttttgggctaattttttgtgtttttagtagagatagggtttcaccatgttagccagaatggtcttgatctcctgaccttgtgatccacccgccttgacctctcaaagtgttgggattacaggcgtgagccactgcacccagctgcgcgcaacccgttgtctcatttctttatgaatgctgaattgtttagctactgagaaagtgtattcgttttcttacttttatgtttaaccttatgataaattgcatcagtggaattaacagcgtctgttccttttaatctgaaagagcttaaacacattccagattcagaaatctggaataggagctgcgatctgtgttttataccatgtagataattcaaggcacgctaaagtttgcaaacaacaaatctcgtaatcccgtgcaatcctttaattttataaattaagaaattaat

SEQ ID NO: 11511 - protein, 32 aa, Homo sapiens
PCDPPALTSQSVGITGVSHCTQLRATRCLISL

SEQ ID NO: 11512 - DNA, 875 bp, Homo sapiens
tttgcctcctgccctaggagaaacgttcgctctggaggcttgggcggcaagagccccttgtggccaccgagtcctccgacgccctcgccaggctggcctttgggttggcccaggcaggacgggcagccgagagcactcgggccgcgtcgccaggagccgcccagggtgagccatgttcgtaggcgtcgcccggcactctgggagccaggatgaagtctcaaggggagtagagccgctggaggccgcgcgggcccagcctgctaaggacaggagggccaagggaaccccgaagtcctcgaagcccgggaaaaaacaccggtatctgagactacttccagaggccttgataaggttcggcggtttccgaaaaaggaaaaaagccaagtcctcagtttccaagaagccgggagaagtggatgacagtttggagcagccctgtggtttgggctgcttagtcagcacctgctgtgagtgttgcaataacattcgctgcttcatgattttctactgcatcctgctcatatgtcaaggtgtggtgtttggtcttatagatgtcagcattggcgattttcagaaggaatatcaactgaaaaccattgagaagttggcattggaaaagagttacgatatttcatctggcctggtagcaatatttatagcattctatggagacagaaaaaaagtaatatggtttgtagcttcctcctttttaataggacttggatcacttttatgtgcttttccatccattaatgaagaaaataaacaaagtaaggtaggaattgaagctggtatctatttaggtattgcagaatgtacatcaatgattggatatgctctgggttatgtgctaggagcaccactagttaaagtcc

SEQ ID NO: 11513 - protein, 233 aa, Homo sapiens
MFVGVARHSGSQDEVSRGVEPLEAARAQPAKDRRAKGTPKSSKPGKKHRYLRLLPEALIRFGGFRKRKKAKSSVSKKPGEVDDSLEQPCGLGCLVSTCCECCNNIRCFMIFYCILLICQGVVFGLIDVSIGDFQKEYQLKTIEKLALEKSYDISSGLVAIFIAFYGDRKKVIWFVASSFLIGLGSLLCAFPSINEENKQSKVGIEAGIYLGIAECTSMIGYALGYVLGAPLVK

SEQ ID NO: 11514 - DNA, 361 bp, Homo sapiens
caaagcccgaacttgaggttcaggcattcagggcatgtccaaaattgaggctggaccagggacaacctagcttctgcctcgatgaggagttttgcatgagtgaaaaaacagcactccaccaatataggtagaaattcagaaattcagtgtgtaaaatggtaaagtggattgaagttgaagatattagatcatttaagaagtcaataaatgaagtaataaacatgcgaatgagaagactgatgatgaagaggacctttaaaagtgtatttctgttacggttattttttttttaaagtgatttgaagccatttataatgattgctaagtggcatgctaaagttttaaaaacaaataaagcatt

SEQ ID NO: 11515 - protein, 45 aa, Homo sapiens
MVKWIEVEDIRSFKKSINEVINMRMRRLMMKRTFKSVFLLRLFFF

SEQ ID NO: 11516 - DNA, 298 bp, Homo sapiens
actatgtaaaaagtgccttttgccttccaccatgattgtgaggcctctccagatacgtcgaaccgtagaaattcagaaattcagtgtgtaaaatggtaaagtggattgaagttgaagatattagatcatttaagaagtcaataaatgaagtaataaacatgcgaatgagaagactgatgatgaagaggacctttaaaagtgtatttctgttacggttattttttttttaaagtgatttgaagccatttataatgattgctaagtggcatgctaaagttttaaaaacaaataaagcatt

SEQ ID NO: 11517 - protein, 45 aa, Homo sapiens; identical to SEQ ID NO: 11515

SEQ ID NO: 11518 - DNA, 589 bp, Homo sapiens
aggtttcagaagaaaaagcacaacagtgttaagtgctgctgaaggtaatgctagcaattaatacctggctgtcattctggagttccttttctctcttccatccaaggtcaagattttcctaacatataacacaaggctgtgcctaaagtgaatgactgattcttcaatgagggaagaagacacagaagctaaaaacaagatgcatttgtcattgaagaaaaacatcttacaaaggaagtttaaaagagaacccagatgaatatttcttcagatgaaccacaaataagttctgatttcaacatgttctacaactccccagagctgagaagctaaagacggttctacagtatcatattccaaaggcatcacagggtttagctgctaatgcaataaagtggtttttgtcttggaagcacgcaacatcatgaataacattgtcatctagaaacaatgagccaataggcaccattttgtgttgtaaccgagcaggcttgcttgattgtggatgcagatatgcccaccctacgtaagttgacattttgtacagactagaagaaatgtgtggtatgagatcaataaagaagtaact

SEQ ID NO: 11519 - protein, 35 aa, Homo sapiens
MTDSSMREEDTEAKNKMHLSLKKNILQRKFKREPR

SEQ ID NO: 11520 - DNA, 385 bp, Homo sapiens
aaatagagttacatagaggataagcaacatcgtttcttagcagtaaaggtgtccttctggagagatagagcgtgccattattctggcttgatattaacaggtcaggccaggtgcggtggctcacgcctgtaatcccagcactttgagaggctgaggcaggtggattacctgagttcaggagttcgagacctgcctggccaacatggagaaacgccatctctactaaaaatacaaaattagccgggtgtggtggcgcatgcctgtaatcccagctactcgggaggctgaggcaggaacaacgcttgaacccaggaggtggaggttgcagtgagctgagatcctgcgctgcactccagcctgggcaacaagagtgaaactccatctc

SEQ ID NO: 11521 - protein, 35 aa, Homo sapiens
SQLLGRLRQEQRLNPGGGGCSELRSCAALQPGQQE

SEQ ID NO: 11522 - DNA, 2020 bp, Homo sapiens
ataaaattcggtgtcccttcatgttaaaaactctgaataaactaggtattggaggaacctacctcaaaataataagaaccatatgtaataaacccacagctgatgtcatggtgaatgggcaaaagctggaagcattcccctggaaaaccagcacaagacaaggatgccctctctcaccactcctgttcatcatagcattggaagttctggccagggcaatcaggcaagagaaagaaataaatggcattatttttaaattggaataattacctttacctctttttaccaaaatgttaaggctgaagtatttttagcatctcaggacagttactctcatcatatatcaaactaaatctcctagaagcaatctatccacatccatatcagttcaatctcagaaatcagtatctcaatgggtactgtgtacccaaatcatctgctagaataaaacctctctctgtgacaggaacagtccaaaaaggaagctgggagtcagcccatcacgaggttgcttgatcagaatcacatgaactggaaattccctgtctccccttaaccagcactggaagcagatgggaagagaatagctgtgactgactcacactctaacccagcaaccctcagcatacaagtgggagaccataaagtttttcaagaccccaaaagaggccaaaggtctgataattgctgggagaaggtccactatccaagaagagaagaggaaaaggaattaaagtctccaagcactggggatgcaagaagagagttgcacaggagagaaagaagaagttgtccacggggtgaccctgcaattggagggaaatgcatgtggatatgtgcagggagtctaggaagtgaagccttagtgatcatttacaagaatgagggttaggtaaaataagggatgcaaagccacctgtagtctattctaacctcactccatcactctatacaatctgtgttttatcatctgaaatgttaagtaaagacctgtttgggtcttcttcagaatcccatacatttgagttcattagtcagaaaaagggaaaataccaccaccccatcctggaatggcagtcatgtacacttttataatgagagattgggcagcaaagggggccccttgtggacctcacccagccagagaaggaggcagaatgtttcctttactatcttttcctctccccagaggaacactacatattgttccctccatgggcttaagagaaggtgccagggttacagatagatatatcgctagctgtagagcacagggtgaattgggatgtccatgtacaaagctagggacaggagaatcagtttaaagactttaaaaataattaggaaaaaaaggaaggcctgacccaaagcttaggagtgcaggtagagaagagatggtgccatgatataccatgtctctgggacttttctgtattcctcttcctctgtatactgtattgccctcattccctatttattcaaaatctgtgctacctccactgcgaagacttccacgagaaaattcagatatttcttcttttgtggacactttctaccttacaaataagttaattttaattcaaggaagagtttttccggaaccctgttggcctgctcacaggaatgtaagttccttaaatctagggcacagtgtctttgagaactgcaatcacctacatcaacatgacatagctattaggatacaggcgcctgccaccacgcctggctaattttttgtatttttagtagagatggggtttcaccgtgttagccaggatggtctcaatctcctgacctcgtgatccacccgtctcagcctcccaaagtgctaggattacaggcctgagacaccgcgcccgccaccccccctcttttctttaactggcctaactaaatatttagtcttttcaagtttacctcaaacctctcacgtgtgaaagctctactggttagccctagagttaattatattgtattgcttggctcataggaggtatttaataaacacattagttgactg

SEQ ID NO: 11523 - protein, 105 aa, Homo sapiens
MSLGLFCIPLPLYTVLPSFPIYSKSVLPPLRRLPRENSDISSFVDTFYLTNKLILIQGRVFPEPCWPAHRNVSSLNLGHSVFENCNHLHQHDIAIRIQAPATTPG

SEQ ID NO: 11524 - DNA, 566 bp, Homo sapiens
taaagtttttcaagaccccaaaagaggccaaaggtctgataattgctgggagaaggtccactatccaagaagagaagaggaaaaggaattaaagtctccaagcactggggatgcaagaagagagttgcacaggagagaaagaagaagttgtccacggggtgaccctgcaattggagggaaatgcatgtggatatgtgcagggagtctaggaagtgaagccttagtgatcattccctatttattcaaaatctgtgctacctccactgcgaagacttccacgagaaaattcagatatttcttcttttgtggacactttctaccttacaaataagttaattttaattcaaggaagagtttttccggaaccctgttggcctgctcacaggaatgtaagttccttaaatctagggcacagtgtctttgagaactgcaatcacctacatcaacatgacatagctattaggactaagaacagagaccacctgtgtcaacatgagttactatttttttccgtgaaacatttgtccaagaaagataagactgtaaccaataaatagtttgcaagt

SEQ ID NO: 11525 - protein, 48 aa, Homo sapiens
MWICAGSLGSEALVIIPYLFKICATSTAKTSTRKFRYFFFCGHFLPYK

SEQ ID NO: 11526 - DNA, 678 bp, Homo sapiens
ctcgtggtgcgccgttttttaagcccatcagaaaagcgcagtattcgggtgggagtgacccgactttccaggtgccgtccatcacccctttctttgactcggaaagggaactccctgaccccttgcgcttcccgagtgaggcaatgcctcgccctgcttcgactcgcgcatggtgcgcgcacgcactgacctgcgcccactgtctggcactccctagtgagatgaacccggtacctcagatggaaatgcagaaatcaccagtcttctgcgtcgctcacgctgggagctgtagaccggagctgttcctattcggccatcttgtctcctcccgtgaactggaaattccctgtctccccttaaccagcactggaagcagatgggaagagaatagctgtgactgactcacactctaacccagcaaccctcagcatacaagtgggagaccataaagtttttcaagaccccaaaagaggccaaaggtctgataattgctgggagaaggtccactatccaagaagagaagaggaaaaggaattaaagtctccaagcactggggatgcaagaagagagttgcacaggagagaaagaagaagttgtccacggggtgaccctgcaattggagggaaatgcatgtggatatgtgcagggagtctaggaagtgaagccttagtgatcatt

SEQ ID NO: 11527 - protein, 85 aa, Homo sapiens
MPRPASTRAWCAHALTCAHCLALPSEMNPVPQMEMQKSPVFCVAHAGSCRPELFLFGHLVSSRELEIPCLPLTSTGSRWEENSCD

SEQ ID NO: 11528 - DNA, 4111 bp, Homo sapiens
cggcgcacgccgaggagagggagcccccgccaccgccgctgcctccgcgtgctcagcctgtccccgcccagggagccggagcctccaactaactccgcccgccgctccgccgcccgcaggctccggcttccgtcccggacagagcccgtggtcgcgcaggttctgaatgatgactgacgcgggtttgggtgatacccctcacagcccctgtcattccggagtcataaggcacccgcgcgtctagccccagcgccagggcacgcgagcggcgctggagggaggaaagcttccgcctgcgggccggacaaaagtcccgcctgcccacggctttttgcccgccgctcgtgaccgagacgcctcgccgcggccagctcgctgctctcgctggcggatggtgtgtggccgccgcaggacgcccgccgtgcccgggccatgaagtagcggctgctggcggcgccgctgcccaaccgccagccccagccccgcgctgcgctgcccggtcctctcccggcggggtcgtatcggcgtggacatggctggccgcgtccctagcctgctagttctccttgtttttccaagcagctgtttggctttccgaagcccactttctgtctttaagaggtttaaagaaactaccagaccattttccaatgaatgtcttggtaccaccagacccgtagttcctattgattcatcagattttgcattggatattcgcatgcctggggttacacctaaacagtccgatacatacttctgcatgtctatgcgaataccagtggatgaggaagccttcgtgattgacttcaagcctcgagccagcatggatactgtccatcacatgttactttttggatgcaatatgccttcatccactggaagttactggttttgtgatgaaggaacctgtacagataaagccaatattctgtatgcctgggcgagaaatgctccccctacccggctccccaaaggtgttggattcagagttggaggagagactggaagtaaatactttgtactacaggtacactatggggatattagtgcttttagagataataacaaggactgttctggtgtgtccttacacctcacacgtctgccacagcctttaattgctggcatgtaccttatgatgtctgttgacactgttatcccagcaggagaaaaagtggtgaattctgacatttcatgccattataaaaattatccaatgcatgtctttgcctatagagttcacactcaccatttaggtaaggtagtaagtggatacagagtaagaaatggacagtggacactgattggacggcagagccctcagctgccacaggctttctaccctgtggggcatccagttgatgtaagttttggtgacctactggctgcaagatgtgtattcactggtgaaggaaggacagaagccacacacattggtggcacgtctagtgatgaaatgtgcaacttatacattatgtattacatggaagccaagcatgcagtttctttcatgacctgtacccagaatgtagctccagatatgttcagaaccataccaccagaggccaacattccaattcccgtgaagtctgatatggttatgatgcatgaacatcataaagaaacagaatataaagataagattcctttactacagcagccaaaacgagaagaagaagaagtgttagaccagggtgatttctattcactactttccaagctgctaggagaaagggaagatgttgttcatgtgcacaaatataatcctacagaaaaggcagaatcagagtcagacctggtagctgagattgcaaatgtagtccaaaaaaaggatcttggtcgatctgatgccagagagggtgcagaacatgagaggggtaatgctattcttgtcagagacagaattcacaaattccacagactagtatctaccttgaggccaccagagagcagagttttctcattacagcagcccccacctggtgaaggcacctgggaaccagaacacacaggagatttccacatggaagaggcactggattggcctggagtatacttgttaccaggccaggtttctggggtggctctagaccctaagaataacctggtgattttccacagaggtgaccatgtctgggatggaaactcgtttgacagcaagtttgtttaccagcaaataggactcggaccaattgaagaagacactattcttgtcatagatccaaataatgctgcagtactccagtccagtggaaaaaatctgttttacttgccacatggcttgagtatagataaagatgggaattattgggtcacagacgtggctctccatcaggtgttcaaactggatccaaacaataaagaaggccctgtattaatcctgggaaggagcatgcaaccaggcagtgaccagaatcacttctgtcaacccactgatgtggctgtggatccaggcactggagccatttatgtatcagatggttactgcaacagcaggattgtgcagttttcaccaagtggaaagttcatcacacagtggggagaagagtcttcagggagcagtcctctgccaggccagttcactgttcctcacagcttggctcttgtgcctcttttgggccaattatgtgtggcagaccgggaaaatggtcggatccagtgttttaaaactgacaccaaagaatttgtgagagagattaagcattcatcatttggaagaaatgtatttgcaatttcatatataccaggcttgctctttgcagtgaatgggaagcctcattttggggaccaagaacctgtacaaggatttgtgatgaacttttccaatggggaaattatagacatcttcaagccagtgcgcaagcactttgatatgcctcatgatattgttgcatctgaagatgggactgtgtacattggagatgctcataccaacaccgtgtggaagttcaccttgactgagaaattggaacatcgatcagttaaaaaggctggcattgaggtccaggaaatcaaagaagccgaggcagttgttgaaaccaaaatggagaacaaacccacctcctcagaattgcagaagatgcaagagaaacagaaactgatcaaagagccaggctcgggagtgcctgttgttctcattacaacccttctggttattccggtggttgtcctgctggccattgccatatttattcggtggaaaaaatcaagggcctttggagattctgaacacaaactcgagacgagttcaggaagagtactgggaagatttagaggaaagggaagtggaggcttaaaccttggtaatttctttgcaagccgtaagggctacagtcgaaaagggtttgaccggcttagcactgagggcagtgaccaagagaaagaggatgatggaagtgaatcagaagaggagtattcagcacctctgcctgcgctcgcaccttcctcctcctgaaaaccaagctttgatttagattgagtaagatttacccagaatgtcagattcctttccctttagcacgtttaaagttctgtgtatttaattgtaaactgtactagtctgtgtgggactgtacacactttatttacttcgttttggttaagttggcttctgtttctagttgaggagtttcctaaaagttcataacagtgccattgtctttatatgaacatagactagagaaaccgtcctctttttccatcataattctaatctaacaatggaagatttgcccatttacacttttgagactttttggtggatgtaaataaccccattctttgcttgaacacagtattttcccaatagcactttcattgccagtgtctttctttggtgcctttcctgttcagcattcttagcctgtggcagtaaagagaaactttgtgctacatgacgacaaagctgctaaatctcctatttttttaaaatcactaacattatattgcaatgaaggaaataaaaaagtctctatttaaattcttttttaaattttcttcagttggtgtgtttttgggatgtcttatttttagatggttacactgttagaacactattttcagaatctgaatgtaatttgtgtaataaagtgttttcagagcattagctgtc

SEQ ID NO: 11529 - protein, 973 aa, Homo sapiens [sequence omitted]

SEQ ID NO: 11530 - DNA, 3907 bp, Homo sapiens
cggcgcacgccgaggagagggagcccccgccaccgccgctgcctccgcgtgctcagcctgtccccgcccagggagccggagcctccaactaactccgcccgccgctccgccgcccgcaggctccggcttccgtcccggacagagcccgtggtcgcgcaggttctgaatgatgactgacgcgggtttgggtgatacccctcacagcccctgtcattccggagtcataaggcacccgcgcgtctagccccagcgccagggcacgcgagcggcgctggagggaggaaagcttccgcctgcgggccggacaaaagtcccgcctgcccacggctttttgcccgccgctcgtgaccgagacgcctcgccgcggccagctcgctgctctcgctggcggatggtgtgtggccgccgcaggacgcccgccgtgcccgggccatgaagtagcggctgctggcggcgccgctgcccaaccgccagccccagccccgcgctgcgctgcccggtcctctcccggcggggtcgtatcggcgtggacatggctggccgcgtccctagcctgctagttctccttgtttttccaagcagctgtttggctttccgaagcccactttctgtctttaagaggtttaaagaaactaccagaccattttccaatgaatgtcttggtaccaccagacccgtagttcctattgattcatcagattttgcattggatattcgcatgcctggggttacacctaaacagtccgatacatacttctgcatgtctatgcgaataccagtggatgaggaagccttcgtgattgacttcaagcctcgagccagcatggatactgtccatcacatgttactttttggatgcaatatgccttcatccactggaagttactggttttgtgatgaaggaacctgtacagataaagccaatattctgtatgcctgggcgagaaatgctccccctacccggctccccaaaggtgttggattcagagttggaggagagactggaagtaaatactttgtactacaggtacactatggggatattagtgcttttagagataataacaaggactgttctggtgtgtccttacacctcacacgtctgccacagcctttaattgctggcatgtaccttatgatgtctgttgacactgttatcccagcaggagaaaaagtggtgaattctgacatttcatgccattataaaaattatccaatgcatgtctttgcctatagagttcacactcaccatttaggtaaggtagtaagtggatacagagtaagaaatggacagtggacactgattggacggcagagccctcagctgccacaggctttctaccctgtggggcatccagttgatgtaagttttggtgacctactggctgcaagatgtgtattcactggtgaaggaaggacagaagccacacacattggtggcacgtctagtgatgaaatgtgcaacttatacattatgtattacatggaagccaagcatgcagtttctttcatgacctgtacccagaatgtagctccagatatgttcagaaccataccaccagaggccaacattccaattcccgtgaagtctgatatggttatgatgcatgaacatcataaagaaacagaatataaagataagattcctttactacagcagccaaaacgagaagaagaagaagtgttagaccagggtgatttctattcactactttccaagctgctaggagaaagggaagatgttgttcatgtgcacaaatataatcctacagaaaaggcagaatcagagtcagacctggtagctgagattgcaaatgtagtccaaaaaaaggatcttggtcgatctgatgccagagagggtgcagaacatgagaggggtaatgctattcttgtcagagacagaattcacaaattccacagactagtatctaccttgaggccaccagagagcagagttttctcattacagcagcccccacctggtgaaggcacctgggaaccagaacacacaggagatttccacatggaagaggcactggattggcctggagtatacttgttaccaggccaggtttctggggtggctctagaccctaagaataacctggtgattttccacagaggtgaccatgtctgggatggaaactcgtttgacagcaagtttgtttaccagcaaataggactcggaccaattgaagaagacactattcttgtcatagatccaaataatgctgcagtactccagtccagtggaaaaaatctgttttacttgccacatggcttgagtatagataaagatgggaattattgggtcacagacgtggctctccatcaggtgttcaaactggatccaaacaataaagaaggccctgtattaatcctgggaaggagcatgcaaccaggcagtgaccagaatcacttctgtcaacccactgatgtggctgtggatccaggcactggagccatttatgtatcagatggttactgcaacagcaggattgtgcagttttcaccaagtggaaagttcatcacacagtggggagaagagtcttcagggagcagtcctctgccaggccagttcactgttcctcacagcttggctcttgtgcctcttttgggccaattatgtgtggcagaccgggaaaatggtcggatccagtgttttaaaactgacaccaaagaatttgtgagagagattaagcattcatcatttggaagaaatgtatttgcaatttcatatataccaggcttgctctttgcagtgaatgggaagcctcattttggggaccaagaacctgtacaaggatttgtgatgaacttttccaatggggaaattatagacatcttcaagccagtgcgcaagcactttgatatgcctcatgatattgttgcatctgaagatgggactgtgtacattggagatgctcataccaacaccgtgtggaagttcaccttgactgagaaattggaacatcgatcagttaaaaaggctggcattgaggtccaggaaatcaaagattctgaacacaaactcgagacgagttcaggaagagtactgggaagatttagaggaaagggaagtggaggcttaaaccttggtaatttctttgcaagccgtaagggctacagtcgaaaagggtttgaccggcttagcactgagggcagtgaccaagagaaagaggatgatggaagtgaatcagaagaggagtattcagcacctctgcctgcgctcgcaccttcctcctcctgaaaaccaagctttgatttagattgagtaagatttacccagaatgtcagattcctttccctttagcacgtttaaagttctgtgtatttaattgtaaactgtactagtctgtgtgggactgtacacactttatttacttcgttttggttaagttggcttctgtttctagttgaggagtttcctaaaagttcataacagtgccattgtctttatatgaacatagactagagaaaccgtcctctttttccatcataattctaatctaacaatggaagatttgcccatttacacttttgagactttttggtggatgtaaataaccccattctttgcttgaacacagtattttcccaatagcactttcattgccagtgtctttctttggtgcctttcctgttcagcattcttagcctgtggcagtaaagagaaactttgtgctacatgacgacaaagctgctaaatctcctatttttttaaaatcactaacattatattgcaatgaaggaaataaaaaagtctctatttaaattcttttttaaattttcttcagttggtgtgtttttgggatgtcttatttttagatggttacactgttagaacactattttcagaatctgaatgtaatttgtgtaataaagtgttttcagagcattagctgtc

SEQ ID NO: 11531 - protein, 905 aa, Homo sapiens
MAGRVPSLLVLLVFPSSCLAFRSPLSVFKRFKETTRPFSNECLGTTRPVVPIDSSDFALDIRMPGVTPKQSDTYFCMSMRIPVDEEAFVIDFKPRASMDTVHHMLLFGCNMPSSTGSYWFCDEGTCTDKANILYAWARNAPPTRLPKGVGFRVGGETGSKYFVLQVHYGDISAFRDNNKDCSGVSLHLTRLPQPLIAGMYLMMSVDTVIPAGEKVVNSDISCHYKNYPMHVFAYRVHTHHLGKVVSGYRVRNGQWTLIGRQSPQLPQAFYPVGHPVDVSFGDLLAARCVFTGEGRTEATHIGGTSSDEMCNLYIMYYMEAKHAVSFMTCTQNVAPDMFRTIPPEANIPIPVKSDMVMMHEHHKETEYKDKIPLLQQPKREEEEVLDQGDFYSLLSKLLGEREDVVHVHKYNPTEKAESESDLVAEIANVVQKKDLGRSDAREGAEHERGNAILVRDRIHKFHRLVSTLRPPESRVFSLQQPPPGEGTWEPEHTGDFHMEEALDWPGVYLLPGQVSGVALDPKNNLVIFHRGDHVWDGNSFDSKFVYQQIGLGPIEEDTILVIDPNNAAVLQSSGKNLFYLPHGLSIDKDGNYWVTDVALHQVFKLDPNNKEGPVLILGRSMQPGSDQNHFCQPTDVAVDPGTGAIYVSDGYCNSRIVQFSPSGKFITQWGEESSGSSPLPGQFTVPHSLALVPLLGQLCVADRENGRIQCFKTDTKEFVREIKHSSFGRNVFAISYIPGLLFAVNGKPHFGDQEPVQGFVMNFSNGEIIDIFKPVRKHFDMPHDIVASEDGTVYIGDAHTNTVWKFTLTEKLEHRSVKKAGIEVQEIKDSEHKLETSSGRVLGRFRGKGSGGLNLGNFFASRKGYSRKGFDRLSTEGSDQEKEDDGSESEEEYSAPLPALAPSSS

SEQ ID NO: 11532 - DNA, 3790 bp, Homo sapiens
cggcgcacgccgaggagagggagcccccgccaccgccgctgcctccgcgtgctcagcctgtccccgcccagggagccggagcctccaactaactccgcccgccgctccgccgcccgcaggctccggcttccgtcccggacagagcccgtggtcgcgcaggttctgaatgatgactgacgcgggtttgggtgatacccctcacagcccctgtcattccggagtcataaggcacccgcgcgtctagccccagcgccagggcacgcgagcggcgctggagggaggaaagcttccgcctgcgggccggacaaaagtcccgcctgcccacggctttttgcccgccgctcgtgaccgagacgcctcgccgcggccagctcgctgctctcgctggcggatggtgtgtggccgccgcaggacgcccgccgtgcccgggccatgaagtagcggctgctggcggcgccgctgcccaaccgccagccccagccccgcgctgcgctgcccggtcctctcccggcggggtcgtatcggcgtggacatggctggccgcgtccctagcctgctagttctccttgtttttccaagcagctgtttggctttccgaagcccactttctgtctttaagaggtttaaagaaactaccagaccattttccaatgaatgtcttggtaccaccagacccgtagttcctattgattcatcagattttgcattggatattcgcatgcctggggttacacctaaacagtccgatacatacttctgcatgtctatgcgaataccagtggatgaggaagccttcgtgattgacttcaagcctcgagccagcatggatactgtccatcacatgttactttttggatgcaatatgccttcatccactggaagttactggttttgtgatgaaggaacctgtacagataaagccaatattctgtatgcctgggcgagaaatgctccccctacccggctccccaaaggtgttggattcagagttggaggagagactggaagtaaatactttgtactacaggtacactatggggatattagtgcttttagagataataacaaggactgttctggtgtgtccttacacctcacacgtctgccacagcctttaattgctggcatgtaccttatgatgtctgttgacactgttatcccagcaggagaaaaagtggtgaattctgacatttcatgccattataaaaattatccaatgcatgtctttgcctatagagttcacactcaccatttaggtaaggtagtaagtggatacagagtaagaaatggacagtggacactgattggacggcagagccctcagctgccacaggctttctaccctgtggggcatccagttgatgtaagttttggtgacctactggctgcaagatgtgtattcactggtgaaggaaggacagaagccacacacattggtggcacgtctagtgatgaaatgtgcaacttatacattatgtattacatggaagccaagcatgcagtttctttcatgacctgtacccagaatgtagctccagatatgttcagaaccataccaccagaggccaacattccaattcccgtgaagtctgatatggttatgatgcatgaacatcataaagaaacagaatataaagataagattcctttactacagcagccaaaacgagaagaagaagaagtgttagaccaggatttccacatggaagaggcactggattggcctggagtatacttgttaccaggccaggtttctggggtggctctagaccctaagaataacctggtgattttccacagaggtgaccatgtctgggatggaaactcgtttgacagcaagtttgtttaccagcaaataggactcggaccaattgaagaagacactattcttgtcatagatccaaataatgctgcagtactccagtccagtggaaaaaatctgttttacttgccacatggcttgagtatagataaagatgggaattattgggtcacagacgtggctctccatcaggtgttcaaactggatccaaacaataaagaaggccctgtattaatcctgggaaggagcatgcaaccaggcagtgaccagaatcacttctgtcaacccactgatgtggctgtggatccaggcactggagccatttatgtatcagatggttactgcaacagcaggattgtgcagttttcaccaagtggaaagttcatcacacagtggggagaagagtcttcagggagcagtcctctgccaggccagttcactgttcctcacagcttggctcttgtgcctcttttgggccaattatgtgtggcagaccgggaaaatggtcggatccagtgttttaaaactgacaccaaagaatttgtgagagagattaagcattcatcatttggaagaaatgtatttgcaatttcatatataccaggcttgctctttgcagtgaatgggaagcctcattttggggaccaagaacctgtacaaggatttgtgatgaacttttccaatggggaaattatagacatcttcaagccagtgcgcaagcactttgatatgcctcatgatattgttgcatctgaagatgggactgtgtacattggagatgctcataccaacaccgtgtggaagttcaccttgactgagaaattggaacatcgatcagttaaaaaggctggcattgaggtccaggaaatcaaagaagccgaggcagttgttgaaaccaaaatggagaacaaacccacctcctcagaattgcagaagatgcaagagaaacagaaactgatcaaagagccaggctcgggagtgcctgttgttctcattacaacccttctggttattccggtggttgtcctgctggccattgccatatttattcggtggaaaaaatcaagggcctttggagattctgaacacaaactcgagacgagttcaggaagagtactgggaagatttagaggaaagggaagtggaggcttaaaccttggtaatttctttgcaagccgtaagggctacagtcgaaaagggtttgaccggcttagcactgagggcagtgaccaagagaaagaggatgatggaagtgaatcagaagaggagtattcagcacctctgcctgcgctcgcaccttcctcctcctgaaaaccaagctttgatttagattgagtaagatttacccagaatgtcagattcctttccctttagcacgtttaaagttctgtgtatttaattgtaaactgtactagtctgtgtgggactgtacacactttatttacttcgttttggttaagttggcttctgtttctagttgaggagtttcctaaaagttcataacagtgccattgtctttatatgaacatagactagagaaaccgtcctctttttccatcataattctaatctaacaatggaagatttgcccatttacacttttgagactttttggtggatgtaaataaccccattctttgcttgaacacagtattttcccaatagcactttcattgccagtgtctttctttggtgcctttcctgttcagcattcttagcctgtggcagtaaagagaaactttgtgctacatgacgacaaagctgctaaatctcctatttttttaaaatcactaacattatattgcaatgaaggaaataaaaaagtctctatttaaattcttttttaaattttcttcagttggtgtgtttttgggatgtcttatttttagatggttacactgttagaacactattttcagaatctgaatgtaatttgtgtaataaagtgttttcagagcattagctgtc

SEQ ID NO: 11533 - protein, 866 aa, Homo sapiens
MAGRVPSLLVLLVFPSSCLAFRSPLSVFKRFKETTRPFSNECLGTTRPVVPIDSSDFALDIRMPGVTPKQSDTYFCMSMRIPVDEEAFVIDFKPRASMDTVHHMLLFGCNMPSSTGSYWFCDEGTCTDKANILYAWARNAPPTRLPKGVGFRVGGETGSKYFVLQVHYGDISAFRDNNKDCSGVSLHLTRLPQPLIAGMYLMMSVDTVIPAGEKVVNSDISCHYKNYPMHVFAYRVHTHHLGKVVSGYRVRNGQWTLIGRQSPQLPQAFYPVGHPVDVSFGDLLAARCVFTGEGRTEATHIGGTSSDEMCNLYIMYYMEAKHAVSFMTCTQNVAPDMFRTIPPEANIPIPVKSDMVMMHEHHKETEYKDKIPLLQQPKREEEEVLDQDFHMEEALDWPGVYLLPGQVSGVALDPKNNLVIFHRGDHVWDGNSFDSKFVYQQIGLGPIEEDTILVIDPNNAAVLQSSGKNLFYLPHGLSIDKDGNYWVTDVALHQVFKLDPNNKEGPVLILGRSMQPGSDQNHFCQPTDVAVDPGTGAIYVSDGYCNSRIVQFSPSGKFITQWGEESSGSSPLPGQFTVPHSLALVPLLGQLCVADRENGRIQCFKTDTKEFVREIKHSSFGRNVFAISYIPGLLFAVNGKPHFGDQEPVQGFVMNFSNGEIIDIFKPVRKHFDMPHDIVASEDGTVYIGDAHTNTVWKFTLTEKLEHRSVKKAGIEVQEIKEAEAVVETKMENKPTSSELQKMQEKQKLIKEPGSGVPVVLITTLLVIPVVVLLAIAIFIRWKKSRAFGDSEHKLETSSGRVLGRFRGKGSGGLNLGNFFASRKGYSRKGFDRLSTEGSDQEKEDDGSESEEEYSAPLPALAPSSS

SEQ ID NO: 11534 - DNA, 3853 bp, Homo sapiens
cggcgcacgccgaggagagggagcccccgccaccgccgctgcctccgcgtgctcagcctgtccccgcccagggagccggagcctccaactaactccgcccgccgctccgccgcccgcaggctccggcttccgtcccggacagagcccgtggtcgcgcaggttctgaatgatgactgacgcgggtttgggtgatacccctcacagcccctgtcattccggagtcataaggcacccgcgcgtctagccccagcgccagggcacgcgagcggcgctggagggaggaaagcttccgcctgcgggccggacaaaagtcccgcctgcccacggctttttgcccgccgctcgtgaccgagacgcctcgccgcggccagctcgctgctctcgctggcggatggtgtgtggccgccgcaggacgcccgccgtgcccgggccatgaagtagcggctgctggcggcgccgctgcccaaccgccagccccagccccgcgctgcgctgcccggtcctctcccggcggggtcgtatcggcgtggacatggctggccgcgtccctagcctgctagttctccttgtttttccaagcagctgtttggctttccgaagcccactttctgtctttaagaggtttaaagaaactaccagaccattttccaatgaatgtcttggtaccaccagacccgtagttcctattgattcatcagattttgcattggatattcgcatgcctggggttacacctaaacagtccgatacatacttctgcatgtctatgcgaataccagtggatgaggaagccttcgtgattgacttcaagcctcgagccagcatggatactgtccatcacatgttactttttggatgcaatatgccttcatccactggaagttactggttttgtgatgaaggaacctgtacagataaagccaatattctgtatgcctgggcgagaaatgctccccctacccggctccccaaaggtgttggattcagagttggaggagagactggaagtaaatactttgtactacaggtacactatggggatattagtgcttttagagataataacaaggactgttctggtgtgtccttacacctcacacgtctgccacagcctttaattgctggcatgtaccttatgatgtctgttgacactgttatcccagcaggagaaaaagtggtgaattctgacatttcatgccattataaaaattatccaatgcatgtctttgcctatagagttcacactcaccatttaggtaaggtagtaagtggatacagagtaagaaatggacagtggacactgattggacggcagagccctcagctgccacaggctttctaccctgtggggcatccagttgatgtaagttttggtgacctactggctgcaagatgtgtattcactggtgaaggaaggacagaagccacacacattggtggcacgtctagtgatgaaatgtgcaacttatacattatgtattacatggaagccaagcatgcagtttctttcatgacctgtacccagaatgtagctccagatatgttcagaaccataccaccagaggccaacattccaattcccgtgaagtctgatatggttatgatgcatgaacatcataaagaaacagaatataaagataagattcctttactacagcagccaaaacgagaagaagaagaagtgttagaccagggtgatttctattcactactttccaagctgctaggagaaagggaagatgttgttcatgtgcacaaatataatcctacagaaaaggcagaatcagagtcagacctggtagctgagattgcaaatgtagtccaaaaaaaggatcttggtcgatctgatgccagagagggtgcagaacatgagaggggtaatgctattcttgtcagagacagaattcacaaattccacagactagtatctaccttgaggccaccagagagcagagttttctcattacagcagcccccacctggtgaaggcacctgggaaccagaacacacaggagatttccacatggaagaggcactggattggcctggagtatacttgttaccaggccaggtttctggggtggctctagaccctaagaataacctggtgattttccacagaggtgaccatgtctgggatggaaactcgtttgacagcaagtttgtttaccagcaaataggactcggaccaattgaagaagacactattcttgtcatagatccaaataatgctgcagtactccagtccagtggaaaaaatctgttttacttgccacatggcttgagtatagataaagatgggaattattgggtcacagacgtggctctccatcaggtgttcaaactggatccaaacaataaagaaggccctgtattaatcctgggaaggagcatgcaaccaggcagtgaccagaatcacttctgtcaacccactgatgtggctgtggatccaggcactggagccatttatgtatcagatggttactgcaacagcaggattgtgcagttttcaccaagtggaaagttcatcacacagtggggagaagagtcttcagggagcagtcctctgccaggccagttcactgttcctcacagcttggctcttgtgcctcttttgggccaattatgtgtggcagaccgggaaaatggtcggatccagtgttttaaaactgacaccaaagaatttgtgagagagattaagcattcatcatttggaagaaatgtatttgcaatttcatatataccaggcttgctctttgcagtgaatgggaagcctcattttggggaccaagaacctgtacaaggatttgtgatgaacttttccaatggggaaattatagacatcttcaagccagtgcgcaagcactttgatatgcctcatgatattgttgcatctgaagatgggactgtgtacattggagatgctcataccaacaccgtgtggaagttcaccttgactgagaaattggaacatcgatcagttaaaaaggctggcattgaggtccaggaaatcaaaggaaagggaagtggaggcttaaaccttggtaatttctttgcaagccgtaagggctacagtcgaaaagggtttgaccggcttagcactgagggcagtgaccaagagaaagaggatgatggaagtgaatcagaagaggagtattcagcacctctgcctgcgctcgcaccttcctcctcctgaaaaccaagctttgatttagattgagtaagatttacccagaatgtcagattcctttccctttagcacgtttaaagttctgtgtatttaattgtaaactgtactagtctgtgtgggactgtacacactttatttacttcgttttggttaagttggcttctgtttctagttgaggagtttcctaaaagttcataacagtgccattgtctttatatgaacatagactagagaaaccgtcctctttttccatcataattctaatctaacaatggaagatttgcccatttacacttttgagactttttggtggatgtaaataaccccattctttgcttgaacacagtattttcccaatagcactttcattgccagtgtctttctttggtgcctttcctgttcagcattcttagcctgtggcagtaaagagaaactttgtgctacatgacgacaaagctgctaaatctcctatttttttaaaatcactaacattatattgcaatgaaggaaataaaaaagtctctatttaaattcttttttaaattttcttcagttggtgtgtttttgggatgtcttatttttagatggttacactgttagaacactattttcagaatctgaatgtaatttgtgtaataaagtgttttcagagcattagctgtc

SEQ ID NO: 11535 - protein, 887 aa, Homo sapiens
MAGRVPSLLVLLVFPSSCLAFRSPLSVFKRFKETTRPFSNECLGTTRPVVPIDSSDFALDIRMPGVTPKQSDTYFCMSMRIPVDEEAFVIDFKPRASMDTVHHMLLFGCNMPSSTGSYWFCDEGTCTDKANILYAWARNAPPTRLPKGVGFRVGGETGSKYFVLQVHYGDISAFRDNNKDCSGVSLHLTRLPQPLIAGMYLMMSVDTVIPAGEKVVNSDISCHYKNYPMHVFAYRVHTHHLGKVVSGYRVRNGQWTLIGRQSPQLPQAFYPVGHPVDVSFGDLLAARCVFTGEGRTEATHIGGTSSDEMCNLYIMYYMEAKHAVSFMTCTQNVAPDMFRTIPPEANIPIPVKSDMVMMHEHHKETEYKDKIPLLQQPKREEEEVLDQGDFYSLLSKLLGEREDVVHVHKYNPTEKAESESDLVAEIANVVQKKDLGRSDAREGAEHERGNAILVRDRIHKFHRLVSTLRPPESRVFSLQQPPPGEGTWEPEHTGDFHMEEALDWPGVYLLPGQVSGVALDPKNNLVIFHRGDHVWDGNSFDSKFVYQQIGLGPIEEDTILVIDPNNAAVLQSSGKNLFYLPHGLSIDKDGNYWVTDVALHQVFKLDPNNKEGPVLILGRSMQPGSDQNHFCQPTDVAVDPGTGAIYVSDGYCNSRIVQFSPSGKFITQWGEESSGSSPLPGQFTVPHSLALVPLLGQLCVADRENGRIQCFKTDTKEFVREIKHSSFGRNVFAISYIPGLLFAVNGKPHFGDQEPVQGFVMNFSNGEIIDIFKPVRKHFDMPHDIVASEDGTVYIGDAHTNTVWKFTLTEKLEHRSVKKAGIEVQEIKGKGSGGLNLGNFFASRKGYSRKGFDRLSTEGSDQEKEDDGSESEEEYSAPLPALAPSSS

SEQ ID NO: 11536 - DNA, 506 bp, Homo sapiens
ggcttccgtcccggacagagcccgtggtcgcgcagagagcaggatgctgaaccatacttagaattaatcaggagaaacatgggaaacatgcagaaaacaacataattatatgtgcacttttaagctacaaagtgaaattagagtcttttaagtctgcatgtgatttcatcatttttaataataccaatcttaaagaatggccatcatgttctttggacattgattactccagaaggggaagaatataaaaaacaccaatgcccaagtttgtttgttgtgaaaatagccacacttgaagtctacttttatattgttcttgtaaaacatcaattattatacagtaaaagataaattcagctgaatatgtggggagaagggaaggaaagatttgaagattatttaataatgttttaacttttatgttcttcatgtatggcataaaaacttatttaaactcctgaggttttagttgagtgtatgttttaaataaatattattatttaagt

SEQ ID NO: 11537 - protein, 69 aa, Homo sapiens
SLLSLHVISSFLIIPILKNGHHVLWTLITPEGEEYKKHQCPSLFVVKIATLEVYFYIVLVKHQLLYSKR

SEQ ID NO: 11538 - DNA, 2216 bp, Homo sapiens
cccgcctcccaccctagtacccacgttttgctccacactccttgaccgcaggggctcggacacaaacccctgtcaccaggagagtcagtcagcactacttgggagggctaaagggaaatttggaaataaaattccaaagtttggagtaaaaaaattcaagtgttgattttatattctttccctttctgacacagcctaaagcgtagggggaacatgtgtttatctgtgggagataaacaagatggagtcccaaagactttaacaaaatatttttttaaaaatccactagaataaaatggtgacttctgtggttttcctagcatttgtctctaacaaatggtgaaataattactcatggccctctctgccattgtctttcattttttcacagtgaaattagacccctttacttcaccattctgccactgcaaattaagtataaagaaaatagcaagagtgtccacaccagtagacagtaagcttctctacctgtaagtgatgaaatcatagctaatgcacttgccatggagttttcaagatgattggtgtcagacagttttcactttgtttaaaaagtgttggtggccttttgtggtggtgttacaatcctctgggggcttaggaggatgttgatgcaacttttagaagcttttaatttcaaaaacaactcaaaaatctgaaggacagtcatagctgccactcagccccagttagtcaaaccccagtgacctttgcccctggttgccaagggctttgcaacatcaagcagggaaataaggatctgtctgtttagtggataccgtgtatcctttaatagaccaggtaacagttcgtgttagtttagactattgttttgtactgtactttcttgggtggcagaggaaagaaaagtaaaacattaaaaaaaaaaaaaaaactgcgttctttaaattctgtattattagcaacctctgttgtacatagtgtttgataataaagtattaatttgattcttatgtcttttgtaagtgagaacaatagactttcaggatacaaaacatgcattgaggctttgaaacatccaatgtgtaccatggctgaaaaaaagagtcacaagtggctgagacactgctccatacaggactcatgtgtggtcattgcccacccaatcttatgactccatcatcttgggacctggaacaacatgacttttttgatcgatattttgtcctcggtgttttcaaggtctgatgttggagccctgtggcccaccctcccttctccaccagcatgttggtttgaaaaggatagggaatttagaaacagttctgtactttggtttggtttggttttctgtttgtgattgttttcatggactgttttattttttcccaggaagagtctttatcaatatcatgtgcagctcactcatggaaatggttgcaaaccaatcagtgtaggaagcttaaatggggctgtttccctctctgtgtcgttgtgaaaggaagagtcacacagtacctgtggattttcagggactctgtttttctccggtgccttagcaacggcagcagccatttgtattattttcaaataattagaaaaacagttttcaactcctcctttccattcattgctctcagagttgtggtcactgacttttcttttgaaaaccgcctccaccaacacccccgtttgcctacaccaccccccttttacttagtatgtttattttttgtgtgtctcttgccttcctcccacgttttatttcccctcagagctgtgaatgggcaggtctgtctctggtttggcatcactgagtttttcccatgcattggccccagggctgctaggatgtgagacaaatctccctacaatgggcttgctcccattgtctgtacagtttaatagatgctggcatgtcggaggttacccatgagtcaaaatccgctctccatgcttactcttgacaccccattgaagccactcattgtgtgtgcgtctgggtgtgaagtccagctccgtgtggtcctgtgcttgtactgccctgctttgcagttcctttgcacttactcatcgagtgctgttttgaaatgctgacattatataaacgtaaaagaaaatgtaaaaaaaaaaaacccacacacaaacaaacccatacgatctgtatttgtatatacacgtgtccgtacaagtataactaaataaaaattaaagattttcatcattttaattgg

SEQ ID NO: 11539 - protein, 162 aa, Homo sapiens [sequence omitted]

SEQ ID NO: 11540 - DNA, 994 bp, Homo sapiens
cccgcctcccaccctagtacccacgttttgctccacactccttgaccgcaggggctcggacacaaacccctgtcaccaggagagtcagtcagcactacttgggagggctaaagggaaatttggaaataaaattccaaagtttggagtaaaaaaattcaagtgttgattttatattctttccctttctgacacagcctaaagcgtagggggaacatgtgtttatctgtgggagataaacaagatggagtcccaaagactttaacaaaatatttttttaaaaatccactagaataaaatggtgacttctgtggttttcctagcatttgtctctaacaaatggtgaaataattactcatggccctctctgccattgtctttcattttttcacagtgaaattagacccctttacttcaccattctgccactgcaaattaagtataaagaaaatagcaagagtgtccacaccagtagacagtaagcttctctacctgtaagtgatgaaatcatagctaatgcacttgccatggagttttcaagatgattggtgtcagacagttttcactttgtttaaaaagtgttggtggccttttgtggtggtgttacaatcctctgggggcttaggaggatgttgatgcaacttttagaagcttttaatttcaaaaacaactcaaaaatctgaaggacagtcatagctgccactcagccccagttagtcaaaccccagtgacctttgcccctggttgccaagggctttgcaacatcaagcagggaaataaggatctgtctgtttagtggataccgtgtatcctttaatagaccaggtaacagttcgtgttagtttagactattgttttgtactgtactttcttgggtggcagaggaaagaaaagtaaaacattaaaaaaaaaaaaaaaactgcgttctttaaattctgtattattagcaacctctgttgtacatagtgtttgataataaagtattaatttgattctt

SEQ ID NO: 11541 - protein, 46 aa, Homo sapiens
MALSAIVFHFFTVKLDPFTSPFCHCKLSIKKIARVSTPVDSKLLYL

SEQ ID NO: 11542 - DNA, 1077 bp, Homo sapiens
cttgaaaaggagaagaaagtttcttcctcaagtgatttataacttgaaacatgctgtcatgttttgcctctgcaatcccagataatggaagaaggtcctgtctaaagctcaaagtctttgtgagaccaacaaatagctgtatgaaaactataggtgttcatgatcgtgttttcgatgttaacgacaaagtagaaaattcattagaaccagcagatgacaccgtacatgagtcagccgagccatcccgcggcgagaacgcggcacaaacaccaaggatacccagccgccttttggcaatcctactgttcctcctggcgatgcttttgacattatagcacagtctcctcccatcacttgtcacagaaaacatcagggtcttggaacaccagagatccacctaactgctcatcctaagaagggacttgttattgggttttggcagatgtcagatttttgttttctttctttcagcctgaattctaagcaacaacttcaggttgggggcctaaacttgttcctgcctccctcaccccaccccgccccacccccagccctggcccttggcttctctcacccctcccaaattaaatggactccagatgaaaatgccaaattgtcatagtgacaccagtggttcgtcagctcctgtgcattctcctctaagaactcacctccgttagcgcactgtgtcagcgggctatggacaaggaagaatagtggcagatgcagccagcgctggctagggctgggagggttttgctctcctatgcaatatttatgccttctcattcagaactgtaagatgatcgcgcagggcatcatgtcaccatgtcaggtccggaggggaggtattaagaatagatacgatattacaccatttcctataggagtatgtaaatgaacaggcttctaaaaggttgagacactggtttttttttttaatatgactgtcttaaagcattcttgacagcaaaacttgtgctctctaaaagaagccttttttttttttctaggaggcaggttgggtgtggaatgctaatacagagcaggtgtgaaaacagagaaaactacaggttt

SEQ ID NO: 11543 - protein, 94 aa, Homo sapiens
MLSCFASAIPDNGRRSCLKLKVFVRPTNSCMKTIGVHDRVFDVNDKVENSLEPADDTVHESAEPSRGENAAQTPRIPSRLLAILLFLLAMLLTL

SEQ ID NO: 11544 - DNA, 1711 bp, Homo sapiens
gcttctctccatcttgtgattcctttttcctcctgaaccctccagtgggggtgcgagtttgtctttatcaccccccatcccaccgccttcttttcttctcgctctcctacccctccccagcttggtgggcgcctctttcctttctcgcccactttcatttttatttattcatatttatttggcgcccgctctctctctgtccctttgcctgcctccctccctccggatccccgctctctccccggagtggcgcgtcgggggctccgccgctggccaggcgtgatgttgcacgtggagatgttgacgctggtgtttctggtgctctggatgtgtgtgttcagccaggacccgggctccaaggccgtcgccgaccgctacgctgtctactggaacagcagcaaccccagattccagaggggtgactaccatattgatgtctgtatcaatgactacctggatgttttctgccctcactatgaggactccgtcccagaagataagactgagcgctatgtcctctacatggtgaactttgatggctacagtgcctgcgaccacacttccaaagggttcaagagatgggaatgtaaccggcctcactctccaaatggaccgctgaagttctctgaaaaattccagctcttcactcccttttctctaggatttgaattcaggccaggccgagaatatttctacatctcctctgcaatcccagataatggaagaaggtcctgtctaaagctcaaagtctttgtgagaccaacaaatagctgtatgaaaactataggtgttcatgatcgtgttttcgatgttaacgacaaagtagaaaattcattagaaccagcagatgacaccgtacatgagtcagccgagccatcccgcggcgagaacgcggcacaaacaccaaggatacccagccgccttttggcaatcctactgttcctcctggcgatgcttttgacattatagcacagtctcctcccatcacttgtcacagaaaacatcagggtcttggaacaccagagatccacctaactgctcatcctaagaagggacttgttattgggttttggcagatgtcagatttttgttttctttctttcagcctgaattctaagcaacaacttcaggttgggggcctaaacttgttcctgcctccctcaccccaccccgccccacccccagccctggcccttggcttctctcacccctcccaaattaaatggactccagatgaaaatgccaaattgtcatagtgacaccagtggttcgtcagctcctgtgcattctcctctaagaactcacctccgttagcgcactgtgtcagcgggctatggacaaggaagaatagtggcagatgcagccagcgctggctagggctgggagggttttgctctcctatgcaatatttatgccttctcattcagaactgtaagatgatcgcgcagggcatcatgtcaccatgtcaggtccggaggggaggtattaagaatagatacgatattacaccatttcctataggagtatgtaaatgaacaggcttctaaaaggttgagacactggtttttttttttaatatgactgtcttaaagcattcttgacagcaaaacttgtgctctctaaaagaagccttttttttttttctaggaggcaggttgggtgtggaatgctaatacagagcaggtgtgaaaacagagaaaactacaggttt

SEQ ID NO: 11545 - protein, 228 aa, Homo sapiens; identical to SEQ ID NO: 1086

SEQ ID NO: 11546 - DNA, 2515 bp, Homo sapiens
cggcggcagcagcccatgcctccggtgcaacagctgcgcctcctccggtgccccggcggcgggggcgggagataacctgtccctgctgctccgcacctcctcgcccggcggcgccttccggacccgcacctcctcgccgctgtcgggctcgtcctgctgctgctgctgctgctcgtcgcgccggggcagccagctcaatgtgagcgagctgacgccgtccagccatgccagtgcgctccggcagcagtacgcgcagcagtccgcgcagcagtcggcgtccgcctcccagtaccaccagtgccacagcctgcagcccgccgccagccccacgggcagcctcggcagtctgggctccgggcccccgctctcgcaccaccaccaccacccgcacccggcgcaccaccagcaccaccagccccaggcgcgccgcgagagcaaccccttcaccgaaatagccatgagcagctgcaggtacaacgggggcgtcatgcggccgctcagcaacttgagcgcgtcccgccggaacctgcacgagatggactcagaggcgcagcccctgcagccccccgcgtctgtcggaggaggtggcggcgcgtcctccccgtctgcagccgctgccgccgccgccgctgtttcgtcctcagcccccgagatcgtggtgtctaagcccgagcacaacaactccaacaacctggcgctctatggaaccggcggcggaggcagcactggaggaggcggcggcggtggcgggagcgggcacggcagcagcagtggcaccaagtccagcaaaaagaaaaaccagaacatcggctacaagctgggccaccggcgcgccctgttcgaaaagcgcaagcggctcagcgactacgcgctcatcttcggcatgttcggcatcgtggtcatggtcatcgagaccgagctgtcgtggggcgcctacgacaaggcgtcgctgtattccttagctctgaaatgccttatcagtctctccacgatcatcctgctcggtctgatcatcgtgtaccacgccagggaaatacagttgttcatggtggacaatggagcagatgactggagaatagccatgacttatgagcgtattttcttcatctgcttggaaatactggtgtgtgctattcatcccatacctgggaattatacattcacatggacggcccggcttgccttctcctatgccccatccacaaccaccgctgatgtggatattattttatctataccaatgttcttaagactctatctgattgccagagtcatgcttttacatagcaaacttttcactgatgcctcctctagaagcattggagcacttaataagataaacttcaatacacgttttgttatgaagactttaatgactatatgcccaggaactgtactcttggtttttagtatctcattatggataattgccgcatggactgtccgagcttgtgaaaggtaccatgatcaacaggatgttactagcaacttccttggagcgatgtggttgatatcaataacttttctctccattggttatggtgacatggtacctaacacatactgtggaaaaggagtctgcttacttactggaattatgggtgctggttgcacagccctggtggtagctgtagtggcaaggaagctagaacttaccaaagcagaaaaacacgtgcacaatttcatgatggatactcagctgactaaaagagtaaaaaatgcagctgccaatgtactcagggaaacatggctaatttacaaaaatacaaagctagtgaaaaagatagatcatgcaaaagtaagaaaacatcaacgaaaattcctgcaagctattcatcaattaagaagtgtaaaaatggaacagaggaaactgaatgaccaagcaaacactttggtggacttggcaaagacccagaacatcatgtatgatatgatttctgacttaaacgaaaggagtgaagacttcgagaagaggattgttaccctggaaacaaaactagagactttgattggtagcatccacgccctccctgggctcataagccagaccatcaggcagcagcagagagatttcattgaggctcagatggagagctacgacaagcacgtcacttacaatgctgagcggtcccggtcctcgtccaggaggcggcggtcctcttccacagcaccaccaacttcatcagagagtagctagaagagaataagttaaccacaaaataagactttttgccatcatatggtcaatattttagcttttattgtaaagcccctatggttctaatcagcgttatccgggttctgatgtcagaatcctgggaacctgaacactaagttttaggccaaaatgagtgaaaactctttttttttctttcagatgcacagggaatgcacctattattgctatatagattgttcctcctgtaatttcactaactttttattcatgcacttcaaacaaactttactactacattatatgatatataataaaaaaagttaatttctgcacata

SEQ ID NO: 11547 - protein, 579 aa, Homo sapiens; identical to SEQ ID NO: 1088

SEQ ID NO: 11548 - DNA, 1591 bp, Homo sapiens
acttgagcgcgtcccgccggaacctgcacgagatggactcagaggcgcagcccctgcagccccccgcgtctgtcggaggaggtggcggcgcgtcctccccgtctgcagccgctgccgccgccgccgctgtttcgtcctcagcccccgagatcgtggtgtctaagcccgagcacaacaactccaacaacctggcgctctatggaaccggcggcggaggcagcactggaggaggcggcggcggtggcgggagcgggcacggcagcagcagtggcaccaagtccagcaaaaagaaaaaccagaacatcggctacaagctgggccaccggcgcgccctgttcgaaaagcgcaagcggctcagcgactacgcgctcatcttcggcatgttcggcatcgtggtcatggtcatcgagaccgagctgtcgtggggcgcctacgacaaggcgtcgctgtattccttagctctgaaatgccttatcagtctctccacgatcatcctgctcggtctgatcatcgtgtaccacgccagggaaatacaggtaccatgatcaacaggatgttactagcaacttccttggagcgatgtggttgatatcaataacttttctctccattggttatggtgacatggtacctaacacatactgtggaaaaggagtctgcttacttactggaattatgggtgctggttgcacagccctggtggtagctgtagtggcaaggaagctagaacttaccaaagcagaaaaacacgtgcacaatttcatgatggatactcagctgactaaaagagtaaaaaatgcagctgccaatgtactcagggaaacatggctaatttacaaaaatacaaagctagtgaaaaagatagatcatgcaaaagtaagaaaacatcaacgaaaattcctgcaagctattcatcaattaagaagtgtaaaaatggaacagaggaaactgaatgaccaagcaaacactttggtggacttggcaaagacccagaacatcatgtatgatatgatttctgacttaaacgaaaggagtgaagacttcgagaagaggattgttaccctggaaacaaaactagagactttgattggtagcatccacgccctccctgggctcataagccagaccatcaggcagcagcagagagatttcattgaggctcagatggagagctacgacaagcacgtcacttacaatgctgagcggtcccggtcctcgtccaggaggcggcggtcctcttccacagcaccaccaacttcatcagagagtagctagaagagaataagttaaccacaaaataagactttttgccatcatatggtcaatattttagcttttattgtaaagcccctatggttctaatcagcgttatccgggttctgatgtcagaatcctgggaacctgaacactaagttttaggccaaaatgagtgaaaactctttttttttctttcagatgcacagggaatgcacctattattgctatatagattgttcctcctgtaatttcactaactttttattcatgcacttcaaacaaactttactactacattatatgatatataataaaaaaagttaatttctgcaca

SEQ ID NO: 11549 - protein, 231 aa, Homo sapiens; identical to SEQ ID NO: 1090

SEQ ID NO: 11550 - DNA, 1457 bp, Homo sapiens
cttcaacactgtggaagctttgttctttcgctcttttgcaataaatcttgctactgctcactctttgggtccacactgcctttatgagctgtaacactcaccgcgaaaggtctgcagcttcactcctgaagccagcgagcccacgagcccacagggaggaatgaacaactccagatgcaccgccttaagagctgtaacactcacggcgaaggtctgcagcttcactcctgagccagcgagaccaggaacccaccagaaggaagaaactccgaacacatccgaacatcagaaggaacaaactccagacggcgccaccttaagagctgtaacactcaccgccagggtccggggcttcgttcttgaagtcagtgagaccaagaacccaccaattccggacgcagtaccatgatcaacaggatgttactagcaacttccttggagcgatgtggttgatatcaataacttttctctccattggttatggtgacatggtacctaacacatactgtggaaaaggagtctgcttacttactggaattatgggtgctggttgcacagccctggtggtagctgtagtggcaaggaagctagaacttaccaaagcagaaaaacacgtgcacaatttcatgatggatactcagctgactaaaagagtaaaaaatgcagctgccaatgtactcagggaaacatggctaatttacaaaaatacaaagctagtgaaaaagatagatcatgcaaaagtaagaaaacatcaacgaaaattcctgcaagctattcatcaattaagaagtgtaaaaatggaacagaggaaactgaatgaccaagcaaacactttggtggacttggcaaagacccagaacatcatgtatgatatgatttctgacttaaacgaaaggagtgaagacttcgagaagaggattgttaccctggaaacaaaactagagactttgattggtagcatccacgccctccctgggctcataagccagaccatcaggcagcagcagagagatttcattgaggctcagatggagagctacgacaagcacgtcacttacaatgctgagcggtcccggtcctcgtccaggaggcggcggtcctcttccacagcaccaccaacttcatcagagagtagctagaagagaataagttaaccacaaaataagactttttgccatcatatggtcaatattttagcttttattgtaaagcccctatggttctaatcagcgttatccgggttctgatgtcagaatcctgggaacctgaacactaagttttaggccaaaatgagtgaaaactctttttttttctttcagatgcacagggaatgcacctattattgctatatagattgttcctcctgtaatttcactaactttttattcatgcacttcaaacaaactttactactacattatatgatatataataaaaaaagttaatttctgcacata

SEQ ID NO: 11551 - protein, 231 aa, Homo sapiens; identical to SEQ ID NO: 1090

SEQ ID NO: 11552 - DNA, 1514 bp, Homo sapiens
ttgctactgctcactctttgggtccacactgcctttatgagctgtaacactcaccgcgaaaggtctgcagcttcactcctgaagccagcgagcccacgagcccacagggaggaatgaacaactccagatgcaccgccttaagagctgtaacactcacggcgaaggtctgcagcttcactcctgagccagcgagaccaggaacccaccagaaggaagaaactccgaacacatccgaacatcagaaggaacaaactccagacggcgccaccttaagagctgtaacactcaccgccagggtccggggcttcgttcttgaagtcagtgagaccaagaacccaccaattccggacgcagtaccatgatcaacaggatgttactagcaacttccttggagcgatgtggttgatatcaataacttttctctccattggttatggtgacatggtacctaacacatactgtggaaaaggagtctgcttacttactggaattatgggtgctggttgcacagccctggtggtagctgtagtggcaaggaagctagaacttaccaaagcagaaaaacacgtgcacaatttcatgatggatactcagctgactaaaagaggaaaggaagatcatggagacaacaattgcaatacacggtggagaactcaacaccccttgattaaaaaaaaaaaatagttgaataaaaaagaagtttcctgaaggagtaaaaaatgcagctgccaatgtactcagggaaacatggctaatttacaaaaatacaaagctagtgaaaaagatagatcatgcaaaagtaagaaaacatcaacgaaaattcctgcaagctattcatcaattaagaagtgtaaaaatggaacagaggaaactgaatgaccaagcaaacactttggtggacttggcaaagacccagaacatcatgtatgatatgatttctgacttaaacgaaaggagtgaagacttcgagaagaggattgttaccctggaaacaaaactagagactttgattggtagcatccacgccctccctgggctcataagccagaccatcaggcagcagcagagagatttcattgaggctcagatggagagctacgacaagcacgtcacttacaatgctgagcggtcccggtcctcgtccaggaggcggcggtcctcttccacagcaccaccaacttcatcagagagtagctagaagagaataagttaaccacaaaataagactttttgccatcatatggtcaatattttagcttttattgtaaagcccctatggttctaatcagcgttatccgggttctgatgtcagaatcctgggaacctgaacactaagttttaggccaaaatgagtgaaaactctttttttttctttcagatgcacagggaatgcacctattattgctatatagattgttcctcctgtaatttcactaactttttattcatgcacttcaaacaaactttactactacattatatgatatataataaaaaaagttaatttctgcaca

SEQ ID NO: 11553 - protein, 113 aa, Homo sapiens
MEQRKLNDQANTLVDLAKTQNIMYDMISDLNERSEDFEKRIVTLETKLETLIGSIHALPGLISQTIRQQQRDFIEAQMESYDKHVTYNAERSRSSSRRRRSSSTAPPTSSESS

SEQ ID NO: 11554 - DNA, 2035 bp, Homo sapiens
agccaaaagttccaacagcagtattgtgcaactgcaggatgttagatgtgtgggagttcctggggagctcaagccagagccgcattaaagccagtcccagccaggcttaaggagagctggaatggagaggattctcatctaacatctgggttgcagttgtatgttaacatggacttcctaggaagtaacatatcaaacaaaagggaaagtgatcaaccagcagcaggtaccagccacagttaactgcacctgctaggagctctgaaagactttttttttttttaaacgaataaagaaattctcatttcactctcctccacactggactcgctgaagaaagagctactctctgatgaagttggtggtgctgtggaagaggaccgccgcctcctggacgaggaccgggaccgctcagcattgtctgactgacaggaaaggacccagataagatcctggaggcaatgggatgtgtggctgctcaacacagaccgaccacacttgctcactgccgtgtcatctcatacccttccaccctggacatacataccttctcacatgcaccaagactctgtgcatggagagaatcctcaaaccaacagaaaaatgattgacacagaagccaagtgccagcactgcgtataagtaacactaccaccatccacagtgaagttaaaaggagttcgagtaaattcttagatccatcttcatacttccacttcctcagacagccgggagagccacctttcagaagcttttttcatctgatcctcatgtcctttcaaaggtgattttgtctcttgagggatttctggttgtcacaagttgggggtagtgctactggcatctagtgtgtagaagtcaagtatggtgagaaacatccagaacacacaggacagtcccacatgaaaaagaattattcagccaaaaaagtcacgagtgccaaggttgagaggccctggaatacagcaactacactataaaaccaacttggaatgtctcccaaatgaaactggttgacctcggtgaacttcataaaaaaatttttatcaaagggatgttcacaagttttgagaacaaatttaggagtttgaagaaaatgagagtaagtcatggagagtagaagacattccaaagtggtaaatgtaggctgaaaatgtagcatctgaacctgggaggctctgaccatctactataaacgtggacctactaactgcaatgaagtatcacaggactgtctgatagaccattgttctgatctcttgaaaaagagactctgtgtggtactctaagaattacagtcctcccgctccgtgatcaaggtgtgctcattccaagttgtgagagtcttctgtgctgaaagacgagcaactacttgctggggcaccgattggagggtccaggcaaggtcaaggtggcctctgctgagatctttctggaaagaaatcaaaatcctaacaggagtggaaaatcactggaatcaagagccttggaaattatgcaagatgaagctggctcacttccgaaagctttctaggttcaagcaaatgaaaattcctacgtagaacaaacaatgacaagaagtcttagcctccagcacttcacagtttcaagctatgtttctagggaagcagaacattcctgaatgtcattgcattattcctcggggagagataagaagcagagtcagaaaactgagccaccaaacccagcgagctgagagagttctcagatgaagatgattccagacaggctgaggagaatgagcacagattttctgggaaggtaatgcaggaatcaataggatggaatactgcaaagggaagcttggagagagaatagcctctgcactttgactgttttgcagttaaccaaaggccatcgaggatcagaattacaaaaatcaaacagacccatgagcttgagctcagttgtgcaaaatgtttgtcagtcatctctcttcaaaacaaacacaggacatcttcttaaattctacctctgttaaactatacttcccaaacaagaacctatcaaaccc

SEQ ID NO: 11555 - protein, 65 aa, Homo sapiens
MCGSSWGAQARAALKPVPARLKESWNGEDSHLTSGLQLYVNMDFLGSNISNKRESDQPAAGTSHS

SEQ ID NO: 11556 - DNA, 750 bp, Homo sapiens
gcaacaagcctctatccagagctcagaaactgaaaaaaatatattacatttttcttatacaggcataccttggatatattggaagggagaggctaaaaatctctcatgaaagcaccagtatctgagtgctgaccacggtaggcttctgcgcttacagaggagctgcatcacagatgagagaaatacaaccaagacttcaactacaattgagcagaaagcctcccataaacatgaagacaattcgtaaccagagtttaagttttataaaggtgtctaaaaatatcttattttgaatcatgcaaaagtgatccagtctggaagcattgtaaaaataatgcttccttcccaggctgggtagtttgtaaaaccctagagactagaatttcctcaagcctattttatcctctttattctggagaagaaaacaaatcaagaaatcgaaacacttgaccttggaaaggatctcatcctttgttacagactggctgactctgaatatatcaggaatgtacttcctagaccccaggactcaaatataaccagagtgacagatagggcaggtctgagagaagtagcaaacgtacttcatcttagggtcagaaagaaacatgctggtataattctaacttagaaaataaccaggtaaggggtcttgtaaacttcatacaatgctgctgcctctgagttattaaaaaaattactaacaggcttctgatcaactaaaggaataaaattaggtgttcaaaggag

SEQ ID NO: 11557 - protein, 39 aa, Homo sapiens
MREIQPRLQLQLSRKPPINMKTIRNQSLSFIKVSKNILF

SEQ ID NO: 11558 - DNA, 1837 bp, Homo sapiens
gcggctgcccgaggtccagaggaagtgtgtggacagcgcggccttcctggccggactagggcgccgacatgaacctgcaccaggtgctgaccggggctgtgaaccctggcgaccactgcttctccgtgggcagcattggcgaccagcgcttcacggcttatgcatctggatgtgacattgtaatactgggaagcgattttgaaagattacagataatcccaggagctaaacatggaaatattcaagtgggatgtgtagactgttcaatgcaacaaggcaagattgcagcgtcttatggaaatgttatctccatttttgaaccagttaacctaccaaaacaaaagaaaaatttggaattatatagtcagtggcagaaaagtggccaattttttctggaatcaatagcacacaatataacctgggatcccacaggcagtcgtcttttaactggttccagctatttgcaactctggtccaatactaacttggagaagccaactgaagatgaaaatttaaataaaacagatcttaactttggagattggaaatgcatttggcattgcaaaactgcttcccaagttcatttaatgaaattttcaccagatggagaattttttgccactgctgggaaggatgactgtcttttgaaggtttggtataatgtagaaaactggcggacagctgttacttctccagatggaagttcagaaaaacaatcccaaggagaaattgacttttcttttgtgtatctggcccatcctcgagcagtaaatggattttcctggcgtaaaacaagcaaatatatgcctagggcttctgtatgtaatgtactgttgacttgctgcaaagataatgtgtgtcgtctttgggtagagacatttttaccaaatgattgtttgctatacggaggtgactgcagccattggactgaatcaattaatttaacaaataacttcaagagaaatgcttccagtaaagaacgagttcaaaatgctttagaagtaaatctgagacattttcgtagaggtcggaggagatcacttgctcttgtagcacatacgggatatctaccacatcagcaggatcctcatcatgttcacaggaacactccactgcatgccaatgcactttgccactttcatattgcagccagcatcaacccagccacagacattccacttcttccatctattacatctctgagtctaaatgaaaatgaagagaagaccggaccttttgttgtacactggctaaacaataaagaactgcattttactttgtccatggaagtttttttacagcaacttagaaaaagttttgaacaaccatcttctgaggccagtgtagaagattctaatcaggcagatgtaaaatctgatgaagaaactgatgatggtgttgatgatctgaaaataaatcccgaaaagaaggaattaggctgtgataaaatggtaccaaactcaagttttacatcattatcgtcagctgccattgatcatcagattgaagtacttctgtctgaatggagtaaaaatgcagatatgctatttagtattcatcccatggatggttctttgctagtttggcatgtggattggctggatgaataccagcctggtatgtttcgtcaagtacaggtgtcctttgtttccagaattccagtagctttccccacaggtgatgcaaactctctctgtaaaagcataatgatgtatgcctgtaccaagaatgttgacttggctattcagcaggggaaacaaaaaccttctggcctcacccgttccacatcaatgcttatttcttctggtcacaataaatcatctaatagtttaaaatt

SEQ ID NO: 11559 - protein, 588 aa, Homo sapiens
MNLHQVLTGAVNPGDHCFSVGSIGDQRFTAYASGCDIVILGSDFERLQIIPGAKHGNIQVGCVDCSMQQGKIAASYGNVISIFEPVNLPKQKKNLELYSQWQKSGQFFLESIAHNITWDPTGSRLLTGSSYLQLWSNTNLEKPTEDENLNKTDLNFGDWKCIWHCKTASQVHLMKFSPDGEFFATAGKDDCLLKVWYNVENWRTAVTSPDGSSEKQSQGEIDFSFVYLAHPRAVNGFSWRKTSKYMPRASVCNVLLTCCKDNVCRLWVETFLPNDCLLYGGDCSHWTESINLTNNFKRNASSKERVQNALEVNLRHFRRGRRRSLALVAHTGYLPHQQDPHHVHRNTPLHANALCHFHIAASINPATDIPLLPSITSLSLNENEEKTGPFVVHWLNNKELHFTLSMEVFLQQLRKSFEQPSSEASVEDSNQADVKSDEETDDGVDDLKINPEKKELGCDKMVPNSSFTSLSSAAIDHQIEVLLSEWSKNADMLFSIHPMDGSLLVWHVDWLDEYQPGMFRQVQVSFVSRIPVAFPTGDANSLCKSIMMYACTKNVDLAIQQGKQKPSGLTRSTSMLISSGHNKSSNSL

SEQ ID NO: 11560 - DNA, 8192 bp, Homo sapiens
gccctccggggctcgggatgagtcgcgggccccagctgagcggctccggctccaggcgcctgtcgctgcttctgccgtcgccaccgaagagcggccgccgcccctgagggaaggagggagggaagcagccgctgacccgtggcatgagctggatgcggtgtccgttgcaggactagggcgccgacatgaacctgcaccaggtgctgaccggggctgtgaaccctggcgaccactgcttctccgtgggcagcattggcgaccagcgcttcacggcttatgcatctggatgtgacattgtaatactgggaagcgattttgaaagattacagataatcccaggagctaaacatggaaatattcaagtgggatgtgtagactgttcaatgcaacaaggcaagattgcagcgtcttatggaaatgttatctccatttttgaaccagttaacctaccaaaacaaaagaaaaatttggaattatatagtcagtggcagaaaagtggccaattttttctggaatcaatagcacacaatataacctgggatcccacaggcagtcgtcttttaactggttccagctatttgcaactctggtccaatactaacttggagaagccaactgaagatgaaaatttaaataaaacagatcttaactttggagattggaaatgcatttggcattgcaaaactgcttcccaagttcatttaatgaaattttcaccagatggagaattttttgccactgctgggaaggatgactgtcttttgaaggtttggtataatgtagaaaactggcggacagctgttacttctccagatggaagttcagaaaaacaatcccaaggagaaattgacttttcttttgtgtatctggcccatcctcgagcagtaaatggattttcctggcgtaaaacaagcaaatatatgcctagggcttctgtatgtaatgtactgttgacttgctgcaaagataatgtgtgtcgtctttgggtagagacatttttaccaaatgattgtttgctatacggaggtgactgcagccattggactgaatcaattaatttaacaaataacttcaagagaaatgcttccagtaaagaacgagttcaaaatgctttagaagtaaatctgagacattttcgtagaggtcggaggagatcacttgctcttgtagcacatacgggatatctaccacatcagcaggatcctcatcatgttcacaggaacactccactgcatgccaatgcactttgccactttcatattgcagccagcatcaacccagccacagacattccacttcttccatctattacatctctgagtctaaatgaaaatgaagagaagaccggaccttttgttgtacactggctaaacaataaagaactgcattttactttgtccatggaagtttttttacagcaacttagaaaaagttttgaacaaccatcttctgaggccagtgtagaagattctaatcaggcagatgtaaaatctgatgaagaaactgatgatggtgttgatgatctgaaaataaatcccgaaaagaaggaattaggctgtgataaaatggtaccaaactcaagttttacatcattatcgtcagctgccattgatcatcagattgaagtacttctgtctgaatggagtaaaaatgcagatatgctatttagtattcatcccatggatggttctttgctagtttggcatgtggattggctggatgaataccagcctggtatgtttcgtcaagtacaggtgtcctttgtttccagaattccagtagctttccccacaggtgatgcaaactctctctgtaaaagcataatgatgtatgcctgtaccaagaatgttgacttggctattcagcaggggaaacaaaaaccttctggcctcacccgttccacatcaatgcttatttcttctggtcacaataaatcatctaatagtttaaaattaagtatttttacgcctaatgttatgatgatatcaaaacatgctgatggttctctgaatcagtggctggtcagttttgccgaggaatctgctttttctactgttctcagtatttcccacaaatccagatattgtggtcatcgttttcatcttaatgatttagcttgccactcagtattaccattattgctgacaacatcacaccataatgcattaaggacaccagatgttgataacccagagcaaccttttgatgctctaaatattgaagaatgctctttgacacaacaaaataaaagcactgttgacgtggcatttcaggatcccagtgcagtttacagtgagcttattctgtggagggttgacccagttgggccattgtctttttctggaggagtttctgagcttgcccggattaattctcttcatgtttctgccttttccaatgtggcatggctgcccactcttatacccagttattgtctgggtgcatactgcaactctcctagtgcatgctttgtagccagtgatggacaatatctgagattatatgaagcagttattgatgctaagaaacttttatctgagctttctaaccctgaaatttctaaatatgttggtgaagtctttaacatcgtcagtcaacaatcaacagccaggccaggatgcattattgcattagatcccattaccaaacttcatggcagaaaaacccaactgcttcatgtttttgaagaagacttcattttgaataaccttgagaagaaaagccttggcaaagacagcattttatctaatgcaggcagctcacctaatggattttctgagaagttctacctaattgtaatagaatgcactcaagacaaccgttcactgttacacatgtggaatttacatctaaagtcaattcctgtctcattagatgaaaaagtagatacaaaattatccgaagcggtttggcagccagaagaacattattcttcttctccagagaagatcctatctcctttttcacaaaagtatcaggcttgcagagcaaatctccagagtaccagcaggttgactctgttttcagaaatggtttatagccaagaattgcatttaccagaaggagttgagataataagtattaagccatcagcaggacatctgagttcatcttctatatatcctgcatgcagtgctccttatttattggcaacttcatgttcagatgagaaagtaagattctggagatgcagagtaacagatggagaatctgccacgtcaaagaatggaaaaattgatcttgcatacatttgggaagaatggccattacttattgaagatggacttcagagcaatagtagtataactgtacctggtaggcctgtagaagttagctgtgcacatacaaatcgtttagcagtagcttataagcagcctgcatctaatagtagatcttcccaggactttgtgatgcatgtaagtatttttgaatgtgagtcaacaggaggttcatgttgggtccttgagcagacaattcatttagatgagttaagcacagtattggattctggcattagtgttgatagcaatttagtggcctataataaacaagacatgtatttatctagtaaagagaatatcacatcaaacacaaagcatttagttcacttagattggatgtctagagaagacggttctcatatcctgactgtaggaattggatcaaaactttttatgtatggacccctggctggcaaggtacaagaccaaactggtaaggaaaccctggcatttcctctctgggagagtaccaaagttgtgcccctttctaaatttgtactattacgaagtgtggacctagtttcttctgtagatggctccccaccttttcctgtttctttatcgtgggtccgggatggcatccttgtggtaggaatggactgtgaaatgcatgtgtattgccaatggcaaccatcttctaaacaagaacctgttataacagattcgtacagtgggagcactccatctataacaagtttaataaaacagagtaactccagttctgggttacatcctccaaagaaaactctgactcgatccatgaccagtcttgcacagaaaatctgtggaaagaaaactgcattcgatccttcagtggatatggaagattcaggtctttttgaagcagctcatgtactttccccgactctacctcagtatcatcccttgcagcttttggaactcatggatcttggtaaagttcggagagccaaggccatcttgtcccatcttgttaagtgcattgctggggaagttgtggctctgaatgaagctgaatctaatcatgaacgccgccttaggtctctcacaatcagtgctagtggaagcactaccagagacccccaggcattcaacaaggctgaaaatacagattacacagaaatagattctgttcctccacttcctttatatgccttacttgcagcagatgatgatagctgttactcatctttggagaaatctagtaatgagagtacgttaagtaaatcaaaccaattatctaaagaaagttatgatgagctttttcagactcaacttctaatgactgatactcatatgttagagacagatgaagaaaatacaaagcctagagttattgacctttcacagtacagtccgacttactttggacctgagcatgctcaggttctttctggccacttacttcattctagtttaccaggactcagccggatggagcagatgtctttgatggccttagcagatacaattgcaactacaagcactgatattggagaaagccgagacagaagccaaggtggagaaactcttgatgaatgtgggttaaaatttcttttggctgttcgactccatacctttcttacaacttcccttccagcctatcgagctcaactccttcaccaaggcctgtctacaagtcattttgcttgggcatttcactcagtagcagaagaagaactgctgaacatgttgccagccatgcagaaagatgatcccacttggtctgaactaagagctatgggtgtggggtggtgggtccggaatacccgcatcttacgcaaatgcatagaaaaagtagctaaagcagccttttatagaaagaatgatcctttagatgctgccattttttaccttgcaatgaaaaagaaagctgtgatttggggattatatagagctgaaaaaaacaccaggatgacacagttttttggacacaattttgaggatgagaggtggcgtaaagcagctttaaagaatgctttttctttgctaggcaaacaaagatttgaacattctgcagcattttttcttttagctggttgcctcagagatgcaattgaggtatgtcttgagaaattgaatgacattcagttggctcttgtaatagcaagactctatgagtctgaatttgatacatctgcagcatataaatctattttacgtaaaaaagttttgggaatcgattctcctgtcagtgaactgtgttcattgaacataaatatgcatcatgatccttttcttcggagcatggcatattggattttggaagattatagtggtgctctggaaacattaataaagcaacctatcagagagaatgatgatcaagttttatcagccagtaatcctacagtttttaatttctacaattatctaagaacacatcctcttttgctgagacgtcattttggatcatctgatacattttccacacatatgagcctaacaggaaaaagtggactggcaggaacaattaatttaagtgaaagacgtttattttttaccactgccagtgctcatttaaaagctggctgcccaatgttggctttggaagtattatcaaagatgcctaaagtcatcaagaaaacaagacctttttatagggcttctagttttctggatactagtaaagactgttctccttcttctccattaaagttggatgcaagggaagataagtcttctgctgttgattggtcacagtcactgataaatggttttggatcttcttcagagggttcctcagagaagcaatcaaactccactctttcttttgactggagccaaccaagtgttgtgtttcaggatgactctttagagttaaaatgggacagtgataatgatgaagaaaatgaggatgtccctatttcaatgaaagaactaaaacctttacagagaaaaacagataaaaagttggatgacataagttctaactacacagaatctttcagcacactagatgaaaatgaccttttaaatccatcagaagatataattgcagttcagttaaaatttagagcatgtttaaagattctcacagtagaacttcgtactttatctactggctatgaaatagatggtggaaaattgcgttaccaactataccactggcttgaaaaagaggtgatagctcttcagaggacttgtgacttttgctcagatgctgaagaactacagtctgcatttggcagaaatgaagatgaatttggattaaatgaggatgctgaagatttgcctcaccaaacaaaagtgaaacaactgagagaaaattttcaggaaaaaagacagtggctcttgaagtatcagtcacttttgagaatgtttcttagttactgcatacttcatggatcccatggtgggggtcttgcatctgtaagaatggaattgattttgcttttgcaagaatctcagcaggaaacatcagaaccactattttctagccctctgtcagagcaaacctcagtgcctctcctctttgcttgtacagccaatgccaaaacagtagttgccaatccattattgcaccttagtaatctgacacatgatattctccatgccataataaactttgattcaccaccccaccctgatatccaaagcaataaagtgtatgtaatgcatactttagcagcttcactttctgcttgtatttatcagtgcctttgtggtagtcataactacagttcatttcagacgaatcagtttactggaatggtatatcagacagtactgcttcctcatcgaccttctttgaaaacaggaagcttagatgaagcattaactcccaatacgtcaccagctcaatggccaggaataacttgtctaattcgacttttgaattcttctggcgaggaagcccagtcagggcttacagtcttgctctgtgagattctcacagcagtgtatcttagtctcttcatccatggcctggccacacattcaagtaatgagctatttcggattgtggcccatcctctaaatgagaaaatgtggtctgctgtgtttggtggaggtgcacatgttcctagcaaagaacagacacattcaaaaactttacctgtttcttcactagttgaagaaggagaaaaacagaacaaacgttttaggccgtcaaaaatgtcttgcagagaatctgccccactgaccccttcctcggcaccagtaagccaggagtcactggcggttaaagaaaagttcatcccacctgagctcagtatctgggactatttcatagctaagccttttctaccctcttctcaaagtagagccgaatatgattcagaggagagtctgggaagtgatgatgatgacaatgatgatgatgatgatgttttagcatcagatttccatctccaggaacattctaattcaaattcatatagttggtccttgatgcggttggcgatggtgcaattggtgctcaacaatttgaagactttttatcccttcgcaggtcatgatcttgcagagcttccagttagttcacctctttgtcatgcggttctaaaaactcttcaatgttgggaacaagttcttctccgacgacttgaaatccatggtgggccacctcaaaattatatcgcaagtcataccgccgaagagagtttgtctgcaggtcctgcaattcttcgccacaaagctttactggaacctacaaacactcctttcaaatccaaacaccatctggcactgtctgtgaagaggctttggcagtatttggtgaagcaggaagaaattcaggaaacctttatcaaaaatatattcacaaagaaacggtgtctaaatgagatagaagcagatttgggatatcctggaggtaaagcaagaattattcataaggaatctgatatcattactgcgtttgctgttaataaggcaaatagaaactgcatagcaatcgcttccagtcatgatgttcaagaactggatgtt

SEQ ID NO: 11561 - protein, 3027 aa, Homo sapiens
MNLHQVLTGAVNPGDHCFSVGSIGDQRFTAYASGCDIVILGSDFERLQIIPGAKHGNIQVGCVDCSMQQGKIAASYGNVISIFEPVNLPKQKKNLELYSQWQKSGQFFLESIAHNITWDPTGSRLLTGSSYLQLWSNTNLEKPTEDENLNKTDLNFGDWKCIWHCKTASQVHLMKFSPDGEFFATAGKDDCLLKVWYNVENWRTAVTSPDGSSEKQSQGEIDFSFVYLAHPRAVNGFSWRKTSKYMPRASVCNVLLTCCKDNVCRLWVETFLPNDCLLYGGDCSHWTESINLTNNFKRNASSKERVQNALEVNLRHFRRGRRRSLALVAHTGYLPHQQDPHHVHRNTPLHANALCHFHIAASINPATDIPLLPSITSLSLNENEEKTGPFVVHWLNNKELHFTLSMEVFLQQLRKSFEQPSSEASVEDSNQADVKSDEETDDGVDDLKINPEKKELGCDKMVPNSSFTSLSSAAIDHQIEVLLSEWSKNADMLFSIHPMDGSLLVWHVDWLDEYQPGMFRQVQVSFVSRIPVAFPTGDANSLCKSIMMYACTKNVDLAIQQGKQKPSGLTRSTSMLISSGHNKSSNSLKLSIFTPNVMMISKHADGSLNQWLVSFAEESAFSTVLSISHKSRYCGHRFHLNDLACHSVLPLLLTTSHHNALRTPDVDNPEQPFDALNIEECSLTQQNKSTVDVAFQDPSAVYSELILWRVDPVGPLSFSGGVSELARINSLHVSAFSNVAWLPTLIPSYCLGAYCNSPSACFVASDGQYLRLYEAVIDAKKLLSELSNPEISKYVGEVFNIVSQQSTARPGCIIALDPITKLHGRKTQLLHVFEEDFILNNLEKKSLGKDSILSNAGSSPNGFSEKFYLIVIECTQDNRSLLHMWNLHLKSIPVSLDEKVDTKLSEAVWQPEEHYSSSPEKILSPFSQKYQACRANLQSTSRLTLFSEMVYSQELHLPEGVEIISIKPSAGHLSSSSIYPACSAPYLLATSCSDEKVRFWRCRVTDGESATSKNGKIDLAYIWEEWPLLIEDGLQSNSSITVPGRPVEVSCAHTNRLAVAYKQPASNSRSSQDFVMHVSIFECESTGGSCWVLEQTIHLDELSTVLDSGISVDSNLVAYNKQDMYLSSKENITSNTKHLVHLDWMSREDGSHILTVGIGSKLFMYGPLAGKVQDQTGKETLAFPLWESTKVVPLSKFVLLRSVDLVSSVDGSPPFPVSLSWVRDGILVVGMDCEMHVYCQWQPSSKQEPVITDSYSGSTPSITSLIKQSNSSSGLHPPKKTLTRSMTSLAQKICGKKTAFDPSVDMEDSGLFEAAHVLSPTLPQYHPLQLLELMDLGKVRRAKAILSHLVKCIAGEVVALNEAESNHERRLRSLTISASGSTTRDPQAFNKAENTDYTEIDSVPPLPLYALLAADDDSCYSSLEKSSNESTLSKSNQLSKESYDELFQTQLLMTDTHMLETDEENTKPRVIDLSQYSPTYFGPEHAQVLSGHLLHSSLPGLSRMEQMSLMALADTIATTSTDIGESRDRSQGGETLDECGLKFLLAVRLHTFLTTSLPAYRAQLLHQGLSTSHFAWAFHSVAEEELLNMLPAMQKDDPTWSELRAMGVGWWVRNTRILRKCIEKVAKAAFYRKNDPLDAAIFYLAMKKKAVIWGLYRAEKNTRMTQFFGHNFEDERWRKAALKNAFSLLGKQRFEHSAAFFLLAGCLRDAIEVCLEKLNDIQLALVIARLYESEFDTSAAYKSILRKKVLGIDSPVSELCSLNINMHHDPFLRSMAYWILEDYSGALETLIKQPIRENDDQVLSASNPTVFNFYNYLRTHPLLLRRHFGSSDTFSTHMSLTGKSGLAGTINLSERRLFFTTASAHLKAGCPMLALEVLSKMPKVIKKTRPFYRASSFLDTSKDCSPSSPLKLDAREDKSSAVDWSQSLINGFGSSSEGSSEKQSNSTLSFDWSQPSVVFQDDSLELKWDSDNDEENEDVPISMKELKPLQRKTDKKLDDISSNYTESFSTLDENDLLNPSEDIIAVQLKFRACLKILTVELRTLSTGYEIDGGKLRYQLYHWLEKEVIALQRTCDFCSDAEELQSAFGRNEDEFGLNEDAEDLPHQTKVKQLRENFQEKRQWLLKYQSLLRMFLSYCILHGSHGGGLASVRMELILLLQESQQETSEPLFSSPLSEQTSVPLLFACTANAKTVVANPLLHLSNLTHDILHAIINFDSPPHPDIQSNKVYVMHTLAASLSACIYQCLCGSHNYSSFQTNQFTGMVYQTVLLPHRPSLKTGSLDEALTPNTSPAQWPGITCLIRLLNSSGEEAQSGLTVLLCEILTAVYLSLFIHGLATHSSNELFRIVAHPLNEKMWSAVFGGGAHVPSKEQTHSKTLPVSSLVEEGEKQNKRFRPSKMSCRESAPLTPSSAPVSQESLAVKEKFIPPELSIWDYFIAKPFLPSSQSRAEYDSEESLGSDDDDNDDDDDVLASDFHLQEHSNSNSYSWSLMRLAMVQLVLNNLKTFYPFAGHDLAELPVSSPLCHAVLKTLQCWEQVLLRRLEIHGGPPQNYIASHTAEESLSAGPAILRHKALLEPTNTPFKSKHHLALSVKRLWQYLVKQEEIQETFIKNIFTKKRCLNEIEADLGYPGGKARIIHKESDIITAFAVNKANRNCIAIASSHDVQELDVSGILATQVYTWVDDDIEVETKGSEDFLVIHARDDLTAVQGTTPYTHSNPGTPINMPWLGSTQTGRGASVMIKKAINNVRRMTSHPTLPYYLTGAQDGSVRMFEWGHSQQITCFRSGGNSRVTRMRFNYQGNKFGIVDADGYLSLYQTNWKCCPVTGSMPKPYLTWQCHNKTANDFVFVSSSSLIATAGLSTDNRNVCLWDTLVAPANSLVHAFTCHDSGATVLAYAPKHQLLISGGRKGFTYVFDLCQRQQRQLFQSHDSPVKAVAVDPTEEYFVTGSAEGNIKIWSLSTFGLLHTFVSEHARQSIFRNIGTGVMQIETGPANHIFSCGADGTMKMRILPDQFSPLNEVLKNDVKFML

SEQ ID NO: 11562 - DNA, 347 bp, Homo sapiens
aaaagttcaaattgttcaccttggtgtgaggccttttacaacctggctcagatctgcctttttagtctcagattgcagcgtcttatggaaatgttatctccatttttgaaccagttaacctaccaaaacaaaagaaaaatttggtcagtaatttatgatttcttcttttaggaattgaaatgttttaagtattgaaagagtgtaaaatcagagtgatcattgagtaaatcggtattacttatatactgtaattgaacctacatgttaaattccattttgatgttaaaaatatatttaaatttttcattggaatagaactaaaataaattgtgccaatgaattgttga

SEQ ID NO: 11563 - protein, 35 aa, Homo sapiens
KVQIVHLGVRPFTTWLRSAFLVSDCSVLWKCYLHF

SEQ ID NO: 11564 - DNA, 2268 bp, Homo sapiens
tctggcccatcctcgagcagtaaatggattttcctggcgtaaaacaagcaaccatgattctcctgttaaagccgttgctgttgatccaactgaagagtactttgttacaggatctgccgaaggcaatataaagatttggagtctctctacctttggtcttctccatacttttgtcagtgaacatgctcggcagtccatttttagaaatattggaactggagtgatgcaaattgagacagggcctgcaaatcacattttctcctgtggagctgatggaacaatgaaaatgagaatactgccagatcagtttagccctttaaatgaagtgttgaaaaatgatgtgaaatttatgctataacatttttacaataagatgtacaatttattacctatatggaagtggccaacagatataatatacagtgatcattctctatgccacaaattagctaatgctttcttgtttttatatttattttatggagctttgcccttgatgcactgatgccttaaaaattaacaaggtcattcagaagtagattacattgcctaaagtagaatgtgtaagtaatgctgtaataatacatatcatagtatattataatcagtatgtcatagtgttaaaggtgttttgttttcttattgatacttttccacaggcatctctgcatgaatttcttccacagtaaaaatacgttttttgtaaaggcaattgtacataatactcatcacttaattcaccacactctcacttcctttattagccttatacatctcaaactcttctcttaattaatgataggtatttgagtaagaatgaaaaaaataatgaacatcttcattaaaattgtcattgagacgtcagtgataaatgagctagatggctcaatatgtaaggttttcagtagtttaccctccggaacccaagttgtatgtatgtatacgtgtgtgtgtgtgtgtgtgtgtgtatcttacacatcttatttgaacttagttgtatatattagcgaaaactggtttttcatgtgtttttgtgccataacaactattgccaccagaataactttttttttgcaactgtgcttttcatttttaaaaaatttttgaattcccatcctaattttcaaataagtttcaaggagactatcaggattattattttaaagattagatttagtcaaataagtcttagcaggcaataaagtttctgtggtggcatatatcatgtaagacacttaaagtaagtttgtgaatttgtcaactttcgagcatcaaacaaatattttacttaaattttattttatcttatttttaggtgcttttaatctcaaaattctgaaaagcgaatagcagtgttttcagaaacaaatgtgaaagcagtcaaattaagtagatactatttagaaatgtaaaatactctccagatctaccattaatagaaaataaactaaaccttatattttatttttgccaaaatattttattataaaatatgaccaaaatatttaaaatgcacaatgcttttaacttaaatgtgctaaccctgtttctgtctgttttgtgctgtaccttttctgattcagaattatagaaaacttgataaatacttgattttaaccaatgagactacaggcagatgggactaagtgtttatgggacaattatgtactatttaacttaaatatattttgtttaataggaaatatataataatagcattttatgtaataaaatatgggcaacgattatcttggaaattaaagagtcaaagcaaagaaatgaagggctggtaaaatgaattttgtaatatcctcaggatacttttatcttaaaagtatgttgttaaagattttgtaaattgtatttcaacaattttaaatgtgttgagcaagttgcagtgcaaacactgtcattatgtagagagtttatatgcacataataacctgtacctataaatcgtgcaataaccatatgcgactattttgccatggagaaatctgacagcattgcaaacaatagtattgtttgatgtagttaaccttaagttatttttcagtaatttcttcacaaatcaagattcaaacagctttaaacacttccaatgagataaaatatttactattatgcttattagaacaaaaggtgtttaaggatgaactaaatattttaattgagcatttatatggataatcatacattatgtaagcccatatgtatttacatccagagtcataatattttaaataaacaatcatgcagaaacttttt

SEQ ID NO: 11565 - protein, 35 aa, Homo sapiens
MDFPGVKQATMILLLKPLLLIQLKSTLLQDLPKAI

SEQ ID NO: 11566 - DNA, 770 bp, Homo sapiens
aattttaatatttgtaaatactttctaggtgcatactgcaactctcctagtgcatgctttgtagccagtgatggacaatatctgagattatatgaagcagttattgatgctaagaaacttttatctgagctttctaaccctgaaatttctaaatatgttggtgaagtctttaacatcgtcagtcaacaatcaacagccaggccaggatgcattattgcattagatcccattaccaaacttcatggcagaaaaacccaactgcttcatgtttttgaagaagacttcattttgaataaccttgagaagaaaagccttggcaaagacagcattttatctaatgcaggcagctcacctaatggattttctgagaagttctacctaattgtaatagaatgcactcaagacaaccgttcactgttacacatgtggaatttacatctaaagtcaattcctgtctcattagatgaaaaagtagatacaaaattatccgaagcggtttggcagccagaagaacattattcttcttctccagagaagatcctatctcctttttcacaaaagtatcaggcttgcagagcaaatctccagagtaccagcaggttgactctgttttcagaaatggtttatagccaagaattgcatttaccagaaggagttgagataataagtattaagccatcagcaggtttgtaaattttatgaaaagagactaattttgtaacacatgagtatttaccaggtatttaaaaataggtgctgcaactatctct

SEQ ID NO: 11567 - protein, 89 aa, Homo sapiens [sequence omitted]

SEQ ID NO: 11568 - DNA, 3965 bp, Homo sapiens
gagaactgctctttctttatttctttatgtgtttgaaaatgaaattttacagtttcttcatctgaccctaaaatcctggttttctcagatcttttcttttcctgtttggtaaagtttactggtacctgtgttttaaaatagaatgtcctccctttgtatttaaatagaaagtacagacaactgcaattagattaagtcattcttaataaaaaattgggacttgacaactcccatcattgttcccaattcctttttctgtttttttttgttttgttttgtttgagtttctgagaagaactaaaagtcttggaacaactctttctttaacaagtactactattcccttttaagaagtgtatgtgcttcccagcaatttattgactatttctggcttcatcagtggaagagaattagatacatgtagaaattgaaattttctaatcaagagattttcctgaaggttcagatgtggagataagacaaagcagcgagtaagagaataattcgactttgttcatagtactctgacaccagtagctctgattattttaatataaagtattttggtttcaatcgtgctttaatgtcaacatttcgaaattgagtaaaaacttcttagggttagaataaaatttatagtggtagttaatgagttctgagggattaagttttgctcatttcctaaccatgcaccctcacacatgcttcttataaggtgtatgaaattttgagaatagtaactccatataatgttcttttctagtaaatttggtttaaaatatagcattgaaacaatccccagtattttgcatgttacatctcatctttactctttgtcatgtggttattctttcttgatgaagtcattagaggacaacagtgaaaccatcaaaaattctatgatggaggagccaaacatcaataagatagaagcagatttgggatatcctggaggtaaagcaagaattattcataaggaatctgatatcattactgcgtttgctgttaataaggcaaatagaaactgcatagcaatcgcttccagtcatgatgttcaagaactggatgtttctggaattctggccacacaggtctacacttgggtagatgatgatatagaagtggaaaccaaaggatcagaagatttcttggttatacatgctcgtgatgatttaacagctgttcaaggtacaactccatatacacatagcaatcctggcactccaatcaacatgccatggcttggtagtacacagactggcagaggagcatctgtgatgattaagaaagccattaataatgttagaagaatgacttctcatccaactcttccttactatctgacaggagctcaagatggaagtgtcagaatgtttgaatggggccattctcaacaaataacctgttttcgatctggtggcaattcaagagttacaagaatgagatttaactatcagggaaataagtttggaatagttgatgctgatggatatttaagtttgtatcaaacaaactggaaatgttgtccagttactggaagcatgcctaagccatacctgaaacgtatgtttgtgggatactcttgtagcacctgccaatagtttagtccatgcatttacctgccatgacagtggagccacagttttagcatatgctccaaaacatcagctactaatatcaggtggcagaaaaggttttacatatgtatttgacctttgtcaacgacaacagaggcagcttttccagagccatgattctcctgttaaagccgttgctgttgatccaactgaagagtactttgttacaggatctgccgaaggcaatataaagatttggagtctctctacctttggtcttctccatacttttgtcagtgaacatgctcggcagtccatttttagaaatattggaactggagtgatgcaaattgagacagggcctgcaaatcacattttctcctgtggagctgatggaacaatgaaaatgagaatactgccagatcagtttagccctttaaatgaagtgttgaaaaatgatgtgaaatttatgctataacatttttacaataagatgtacaatttattacctatatggaagtggccaacagatataatatacagtgatcattctctatgccacaaattagctaatgctttcttgtttttatatttattttatggagctttgcccttgatgcactgatgccttaaaaattaacaaggtcattcagaagtagattacattgcctaaagtagaatgtgtaagtaatgctgtaataatacatatcatagtatattataatcagtatgtcatagtgttaaaggtgttttgttttcttattgatacttttccacaggcatctctgcatgaatttcttccacagtaaaaatacgttttttgtaaaggcaattgtacataatactcatcacttaattcaccacactctcacttcctttattagccttatacatctcaaactcttctcttaattaatgataggtatttgagtaagaatgaaaaaaataatgaacatcttcattaaaattgtcattgagacgtcagtgataaatgagctagatggctcaatatgtaaggttttcagtagtttaccctccggaacccaagttgtatgtatgtatacgtgtgtgtgtgtgtgtgtgtgtgtatcttacacatcttatttgaacttagttgtatatattagcgaaaactggtttttcatgtgtttttgtgccataacaactattgccaccagaataactttttttttgcaactgtgcttttcatttttaaaaaatttttgaattcccatcctaattttcaaataagtttcaaggagactatcaggattattattttaaagattagatttagtcaaataagtcttagcaggcaataaagtttctgtggtggcatatatcatgtaagacacttaaagtaagtttgtgaatttgtcaactttcgagcatcaaacaaatattttacttaaattttattttatcttatttttaggtgcttttaatctcaaaattctgaaaagcgaatagcagtgttttcagaaacaaatgtgaaagcagtcaaattaagtagatactatttagaaatgtaaaatactctccagatctaccattaatagaaaataaactaaaccttatattttatttttgccaaaatattttattataaaatatgaccaaaatatttaaaatgcacaatgcttttaacttaaatgtgctaaccctgtttctgtctgttttgtgctgtaccttttctgattcagaattatagaaaacttgataaatacttgattttaaccaatgagactacaggcagatgggactaagtgtttatgggacaattatgtactatttaacttaaatatattttgtttaataggaaatatataataatagcattttatgtaataaaatatgggcaacgattatcttggaaattaaagagtcaaagcaaagaaatgaagggctggtaaaatgaattttgtaatatcctcaggatacttttatcttaaaagtatgttgttaaagattttgtaaattgtatttcaacaattttaaatgtgttgagcaagttgcagtgcaaacactgtcattatgtagagagtttatatgcacataataacctgtacctataaatcgtgcaataaccatatgcgactattttgccatggagaaatctgacagcattgcaaacaatagtattgtttgatgtagttaaccttaagttatttttcagtaatttcttcacaaatcaagattcaaacagctttaaacacttccaatgagataaaatatttactattatgcttattagaacaaaaggtgtttaaggatgaactaaatattttaattgagcatttatatggataatcatacattatgtaagcccatatgtatttacatccagagtcataatattttaaataaacaatcatgcagaaacttttt

SEQ ID NO: 11569 - protein, 283 aa, Homo sapiens
MFFSSKFGLKYSIETIPSILHVTSHLYSLSCGYSFLMKSLEDNSETIKNSMMEEPNINKIEADLGYPGGKARIIHKESDIITAFAVNKANRNCIAIASSHDVQELDVSGILATQVYTWVDDDIEVETKGSEDFLVIHARDDLTAVQGTTPYTHSNPGTPINMPWLGSTQTGRGASVMIKKAINNVRRMTSHPTLPYYLTGAQDGSVRMFEWGHSQQITCFRSGGNSRVTRMRFNYQGNKFGIVDADGYLSLYQTNWKCCPVTGSMPKPYLKRMFVGYSCSTCQ

SEQ ID NO: 11570 - DNA, 3599 bp, Homo sapiens
ttaagtgatgctctttaacaaaactttcccatttctagatgtctatcctacataattatgcaaaggtatatgtatatataggaatgttcaaagcagccctttttatattacagaaaattgaaaacggtatggggaaagttttaaattgtaataccactgtacagtgtaatactacacacagcacaagaatgatctaaatttatgtgtaattacctgggaaagatagctataataaataaaaaatgtaattgtgtagtggtattattatgatcccaattttttaaatgctatattgtgaatttttgaatactcatagaaacaaatctgaaaggaagcacatcaaattgttaatagatgttagatctagaggcagaggagggtgggagtacaaagcagacatttattttatatactttataataagctgcgttatttttataatcaaagggaaaaaatttagctgtcttactcatccttcaagatctgtatcaagaatacctcccttagtggattattttgacatcttaccagtcagacttgccctgagctcccatagcggaattattttactttgataatccttatatcattttactttgtactcttgttcatgtgttttccttattgtttgtttctgaaaatccttattttatctttctggaaatgaacagttttctttcttatatatgataaagttctgtcacatagcataatctgttaatccagtatcctgtttttgtaatacttacagagaatatatagactatgctagaggctactgtaataaaatgggtgtctgatgtttgttctctttatgttcaccctgggatttttaaagtagtagctgaatgtttttctgaaatagatccatgtataggtgaagtgaaaaatcacatgacatacagtcaaatgtttacgagtcaaaatatgggtgtcacactgagggtaaggataaatatatgcttttatatttatattaaatacttttaaatattttctttctctaagtttggaatagttgatgctgatggatatttaagtttgtatcaaacaaactggaaatgttgtccagttactggaagcatgcctaagccatacctgacttggcagtgtcataacaaaacagccaatgattttgtcttcgttagttcctcctctctgatagctacagctggtctttcaactgacaatagaaacgtatgtttgtgggatactcttgtagcacctgccaatagtttagtccatgcatttacctgccatgacagtggagccacagttttagcatatgctccaaaacatcagctactaatatcaggtggcagaaaaggttttacatatgtatttgacctttgtcaacgacaacagaggcagcttttccagagccatgattctcctgttaaagccgttgctgttgatccaactgaagagtactttgttacaggatctgccgaaggcaatataaagatttggagtctctctacctttggtcttctccatacttttgtcagtgaacatgctcggcagtccatttttagaaatattggaactggagtgatgcaaattgagacagggcctgcaaatcacattttctcctgtggagctgatggaacaatgaaaatgagaatactgccagatcagtttagccctttaaatgaagtgttgaaaaatgatgtgaaatttatgctataacatttttacaataagatgtacaatttattacctatatggaagtggccaacagatataatatacagtgatcattctctatgccacaaattagctaatgctttcttgtttttatatttattttatggagctttgcccttgatgcactgatgccttaaaaattaacaaggtcattcagaagtagattacattgcctaaagtagaatgtgtaagtaatgctgtaataatacatatcatagtatattataatcagtatgtcatagtgttaaaggtgttttgttttcttattgatacttttccacaggcatctctgcatgaatttcttccacagtaaaaatacgttttttgtaaaggcaattgtacataatactcatcacttaattcaccacactctcacttcctttattagccttatacatctcaaactcttctcttaattaatgataggtatttgagtaagaatgaaaaaaataatgaacatcttcattaaaattgtcattgagacgtcagtgataaatgagctagatggctcaatatgtaaggttttcagtagtttaccctccggaacccaagttgtatgtatgtatacgtgtgtgtgtgtgtgtgtgtgtgtatcttacacatcttatttgaacttagttgtatatattagcgaaaactggtttttcatgtgtttttgtgccataacaactattgccaccagaataactttttttttgcaactgtgcttttcatttttaaaaaatttttgaattcccatcctaattttcaaataagtttcaaggagactatcaggattattattttaaagattagatttagtcaaataagtcttagcaggcaataaagtttctgtggtggcatatatcatgtaagacacttaaagtaagtttgtgaatttgtcaactttcgagcatcaaacaaatattttacttaaattttattttatcttatttttaggtgcttttaatctcaaaattctgaaaagcgaatagcagtgttttcagaaacaaatgtgaaagcagtcaaattaagtagatactatttagaaatgtaaaatactctccagatctaccattaatagaaaataaactaaaccttatattttatttttgccaaaatattttattataaaatatgaccaaaatatttaaaatgcacaatgcttttaacttaaatgtgctaaccctgtttctgtctgttttgtgctgtaccttttctgattcagaattatagaaaacttgataaatacttgattttaaccaatgagactacaggcagatgggactaagtgtttatgggacaattatgtactatttaacttaaatatattttgtttaataggaaatatataataatagcattttatgtaataaaatatgggcaacgattatcttggaaattaaagagtcaaagcaaagaaatgaagggctggtaaaatgaattttgtaatatcctcaggatacttttatcttaaaagtatgttgttaaagattttgtaaattgtatttcaacaattttaaatgtgttgagcaagttgcagtgcaaacactgtcattatgtagagagtttatatgcacataataacctgtacctataaatcgtgcaataaccatatgcgactattttgccatggagaaatctgacagcattgcaaacaatagtattgtttgatgtagttaaccttaagttatttttcagtaatttcttcacaaatcaagattcaaacagctttaaacacttccaatgagataaaatatttactattatgcttattagaacaaaaggtgtttaaggatgaactaaatattttaattgagcatttatatggataatcatacattatgtaagcccatatgtatttacatccagagtcataatattttaaataaacaatcatgcagaaacttttt

SEQ ID NO: 11571 - protein, 201 aa, Homo sapiens [sequence omitted]

SEQ ID NO: 11572 - DNA, 1804 bp, Homo sapiens
gtccctcctgcaagttccgcccctggcctctgcctccttttctcccgccggctctaacccgcgcttggctaaggtccgcgggaacccgtgagccaccgagagagcagagaactcggcgccgccaaacagcccagctcgcgcttcagcgtcccggcgccgtcgcgccactcctccgatggccacagatgtctttaattccaaaaacctggccgttcaggcacaaaagaagatcttgggtaaaatggtgtccaaatccatcgccaccaccttaatagacgacacaagtagtgaggtgctggatgagctctacagagtgaccagggagtacacccaaaacaagaaggaggcagagaagatcatcaagaacctcatcaagacagtcatcaagctggccattctttataggaataatcagtttaatcaagatgagctagcattgatggagaaatttaagaagaaagttcatcagcttgctatgaccgtggtcagtttccatcaggtggattatacctttgaccggaatgtgttatccaggctgttaaatgaatgcagagagatgctgcaccaaatcattcagcgccacctcactgccaagtcacatggacgggttaataatgtgtttgatcatttttcagattgtgaatttttggctgccttgtataatccttttgggaattttaaaccccacttacaaaaactatgtgatggtatcaacaaaatgttggatgaagagaacatatgagcacatgagttaagattgtgactgatcatgatttatttgaagatggagcactgctgatttatgaaggaaaaaagaagaattttctaaagattacacatatttcagaaagactttacccaattcagttgtcagacataatgatttatttgaaggcttgttttatttgaagaaaagcatattgccaaaaattctggttaaaagcttcctaacgggtaacagaccatgggagagatatgtggttgggtaatgcaaatgtagttatacaaagaaaaatacagatgtctccagacctgaggactttttaatagggcagttgttgtgttggtggcacattggatatttctaacatgtacaaagctatgtattttgatttactttcatttcttgctatgtatatgtacttttcttaaaatgccaagaactttctcttgctatcattgctccttttgaaacaattcaattttcatgtctacagctgactgttttgttaagattgagtcatcgacattcaggatttaagtctgaggtagtcaaccctcaggaaaaaaaaaatggcttatctgaaatcagtactgtggaaatgaactatattagctattatgaataatgtccagtataagaatatgcttctggaattgagttctccttttaagtaccaatgatacttaaatttctcagaaatgtaatggtgtgtcattgccttgaaatgcttgcttagggcttcttttatgttatcttaaaaagtgctggtgaattttccattttttacatccatttcacatgtaagagacaaaaaagtctagattggtcttgatattgagataataaaaagtaagtagcattaagaaaggtaacaatcttcattctacagatgaactcattgaaacaatttaggggaatgaggggcaaaaggggagaaatactgctaaagaacatgagcataaaaatgcgtgcgtttcagtgtttaagaaggcttgataaagaatgtcacttttttatttaactgataagatttttgttattttttactttgataagtaaaccaaagaatatttgtatttc

SEQ ID NO: 11573 - protein, 188 aa, Homo sapiens
MATDVFNSKNLAVQAQKKILGKMVSKSIATTLIDDTSSEVLDELYRVTREYTQNKKEAEKIIKNLIKTVIKLAILYRNNQFNQDELALMEKFKKKVHQLAMTVVSFHQVDYTFDRNVLSRLLNECREMLHQIIQRHLTAKSHGRVNNVFDHFSDCEFLAALYNPFGNFKPHLQKLCDGINKMLDEENI

SEQ ID NO: 11574 - DNA, 1960 bp, Homo sapiens
gtccctcctgcaagttccgcccctggcctctgcctccttttctcccgccggctctaacccgcgcttggctaaggtccgcgggaacccgtgagccaccgagagagcagagaactcggcgccgccaaacagcccagctcgcgcttcagcgtcccggcgccgtcgcgccactcctccgatggccacagatgtctttaattccaaaaacctggccgttcaggcacaaaagaagatcttgggtaaaatggtgtccaaatccatcgccaccaccttaatagacgacacaagtagtgaggtgctggatgagctctacagagtgaccagggagtacacccaaaacaagaaggaggcagagaagatcatcaagaacctcatcaagacagtcatcaagctggccattctttataggaataatcagtttaatcaagatgagctagcattgatggagaaatttaagaagaaagttcatcagcttgctatgaccgtggtcagtttccatcaggtggattatacctttgaccggaatgtgttatccaggctgttaaatgaatgcagagagatgctgcaccaaatcattcagcgccacctcactgccaagtcacatggacgggttaataatgtgtttgatcatttttcagattgtgaatttttggctgccttgtataatccttttgggaattttaaaccccacttacaaaaactatgtgatggtatcaacaaaatgttggatgaagagaacatatgagcacatgagttaagattgtgactgatcatgatttatttgaagatggagcactgctgatttatgaaggaaaaaagaagaattttctaaagattacacatatttcagaaagactttacccaattcagttgtcagacataatgatttatttgaaggcttgttttatttgaagaaaagcatattgccaaaaattctggttaaaagcttcctaacgggtaacagaccatgggagagatatgtggttgggtaatgcaaatgtagttatacaaagaaaaatacagatgtctccagacctgaggactttttaatagggcagttgttgtgttggtggcacattggatatttctaacatgtacaaagctatgtattttgatttactttcatttcttgctatgtatatgtacttttcttaaaatgccaagaactttctcttgctatcattgctccttttgaaacaattcaattttcatgtctacagctgactgttttgttaagattgagtcatcgacattcaggatttaagtctgaggtagtcaaccctcaggaaaaaaaaaatggcttatctgaaatcagtactgtggaaatgaactatattagctattatgaataatgtccagtataagaatatgcttctggaattgagttctccttttaagtaccaatgatacttaaatttctcagaaatgtaatggtgtgtcattgccttgaaatgcttgcttagggcttcttttatgttatcttaaaaagtgctggtgaattttccattttttacatccatttcacatgtaagagacaaaaaagtctagattggtcttgatattgagataataaaaagtaagtagcattaagaaaggtaacaatcttcattctacagatgaactcattgaaacaatttaggggaatgaggggcaaaaggggagaaatactgctaaagaacatgagcataaaaatgcgtgcgtttcagtgtttaagaaggcttgataaagaatgtcacttttttatttaactgataagatttttgttattttttactttgataagtaaaccaaagaatatttgtatttcaagcagtttgtgtggtgtttctatataattttctgtgtataaataataaagtaggcatttgtttattttgtaaaaaagaaatgaaaatctgctggccagctatgtcctctaggaaatgacagacccaaccaccagcaataaacatttccattgtca

SEQ ID NO: 11575 - protein, 188 aa, Homo sapiens; identical to SEQ ID NO: 11573

SEQ ID NO: 11576 - DNA, 2274 bp, Homo sapiens
acctctgagcaatacgtattattaatagacgttcatgtttatacaggtaggaatgaggtgttttttttattttctttttttcaggcatctgtgaatggggcctctcccttttttttagtttttttttttttctaagtatctgtttctattttctagcatgttgaaacgttagacttcctgtttctgcttgattttgaatatactcctgtttgcttgtcacaggtaatcttgcatttctatgtagttgtagtttacagggagcaagtgcaggcagcaaccagtccatccctgttgtgaatgtggagacctctctggactcacaattaaaggctacctaatgcattccactacaagtgacgaaacctagctcccagaataacaagcaagacaactttcaaagtgactgtagttgaccagtgccttctgtgcatttatgtggtaagcttatggtagatttttcaaaagaatagtataaattattttgaattattcttgagaaggactgagtctccccgagggtgatgcaggttccatagtgtacacgtcaacagggtggttgcatgcattcctcaagtctgtatgactctaccaagatactgtgaagttgtccttctgattgcacacggggagaaaatgctgaaactagtggccacagatgtctttaattccaaaaacctggccgttcaggcacaaaagaagatcttgggtaaaatggtgtccaaatccatcgccaccaccttaatagacgacacaagtagtgaggtgctggatgagctctacagagtgaccagggagtacacccaaaacaagaaggaggcagagaagatcatcaagaacctcatcaagacagtcatcaagctggccattctttataggaataatcagtttaatcaagatgagctagcattgatggagaaatttaagaagaaagttcatcagcttgctatgaccgtggtcagtttccatcaggtggattatacctttgaccggaatgtgttatccaggctgttaaatgaatgcagagagatgctgcaccaaatcattcagcgccacctcactgccaagtcacatggacgggttaataatgtgtttgatcatttttcagattgtgaatttttggctgccttgtataatccttttgggaattttaaaccccacttacaaaaactatgtgatggtatcaacaaaatgttggatgaagagaacatatgagcacatgagttaagattgtgactgatcatgatttatttgaagatggagcactgctgatttatgaaggaaaaaagaagaattttctaaagattacacatatttcagaaagactttacccaattcagttgtcagacataatgatttatttgaaggcttgttttatttgaagaaaagcatattgccaaaaattctggttaaaagcttcctaacgggtaacagaccatgggagagatatgtggttgggtaatgcaaatgtagttatacaaagaaaaatacagatgtctccagacctgaggactttttaatagggcagttgttgtgttggtggcacattggatatttctaacatgtacaaagctatgtattttgatttactttcatttcttgctatgtatatgtacttttcttaaaatgccaagaactttctcttgctatcattgctccttttgaaacaattcaattttcatgtctacagctgactgttttgttaagattgagtcatcgacattcaggatttaagtctgaggtagtcaaccctcaggaaaaaaaaaatggcttatctgaaatcagtactgtggaaatgaactatattagctattatgaataatgtccagtataagaatatgcttctggaattgagttctccttttaagtaccaatgatacttaaatttctcagaaatgtaatggtgtgtcattgccttgaaatgcttgcttagggcttcttttatgttatcttaaaaagtgctggtgaattttccattttttacatccatttcacatgtaagagacaaaaaagtctagattggtcttgatattgagataataaaaagtaagtagcattaagaaaggtaacaatcttcattctacagatgaactcattgaaacaatttaggggaatgaggggcaaaaggggagaaatactgctaaagaacatgagcataaaaatgcgtgcgtttcagtgtttaagaaggcttgataaagaatgtcacttttttatttaactgataagatttttgttattttttactttgataagtaaaccaaagaatatttgtatttc

SEQ ID NO: 11577 - protein, 210 aa, Homo sapiens
MTLPRYCEVVLLIAHGEKMLKLVATDVFNSKNLAVQAQKKILGKMVSKSIATTLIDDTSSEVLDELYRVTREYTQNKKEAEKIIKNLIKTVIKLAILYRNNQFNQDELALMEKFKKKVHQLAMTVVSFHQVDYTFDRNVLSRLLNECREMLHQIIQRHLTAKSHGRVNNVFDHFSDCEFLAALYNPFGNFKPHLQKLCDGINKMLDEENI

SEQ ID NO: 11578 - DNA, 2430 bp, Homo sapiens
acctctgagcaatacgtattattaatagacgttcatgtttatacaggtaggaatgaggtgttttttttattttctttttttcaggcatctgtgaatggggcctctcccttttttttagtttttttttttttctaagtatctgtttctattttctagcatgttgaaacgttagacttcctgtttctgcttgattttgaatatactcctgtttgcttgtcacaggtaatcttgcatttctatgtagttgtagtttacagggagcaagtgcaggcagcaaccagtccatccctgttgtgaatgtggagacctctctggactcacaattaaaggctacctaatgcattccactacaagtgacgaaacctagctcccagaataacaagcaagacaactttcaaagtgactgtagttgaccagtgccttctgtgcatttatgtggtaagcttatggtagatttttcaaaagaatagtataaattattttgaattattcttgagaaggactgagtctccccgagggtgatgcaggttccatagtgtacacgtcaacagggtggttgcatgcattcctcaagtctgtatgactctaccaagatactgtgaagttgtccttctgattgcacacggggagaaaatgctgaaactagtggccacagatgtctttaattccaaaaacctggccgttcaggcacaaaagaagatcttgggtaaaatggtgtccaaatccatcgccaccaccttaatagacgacacaagtagtgaggtgctggatgagctctacagagtgaccagggagtacacccaaaacaagaaggaggcagagaagatcatcaagaacctcatcaagacagtcatcaagctggccattctttataggaataatcagtttaatcaagatgagctagcattgatggagaaatttaagaagaaagttcatcagcttgctatgaccgtggtcagtttccatcaggtggattatacctttgaccggaatgtgttatccaggctgttaaatgaatgcagagagatgctgcaccaaatcattcagcgccacctcactgccaagtcacatggacgggttaataatgtgtttgatcatttttcagattgtgaatttttggctgccttgtataatccttttgggaattttaaaccccacttacaaaaactatgtgatggtatcaacaaaatgttggatgaagagaacatatgagcacatgagttaagattgtgactgatcatgatttatttgaagatggagcactgctgatttatgaaggaaaaaagaagaattttctaaagattacacatatttcagaaagactttacccaattcagttgtcagacataatgatttatttgaaggcttgttttatttgaagaaaagcatattgccaaaaattctggttaaaagcttcctaacgggtaacagaccatgggagagatatgtggttgggtaatgcaaatgtagttatacaaagaaaaatacagatgtctccagacctgaggactttttaatagggcagttgttgtgttggtggcacattggatatttctaacatgtacaaagctatgtattttgatttactttcatttcttgctatgtatatgtacttttcttaaaatgccaagaactttctcttgctatcattgctccttttgaaacaattcaattttcatgtctacagctgactgttttgttaagattgagtcatcgacattcaggatttaagtctgaggtagtcaaccctcaggaaaaaaaaaatggcttatctgaaatcagtactgtggaaatgaactatattagctattatgaataatgtccagtataagaatatgcttctggaattgagttctccttttaagtaccaatgatacttaaatttctcagaaatgtaatggtgtgtcattgccttgaaatgcttgcttagggcttcttttatgttatcttaaaaagtgctggtgaattttccattttttacatccatttcacatgtaagagacaaaaaagtctagattggtcttgatattgagataataaaaagtaagtagcattaagaaaggtaacaatcttcattctacagatgaactcattgaaacaatttaggggaatgaggggcaaaaggggagaaatactgctaaagaacatgagcataaaaatgcgtgcgtttcagtgtttaagaaggcttgataaagaatgtcacttttttatttaactgataagatttttgttattttttactttgataagtaaaccaaagaatatttgtatttcaagcagtttgtgtggtgtttctatataattttctgtgtataaataataaagtaggcatttgtttattttgtaaaaaagaaatgaaaatctgctggccagctatgtcctctaggaaatgacagacccaaccaccagcaataaacatttccattgtca

SEQ ID NO: 11579 - protein, 210 aa, Homo sapiens; identical to SEQ ID NO: 11577

SEQ ID NO: 11580 - DNA, 579 bp, Homo sapiens
cgggcgcacgcaggtggggcacaggcccagacggcagccgactctcccgagacacagggccgagaagaaccgtcggcaaacgcaccagacgggcggaaaaaaagagcaggatgaagggaggaagatatagccagccagagaagggagaagaggagaaacatctggaaaatatcagtgttgcagagcctcccggaaactgacctcgccaccgaaaggtaccttacaagaaactatgtacataaatatctgctatcttcaaagaaagaaaacaagacaagaaaatctgcatggcatctgcagaaccgagaatggacgcacttccttcgacatccttataaacagagtgccgagcaaatgcaaacatccccggtagaagtccagtggactccagacttaattaatggattgtgcttatctttacagaggcaaccttactagccacctatcaaccccaccacaattgctttaggaactattaataagatggattgaacaaaattccatttcagttgatggcatttccagggcaagcaagacaccagcagcggctgcccactgtagaacagcagcaatctcacc

SEQ ID NO: 11581 - protein, 46 aa, Homo sapiens
MYINICYLQRKKTRQENLHGICRTENGRTSFDILINRVPSKCKHPR

SEQ ID NO: 11582 - DNA, 2503 bp, Homo sapiens
agactccttaaatccatgtcttttgtacgttcttttcactaaatttgccatagtgtttctattggtttttgcctatataaaatcggaaacgaagaaaaagaaacgaactggaaaataaatttgtcaaaagagtatatttttttctcataatttccaagcggatctttcagatatgttatttgaggactttttgcctcagactggcgataaaacaagtgttctacaaaatacctccgtaagacaggcctatcagtggcagctcttgtccccgctttgcagaagggaaaaccaaggctccacagagctaaggggacttcctctcagccaatttgtaggggcctgtgggccagacccgggggcagaattgagatctgttgtgaaggctgtccggcttctttattctatcagcatttcaaatcctgaaaacctcccctttggcattttgaaggaattcatccccagtttttgctggtagccgggagggaaccgtgctctccccctgaggaaggccctttggagtaactgcagcaatgagtgcccgggctgtgcttggagtaccagtgctcgcccggggctatactgaatgagtaagcagccccgtctgcttttgctgtgcaaagagcgaacttgcggctcgtccgagtacatgtgagcggtaatcgcccctgcagctggttatcctgacattatgcactccgaagcagaagaatccaaggaagtggccacagatgtctttaattccaaaaacctggccgttcaggcacaaaagaagatcttgggtaaaatggtgtccaaatccatcgccaccaccttaatagacgacacaagtagtgaggtgctggatgagctctacagagtgaccagggagtacacccaaaacaagaaggaggcagagaagatcatcaagaacctcatcaagacagtcatcaagctggccattctttataggaataatcagtttaatcaagatgagctagcattgatggagaaatttaagaagaaagttcatcagcttgctatgaccgtggtcagtttccatcaggtggattatacctttgaccggaatgtgttatccaggctgttaaatgaatgcagagagatgctgcaccaaatcattcagcgccacctcactgccaagtcacatggacgggttaataatgtgtttgatcatttttcagattgtgaatttttggctgccttgtataatccttttgggaattttaaaccccacttacaaaaactatgtgatggtatcaacaaaatgttggatgaagagaacatatgagcacatgagttaagattgtgactgatcatgatttatttgaagatggagcactgctgatttatgaaggaaaaaagaagaattttctaaagattacacatatttcagaaagactttacccaattcagttgtcagacataatgatttatttgaaggcttgttttatttgaagaaaagcatattgccaaaaattctggttaaaagcttcctaacgggtaacagaccatgggagagatatgtggttgggtaatgcaaatgtagttatacaaagaaaaatacagatgtctccagacctgaggactttttaatagggcagttgttgtgttggtggcacattggatatttctaacatgtacaaagctatgtattttgatttactttcatttcttgctatgtatatgtacttttcttaaaatgccaagaactttctcttgctatcattgctccttttgaaacaattcaattttcatgtctacagctgactgttttgttaagattgagtcatcgacattcaggatttaagtctgaggtagtcaaccctcaggaaaaaaaaaatggcttatctgaaatcagtactgtggaaatgaactatattagctattatgaataatgtccagtataagaatatgcttctggaattgagttctccttttaagtaccaatgatacttaaatttctcagaaatgtaatggtgtgtcattgccttgaaatgcttgcttagggcttcttttatgttatcttaaaaagtgctggtgaattttccattttttacatccatttcacatgtaagagacaaaaaagtctagattggtcttgatattgagataataaaaagtaagtagcattaagaaaggtaacaatcttcattctacagatgaactcattgaaacaatttaggggaatgaggggcaaaaggggagaaatactgctaaagaacatgagcataaaaatgcgtgcgtttcagtgtttaagaaggcttgataaagaatgtcacttttttatttaactgataagatttttgttattttttactttgataagtaaaccaaagaatatttgtatttcaagcagtttgtgtggtgtttctatataattttctgtgtataaataataaagtaggcatttgtttattttgtaaaaaagaaatgaaaatctgctggccagctatgtcctctaggaaatgacagacccaaccaccagcaataaacatttccattgtca

SEQ ID NO: 11583 - protein, 198 aa, Homo sapiens
MHSEAEESKEVATDVFNSKNLAVQAQKKILGKMVSKSIATTLIDDTSSEVLDELYRVTREYTQNKKEAEKIIKNLIKTVIKLAILYRNNQFNQDELALMEKFKKKVHQLAMTVVSFHQVDYTFDRNVLSRLLNECREMLHQIIQRHLTAKSHGRVNNVFDHFSDCEFLAALYNPFGNFKPHLQKLCDGINKMLDEENI

SEQ ID NO: 11584 - DNA, 2051 bp, Homo sapiens
ggctccgggggcggactcccgccgcccagctgacacgcgattcgtcactcttgcagaactttccccctgaaaatccctgcaccagaacccgctctcccgccccggggaggttttgattttagtggctttcttccttttattttccgtcgtgtgcggatttcgctgcagagcgaacttgcggctcgtccgagtacatgtgagcggtaatcgcccctgcagctggttatcctgacattatgcactccgaagcagaagaatccaaggaagtggccacagatgtctttaattccaaaaacctggccgttcaggcacaaaagaagatcttgggtaaaatggtgtccaaatccatcgccaccaccttaatagacgacacaagtagtgaggtgctggatgagctctacagagtgaccagggagtacacccaaaacaagaaggaggcagagaagatcatcaagaacctcatcaagacagtcatcaagctggccattctttataggaataatcagtttaatcaagatgagctagcattgatggagaaatttaagaagaaagttcatcagcttgctatgaccgtggtcagtttccatcaggtggattatacctttgaccggaatgtgttatccaggctgttaaatgaatgcagagagatgctgcaccaaatcattcagcgccacctcactgccaagtcacatggacgggttaataatgtgtttgatcatttttcagattgtgaatttttggctgccttgtataatccttttgggaattttaaaccccacttacaaaaactatgtgatggtatcaacaaaatgttggatgaagagaacatatgagcacatgagttaagattgtgactgatcatgatttatttgaagatggagcactgctgatttatgaaggaaaaaagaagaattttctaaagattacacatatttcagaaagactttacccaattcagttgtcagacataatgatttatttgaaggcttgttttatttgaagaaaagcatattgccaaaaattctggttaaaagcttcctaacgggtaacagaccatgggagagatatgtggttgggtaatgcaaatgtagttatacaaagaaaaatacagatgtctccagacctgaggactttttaatagggcagttgttgtgttggtggcacattggatatttctaacatgtacaaagctatgtattttgatttactttcatttcttgctatgtatatgtacttttcttaaaatgccaagaactttctcttgctatcattgctccttttgaaacaattcaattttcatgtctacagctgactgttttgttaagattgagtcatcgacattcaggatttaagtctgaggtagtcaaccctcaggaaaaaaaaaatggcttatctgaaatcagtactgtggaaatgaactatattagctattatgaataatgtccagtataagaatatgcttctggaattgagttctccttttaagtaccaatgatacttaaatttctcagaaatgtaatggtgtgtcattgccttgaaatgcttgcttagggcttcttttatgttatcttaaaaagtgctggtgaattttccattttttacatccatttcacatgtaagagacaaaaaagtctagattggtcttgatattgagataataaaaagtaagtagcattaagaaaggtaacaatcttcattctacagatgaactcattgaaacaatttaggggaatgaggggcaaaaggggagaaatactgctaaagaacatgagcataaaaatgcgtgcgtttcagtgtttaagaaggcttgataaagaatgtcacttttttatttaactgataagatttttgttattttttactttgataagtaaaccaaagaatatttgtatttcaagcagtttgtgtggtgtttctatataattttctgtgtataaataataaagtaggcatttgtttattttgtaaaaaagaaatgaaaatctgctggccagctatgtcctctaggaaatgacagacccaaccaccagcaataaacatttccattgtca

SEQ ID NO: 11585 - protein, 198 aa, Homo sapiens; identical to SEQ ID NO: 11583

SEQ ID NO: 11586 - DNA, 1876 bp, Homo sapiens
cgccgcccagctgacacgcgattcgtcactcttgcagaactttccccctgaaaatccctgcaccagaacccgctctcccgccccggggaggttttgattttagtggctttcttccttttattttccgtcgtgtgcggatttcgctgcagagcgaacttgcggctcgtccgagtacatgtgagcggtaatcgcccctgcagctggttatcctgacattatgcactccgaagcagaagaatccaaggaagtggccacagatgtctttaattccaaaaacctggccgttcaggcacaaaagaagatcttgggtaaaatggtgtccaaatccatcgccaccaccttaatagacgacacaagtagtgaggtgctggatgagctctacagagtgaccagggagtacacccaaaacaagaaggaggcagagaagatcatcaagaacctcatcaagacagtcatcaagctggccattctttataggaataatcagtttaatcaagatgagctagcattgatggagaaatttaagaagaaagttcatcagcttgctatgaccgtggtcagtttccatcaggtggattatacctttgaccggaatgtgttatccaggctgttaaatgaatgcagagagatgctgcaccaaatcattcagcgccacctcactgccaagtcacatggacgggttaataatgtgtttgatcatttttcagattgtgaatttttggctgccttgtataatccttttgggaattttaaaccccacttacaaaaactatgtgatggtatcaacaaaatgttggatgaagagaacatatgagcacatgagttaagattgtgactgatcatgatttatttgaagatggagcactgctgatttatgaaggaaaaaagaagaattttctaaagattacacatatttcagaaagactttacccaattcagttgtcagacataatgatttatttgaaggcttgttttatttgaagaaaagcatattgccaaaaattctggttaaaagcttcctaacgggtaacagaccatgggagagatatgtggttgggtaatgcaaatgtagttatacaaagaaaaatacagatgtctccagacctgaggactttttaatagggcagttgttgtgttggtggcacattggatatttctaacatgtacaaagctatgtattttgatttactttcatttcttgctatgtatatgtacttttcttaaaatgccaagaactttctcttgctatcattgctccttttgaaacaattcaattttcatgtctacagctgactgttttgttaagattgagtcatcgacattcaggatttaagtctgaggtagtcaaccctcaggaaaaaaaaaatggcttatctgaaatcagtactgtggaaatgaactatattagctattatgaataatgtccagtataagaatatgcttctggaattgagttctccttttaagtaccaatgatacttaaatttctcagaaatgtaatggtgtgtcattgccttgaaatgcttgcttagggcttcttttatgttatcttaaaaagtgctggtgaattttccattttttacatccatttcacatgtaagagacaaaaaagtctagattggtcttgatattgagataataaaaagtaagtagcattaagaaaggtaacaatcttcattctacagatgaactcattgaaacaatttaggggaatgaggggcaaaaggggagaaatactgctaaagaacatgagcataaaaatgcgtgcgtttcagtgtttaagaaggcttgataaagaatgtcacttttttatttaactgataagatttttgttattttttactttgataagtaaaccaaagaatatttgtatttc

SEQ ID NO: 11587 - protein, 198 aa, Homo sapiens; identical to SEQ ID NO: 11583

SEQ ID NO: 11588 - DNA, 1727 bp, Homo sapiens
agcgaacttgcggctcgtccgagtacatgtgagcggtaatcgcccctgcagctggttatcctgacattatgcactccgaagcagaagaatccaaggaagtggccacagatgtctttaattccaaaaacctggccgttcaggcacaaaagaagatcttgggtaaaatggtgtccaaatccatcgccaccaccttaatagacgacacaagtagtgaggtgctggatgagctctacagagtgaccagggagtacacccaaaacaagaaggaggcagagaagatcatcaagaacctcatcaagacagtcatcaagctggccattctttataggaataatcagtttaatcaagatgagctagcattgatggagaaatttaagaagaaagttcatcagcttgctatgaccgtggtcagtttccatcaggtggattatacctttgaccggaatgtgttatccaggctgttaaatgaatgcagagagatgctgcaccaaatcattcagcgccacctcactgccaagtcacatggacgggttaataatgtgtttgatcatttttcagattgtgaatttttggctgccttgtataatccttttgggaattttaaaccccacttacaaaaactatgtgatggtatcaacaaaatgttggatgaagagaacatatgagcacatgagttaagattgtgactgatcatgatttatttgaagatggagcactgctgatttatgaaggaaaaaagaagaattttctaaagattacacatatttcagaaagactttacccaattcagttgtcagacataatgatttatttgaaggcttgttttatttgaagaaaagcatattgccaaaaattctggttaaaagcttcctaacgggtaacagaccatgggagagatatgtggttgggtaatgcaaatgtagttatacaaagaaaaatacagatgtctccagacctgaggactttttaatagggcagttgttgtgttggtggcacattggatatttctaacatgtacaaagctatgtattttgatttactttcatttcttgctatgtatatgtacttttcttaaaatgccaagaactttctcttgctatcattgctccttttgaaacaattcaattttcatgtctacagctgactgttttgttaagattgagtcatcgacattcaggatttaagtctgaggtagtcaaccctcaggaaaaaaaaaatggcttatctgaaatcagtactgtggaaatgaactatattagctattatgaataatgtccagtataagaatatgcttctggaattgagttctccttttaagtaccaatgatacttaaatttctcagaaatgtaatggtgtgtcattgccttgaaatgcttgcttagggcttcttttatgttatcttaaaaagtgctggtgaattttccattttttacatccatttcacatgtaagagacaaaaaagtctagattggtcttgatattgagataataaaaagtaagtagcattaagaaaggtaacaatcttcattctacagatgaactcattgaaacaatttaggggaatgaggggcaaaaggggagaaatactgctaaagaacatgagcataaaaatgcgtgcgtttcagtgtttaagaaggcttgataaagaatgtcacttttttatttaactgataagatttttgttattttttactttgataagtaaaccaaagaatatttgtatttc

SEQ ID NO: 11589 - protein, 198 aa, Homo sapiens; identical to SEQ ID NO: 11583

SEQ ID NO: 11590 - DNA, 1990 bp, Homo sapiens
gctcgtccgagtacatgtgagcggtaatcgcccctgcagctggttatcctgacattatgcactccgaagcagaagaatccaaggaaggcctaggcttaaacactggcatatatggagagaacagttgccactcgactcagagattgagtagacacccaaagaactgcagttcttaagccttaggagaagcgagagaaatgggccagtggccacagatgtctttaattccaaaaacctggccgttcaggcacaaaagaagatcttgggtaaaatggtgtccaaatccatcgccaccaccttaatagacgacacaagtagtgaggtgctggatgagctctacagagtgaccagggagtacacccaaaacaagaaggaggcagagaagatcatcaagaacctcatcaagacagtcatcaagctggccattctttataggaataatcagtttaatcaagatgagctagcattgatggagaaatttaagaagaaagttcatcagcttgctatgaccgtggtcagtttccatcaggtggattatacctttgaccggaatgtgttatccaggctgttaaatgaatgcagagagatgctgcaccaaatcattcagcgccacctcactgccaagtcacatggacgggttaataatgtgtttgatcatttttcagattgtgaatttttggctgccttgtataatccttttgggaattttaaaccccacttacaaaaactatgtgatggtatcaacaaaatgttggatgaagagaacatatgagcacatgagttaagattgtgactgatcatgatttatttgaagatggagcactgctgatttatgaaggaaaaaagaagaattttctaaagattacacatatttcagaaagactttacccaattcagttgtcagacataatgatttatttgaaggcttgttttatttgaagaaaagcatattgccaaaaattctggttaaaagcttcctaacgggtaacagaccatgggagagatatgtggttgggtaatgcaaatgtagttatacaaagaaaaatacagatgtctccagacctgaggactttttaatagggcagttgttgtgttggtggcacattggatatttctaacatgtacaaagctatgtattttgatttactttcatttcttgctatgtatatgtacttttcttaaaatgccaagaactttctcttgctatcattgctccttttgaaacaattcaattttcatgtctacagctgactgttttgttaagattgagtcatcgacattcaggatttaagtctgaggtagtcaaccctcaggaaaaaaaaaatggcttatctgaaatcagtactgtggaaatgaactatattagctattatgaataatgtccagtataagaatatgcttctggaattgagttctccttttaagtaccaatgatacttaaatttctcagaaatgtaatggtgtgtcattgccttgaaatgcttgcttagggcttcttttatgttatcttaaaaagtgctggtgaattttccattttttacatccatttcacatgtaagagacaaaaaagtctagattggtcttgatattgagataataaaaagtaagtagcattaagaaaggtaacaatcttcattctacagatgaactcattgaaacaatttaggggaatgaggggcaaaaggggagaaatactgctaaagaacatgagcataaaaatgcgtgcgtttcagtgtttaagaaggcttgataaagaatgtcacttttttatttaactgataagatttttgttattttttactttgataagtaaaccaaagaatatttgtatttcaagcagtttgtgtggtgtttctatataattttctgtgtataaataataaagtaggcatttgtttattttgtaaaaaagaaatgaaaatctgctggccagctatgtcctctaggaaatgacagacccaaccaccagcaataaacatttccattgtca

SEQ ID NO: 11591 - protein, 39 aa, Homo sapiens
MHSEAEESKEGLGLNTGIYGENSCHSTQRLSRHPKNCSS

SEQ ID NO: 11592 - DNA, 1437 bp, Homo sapiens
ccaggctgttaaatgaatgcagagagatgctgcaccaaatcattcagcgccacctcactgccaagtcacatggacgggttaataatgtgtttgatcatttttcagattgtgaatttttggctgccttgtataatccttttgggaattttaaaccccacttacaaaaactatgtgatggtatcaacaaaatgttggatgaagagaacatatgagcacatgagttaagattgtgactgatcatgatttatttgaagatggagcactgctgatttatgaaggaaaaaagaagaattttctaaagattacacatatttcagaaagactttacccaattcagttgtcagacataatgatttatttgaaggcttgttttatttgaagaaaagcatattgccaaaaattctggttaaaagcttcctaacgggtaacagaccatgggagagatatgtggttgggtaatgcaaatgtagttatacaaagaaaaatacagatgtctccagacctgaggactttttaatagggcagttgttgtgttggtggcacattggatatttctaacatgtacaaagctatgtattttgatttactttcatttcttgctatgtatatgtacttttcttaaaatgccaagaactttctcttgctatcattgctccttttgaaacaattcaattttcatgtctacagctgactgttttgttaagattgagtcatcgacattcaggatttaagtctgaggtagtcaaccctcaggaaaaaaaaaatggcttatctgaaatcagtactgtggaaatgaactatattagctattatgaataatgtccagtataagaatatgcttctggaattgagttctccttttaagtaccaatgatacttaaatttctcagaaatgtaatggtgtgtcattgccttgaaatgcttgcttagggcttcttttatgttatcttaaaaagtgctggtgaattttccattttttacatccatttcacatgtaagagacaaaaaagtctagattggtcttgatattgagataataaaaagtaagtagcattaagaaaggtaacaatcttcattctacagatgaactcattgaaacaatttaggggaatgaggggcaaaaggggagaaatactgctaaagaacatgagcataaaaatgcgtgcgtttcagtgtttaagaaggcttgataaagaatgtcacttttttatttaactgataagatttttgttattttttactttgataagtaaaccaaagaatatttgtatttcaagcagtttgtgtggtgtttctatataattttctgtgtataaataataaagtaggcatttgtttattttgtaaaaaagaaaaaaaagcatgagttaagaactttgatcgtacagaaatattgcgttttaaactcttatataatagtatgccattcacaattat

SEQ ID NO: 11593 - protein, 70 aa, Homo sapiens
MNAERCCTKSFSATSLPSHMDGLIMCLIIFQIVNFWLPCIILLGILNPTYKNYVMVSTKCWMKRTYEHMS

SEQ ID NO: 11594 - DNA, 1578 bp, Homo sapiens
tttcagaaagactttacccaattcagttgtcagacataatgatttatttgaaggcttgttttatttgaagaaaagcatattgccaaaaattctggttaaaagcttcctaacgggtaacagaccatgggagagatatgtggttgggtaatgcaaatgtagttatacaaagaaaaatacagatgtctccagacctgaggactttttaatagggcagttgttgtgttggtggcacattggatatttctaacatgtacaaagctatgtattttgatttactttcatttcttgctatgtatatgtacttttcttaaaatgccaagaactttctcttgctatcattgctccttttgaaacaattcaattttcatgtctacagctgactgttttgttaagattgagtcatcgacattcaggatttaagtctgaggtagtcaaccctcaggaaaaaaaaaatggcttatctgaaatcagtactgtggaaatgaactatattagctattatgaataatgtccagtataagaatatgcttctggaattgagttctccttttaagtaccaatgatacttaaatttctcagaaatgtaatggtgtgtcattgccttgaaatgcttgcttagggcttcttttatgttatcttaaaaagtgctggtgaattttccattttttacatccatttcacatgtaagagacaaaaaagtctagattggtcttgatattgagataataaaaagtaagtagcattaagaaaggtaacaatcttcattctacagatgaactcattgaaacaatttaggggaatgaggggcaaaaggggagaaatactgctaaagaacatgagcataaaaatgcgtgcgtttcagtgtttaagaaggcttgataaagaatgtcacttttttatttaactgataagatttttgttattttttactttgataagtaaaccaaagaatatttgtatttcaagcagtttgtgtggtgtttctatataattttctgtgtataaataataaagtaggcatttgtttattttgtaaaaaagaaatgaaaatctgctggccagctatgtcctctaggaaatgacagacccaaccaccagcaataaacatttccattgtcactgtgtctatgatttttttttttttttttttgagtctcgctctgttgtttaggctagaatgcatgagctgagattgtaccactgcactgcagcctgggcaacaagaacgaaaccccgtctcaaaaaaaaaaaaaaaaaaaaaaagcatgagttaagaactttgatcgtacagaaatattgcgttttaaactcttatataatagtatgccattcacaattatctggaaagttctttttctcccaccatgtgaatacacacacacacacacacacacacacaatttttaagcccccaaaggcttaaaatagtactttttgtggtctgtaccggtcagttggatttttactaagaattttaatttatccttgagatacttgatgagtgtatataagcagttgcaatttagcatacaaaacctgacaaatggtaaataaaagaatatgtttatccaaatgatg

SEQ ID NO: 11595 - protein, 81 aa, Homo sapiens [sequence omitted]

SEQ ID NO: 11596 - DNA, 880 bp, Homo sapiens
tatccactcataatttttgcagagaagccaccagcacaaaataaaatcaattacaacacaatttttttcaaaacgtgaacagatactattttataaaaaggttcataggatccccaaattagtattaactcggctcagatttatctaccctaagcacgtggggattcttcccagctcccacgctccttgccaccctaaatgctcaaggggagtcctattgtattagaaatgaacttgctaatcacgactttggacctgatccaagacatgcttttcaggcacagcactggtaaggagatgggtcccctccagaaaatgctgagaaatggtagcaaacaggattccctccttcggtctactcctcactgccttccctctgtgggagatgaagcattgctcccccaatcccatgcacatttgattgctagcctgctggcacaaccctatgatccagtgtgtccagagagatccagatttctccctccgtacgttttctctctctggttggtcctgtctatagctacagatgagcaagaagcatccatggactgcccagggctttcgtttcccatacctctgctgtttgagatctggagaacagaacacatccagtcagtagctcacaccccccatcacattctcagccttcacatgtgaggaaaacagctggtcaaggaaggctgctgaattccatttataagccacttagcaagttatgaagctagaagggtcatttctgtagtcactgtgttattgttacagcatatactgatcacctactggctctaggaagtgagaatgatactttcagttcaaatcttagtgtcaggatttaatatcaaacaggaagaaactctacacctttgctgcttgtcttagc

SEQ ID NO: 11597 - protein, 152 aa, Homo sapiens [sequence omitted]

SEQ ID NO: 11598 - DNA, 2654 bp, Homo sapiens
actgaccctcgtcccgcccccgccattccccgcctcctcctgtcccgcagtcggcgtccagcggctctgcttgttcgtgtgtgtgtcgttgcaggccttattcatgggctcaccgctgaggttcgacgggcgggtggtactggtcaccggcgcgggggcaggattgggccgagcctatgccctggcttttgcagaaagaggagcgttagttgttgtgaatgatttgggaggggacttcaaaggagttggtaaaggctccttagctgctgataaggttgttgaagaaataagaaggagaggtggaaaagcagtggccaactatgattcagtggaagaaggagagaaggttgtgaagacagccctggatgcttttggaagaatagatgttgtggtcaacaatgctggaattctgagggatcgttcctttgctaggataagtgatgaagactgggatataatccacagagttcatttgcggggttcattccaagtgacacgggcagcatgggaacacatgaagaaacagaagtatggaaggattattatgacttcatcagcttcaggaatatatggcaactttggccaggccaattatagtgctgcaaagttgggtcttctgggccttgcaaattctcttgcaattgaaggcaggaaaagcaacattcattgtaacaccattgctcctaatgcgggatcacggatgactcagacagttatgcctgaagatcttgtggaagccctgaagccagagtatgtggcacctcttgtcctttggctttgtcacgagagttgtgaggagaatggtggcttgtttgaggttggagcaggatggattggaaaattacgctgggagcggactcttggagctattgtaagacaaaagaatcacccaatgactcctgaggcagtcaaggctaactggaagaagatctgtgactttgagaatgccagcaagcctcagagtatccaagaatcaactggcagtataattgaagttctgagtaaaatagattcagaaggaggagtttcagcaaatcatactagtcgtgcaacgtctacagcaacatcaggatttgctggagctattggccagaaactccctccattttcttatgcttatacggaactggaagctattatgtatgcccttggagtgggagcgtcaatcaaggatccaaaagatttgaaatttatttatgaaggaagttctgatttctcctgtttgcccaccttcggagttatcataggtcagaaatctatgatgggtggaggattagcagaaattcctggactttcaatcaactttgcaaaggttcttcatggagagcagtacttagagttatataaaccacttcccagagcaggaaaattaaaatgtgaagcagttgttgctgatgtcctagataaaggatccggtgtagtgattattatggatgtctattcttattctgagaaggaacttatatgccacaatcagttctctctctttcttgttggctctggaggctttggtggaaaacggacatcagacaaagtcaaggtagctgtagccatacctaatagacctcctgatgctgtacttacagataccacctctcttaatcaggctgctttgtaccgcctcagtggagactggaatcccttacacattgatcctaactttgctagtctagcaggttttgacaagcccatattacatggattatgtacatttggattttctgccaggcgtgtgttacagcagtttgcagataatgatgtgtcaagattcaaggcaattaaggctcgttttgcaaaaccagtatatccaggacaaactctacaaactgagatgtggaaggaaggaaacagaattcattttcaaaccaaggtccaagaaactggagacattgtcatttcaaatgcatatgtggatcttgcaccaacatctggtacttcagctaagacaccctctgagggcgggaagcttcagagtacctttgtatttgaggaaataggacgccgcctaaaggatattgggcctgaggtggtgaagaaagtaaatgctgtatttgagtggcatataaccaaaggcggaaatattggggctaagtggactattgacctgaaaagtggttctggaaaagtgtaccaaggccctgcaaaaggtgctgctgatacaacaatcatactttcagatgaagatttcatggaggtggtcctgggcaagcttgaccctcagaaggcattctttagtggcaggctgaaggccagagggaacatcatgctgagccagaaacttcagatgattcttaaagactacgccaagctctgaagggcacactacactattaataaaaatggaatcattaaatactctcttcacccaaatatgcttgattattctgcaaaagtgattagaactaagatgcaggggaaattgcttaacattttcagatatcagataactgcagattttcattttctactaatttttcatgtatcattatttttacaaggaactatatataagctagcacataattatccttctgttcttagatctgtatcttcataataaaaaattttgcccaagtcctgtttccttagaatttgtgatagcattgataagttgaaaggaaaattaaatcaataaaggcctttgatacctttgt

SEQ ID NO: 11599 - protein, 736 aa, Homo sapiens; identical to SEQ ID NO: 1096

SEQ ID NO: 11600 - DNA, 2791 bp, Homo sapiens
cggcgtccagcggctctgcttgttcgtgtgtgtgtcgttgcaggccttattcatgggctcaccgctgaggttcgacgggcgggtggtactggtcaccggcgcgggggcaggtgagcatgcgaaggttggaggccgcgccccttgctgaggcgcagctggctgctcttttcgggccggcatacgcgcgcagccgcagctgaggtcaccccgctgaggtggtggggaggggaatggttattcttgaggcaccgcatctcttgaggaggaaagagccggaaacacctggtctctcaagcaggattgggccgagcctatgccctggcttttgcagaaagaggagcgttagttgttgtgaatgatttgggaggggacttcaaaggagttggtaaaggctccttagctgctgataaggttgttgaagaaataagaaggagaggtggaaaagcagtggccaactatgattcagtggaagaaggagagaaggttgtgaagacagccctggatgcttttggaagaatagatgttgtggtcaacaatgctggaattctgagggatcgttcctttgctaggataagtgatgaagactgggatataatccacagagttcatttgcggggttcattccaagtgacacgggcagcatgggaacacatgaagaaacagaagtatggaaggattattatgacttcatcagcttcaggaatatatggcaactttggccaggccaattatagtgctgcaaagttgggtcttctgggccttgcaaattctcttgcaattgaaggcaggaaaagcaacattcattgtaacaccattgctcctaatgcgggatcacggatgactcagacagttatgcctgaagatcttgtggaagccctgaagccagagtatgtggcacctcttgtcctttggctttgtcacgagagttgtgaggagaatggtggcttgtttgaggttggagcaggatggattggaaaattacgctgggagcggactcttggagctattgtaagacaaaagaatcacccaatgactcctgaggcagtcaaggctaactggaagaagatctgtgactttgagaatgccagcaagcctcagagtatccaagaatcaactggcagtataattgaagttctgagtaaaatagattcagaaggaggagtttcagcaaatcatactagtcgtgcaacgtctacagcaacatcaggatttgctggagctattggccagaaactccctccattttcttatgcttatacggaactggaagctattatgtatgcccttggagtgggagcgtcaatcaaggatccaaaagatttgaaatttatttatgaaggaagttctgatttctcctgtttgcccaccttcggagttatcataggtcagaaatctatgatgggtggaggattagcagaaattcctggactttcaatcaactttgcaaaggttcttcatggagagcagtacttagagttatataaaccacttcccagagcaggaaaattaaaatgtgaagcagttgttgctgatgtcctagataaaggatccggtgtagtgattattatggatgtctattcttattctgagaaggaacttatatgccacaatcagttctctctctttcttgttggctctggaggctttggtggaaaacggacatcagacaaagtcaaggtagctgtagccatacctaatagacctcctgatgctgtacttacagataccacctctcttaatcaggctgctttgtaccgcctcagtggagactggaatcccttacacattgatcctaactttgctagtctagcaggttttgacaagcccatattacatggattatgtacatttggattttctgccaggcgtgtgttacagcagtttgcagataatgatgtgtcaagattcaaggcaattaaggctcgttttgcaaaaccagtatatccaggacaaactctacaaactgagatgtggaaggaaggaaacagaattcattttcaaaccaaggtccaagaaactggagacattgtcatttcaaatgcatatgtggatcttgcaccaacatctggtacttcagctaagacaccctctgagggcgggaagcttcagagtacctttgtatttgaggaaataggacgccgcctaaaggatattgggcctgaggtggtgaagaaagtaaatgctgtatttgagtggcatataaccaaaggcggaaatattggggctaagtggactattgacctgaaaagtggttctggaaaagtgtaccaaggccctgcaaaaggtgctgctgatacaacaatcatactttcagatgaagatttcatggaggtggtcctgggcaagcttgaccctcagaaggcattctttagtggcaggctgaaggccagagggaacatcatgctgagccagaaacttcagatgattcttaaagactacgccaagctctgaagggcacactacactattaataaaaatggaatcattaaatactctcttcacccaaatatgcttgattattctgcaaaagtgattagaactaagatgcaggggaaattgcttaacattttcagatatcagataactgcagattttcattttctactaatttttcatgtatcattatttttacaaggaactatatataagctagcacataattatccttctgttcttagatctgtatcttcataataaaaaattttgcccaagtcctgtttccttagaatttgtgatagcattgataagttgaaaggaaaattaaatcaataaaggcctttgatacctttgt

SEQ ID NO: 11601 - protein, 599 aa, Homo sapiens
MKKQKYGRIIMTSSASGIYGNFGQANYSAAKLGLLGLANSLAIEGRKSNIHCNTIAPNAGSRMTQTVMPEDLVEALKPEYVAPLVLWLCHESCEENGGLFEVGAGWIGKLRWERTLGAIVRQKNHPMTPEAVKANWKKICDFENASKPQSIQESTGSIIEVLSKIDSEGGVSANHTSRATSTATSGFAGAIGQKLPPFSYAYTELEAIMYALGVGASIKDPKDLKFIYEGSSDFSCLPTFGVIIGQKSMMGGGLAEIPGLSINFAKVLHGEQYLELYKPLPRAGKLKCEAVVADVLDKGSGVVIIMDVYSYSEKELICHNQFSLFLVGSGGFGGKRTSDKVKVAVAIPNRPPDAVLTDTTSLNQAALYRLSGDWNPLHIDPNFASLAGFDKPILHGLCTFGFSARRVLQQFADNDVSRFKAIKARFAKPVYPGQTLQTEMWKEGNRIHFQTKVQETGDIVISNAYVDLAPTSGTSAKTPSEGGKLQSTFVFEEIGRRLKDIGPEVVKKVNAVFEWHITKGGNIGAKWTIDLKSGSGKVYQGPAKGAADTTIILSDEDFMEVVLGKLDPQKAFFSGRLKARGNIMLSQKLQMILKDYAKL

SEQ ID NO: 11602 - DNA, 474 bp, Homo sapiens
gaggcaccgcatctcttgaggaggaaagagccggaaacacctggtctctcaagcaggattgggccgagcctatgccctggcttttgcagaaagaggagcgttagttgttggtaagttggtgtgtttttctttttaatctgtagctgataactgaaatacaatctttacaagctatctttgtctttctatcaaataatttgtcaaggttgaattttattattaatttttacttttgccagaaggtttttaccccgactaaggctgtctgtctaaattacttttaaaagggaaccagtttcacagaattcccagcttaacagaattgataacgaagggctagggggtaggcatgctggcttgtggctataactccagtgactcaggaggctgaggtgggaggatcgcttgagaccaggagttcgagcctgcagagaactatgattataccactgcactccaatctgggtgatggcg

SEQ ID NO: 11603 - protein, 38 aa, Homo sapiens
GGKSRKHLVSQAGLGRAYALAFAERGALVVGKLVCFSF

SEQ ID NO: 11604 - DNA, 663 bp, Homo sapiens
gttagtgtctttgatttagaattaagctaagaagagcttttagtttctgcttcccttgtaacaactggggtaaaaaagaagctgagaaagataggatttgctggcaaagggggcctatgttggtgcttttcttggtgctgcaacgggactgagatataatccacagagttcatttgcggggttcattccaagtgacacgggcagcatgggaacacatgaagaaacagaagtatggaaggattattatgacttcatcagcttcaggaatatatggcaactttggccaggccaattatagtgctgcaaagttgggtcttctgggccttgcaaattctcttgcaattgaaggcaggaaaagcaacattcattgtaacaccattgctcctaatgcgggatcacggatgactcagacagttatgcctgaagatcttgtggaagccctgaagccagagtatgtggcacctcttgtcctttggctttgtcacgagagttgtgaggagaatggtggcttgtttgaggttggagcaggatggattggaaaattacgctgggagcggactcttggagctattgtaagacaaaagaatcacccaatgactcctgaggcaagaatcaactggcagtataattgaagttctgagtaaaatagattcagaaggagga

SEQ ID NO: 11605 - protein, 138 aa, Homo sapiens
MKKQKYGRIIMTSSASGIYGNFGQANYSAAKLGLLGLANSLAIEGRKSNIHCNTIAPNAGSRMTQTVMPEDLVEALKPEYVAPLVLWLCHESCEENGGLFEVGAGWIGKLRWERTLGAIVRQKNHPMTPEARINWQYN

SEQ ID NO: 11606 - DNA, 1129 bp, Homo sapiens
gggatacaaagacaaaacatgtttgtgccagcaaagacctaatattaagggaaggtagcataaacaaaaacagttccttctttctcctgtagtgaccctttgtgatttgtaaagtatatatcttaataagatcctcaggggtctccaagttttcaaatgccatattctcatctgttacctcacccctccctcattaaatgctgtgaagtatgactgaaattgttatggactctttcagaagcttagttattaataaatacagagctaaaaatcaacagtaagatgcctgtaatgaattctgccactaagagaaaatgaatacaatctctttcttcacttctgaaataagattagctgtgatcttataggtgtctataaactcaaggtgatggtggtggttgcagaccatgacctgagccactacagaactggaagttccacttctttacctcaaatttctgtattcttgtatttctatattttgctttttttctaaatgacagataatgtataattgatagatagaatatgtgtagaataagtgccacattaacatggaaactatagaaatgtctgcattttacttggtttattttaccctcattttgttggagagaaaaagatacacattggtttcttcctatttttcccagctattgacctgaaaagtggttctggaaaagtgtaccaaggccctgcaaaaggtgctgctgatacaacaatcatactttcagatgaagatttcatggaggtggtcctgggcaagcttgaccctcagaaggcattctttagtggcaggctgaaggccagagggaacatcatgctgagccagaaacttcagatgattcttaaagactacgccaagctctgaagggcacactacactattaataaaaatggaatcattaaatactctcttcacccaaatatgcttgattattctgcaaaagtgattagaactaagatgcaggggaaattgcttaacattttcagatatcagataactgcagattttcattttctactaatttttcatgtatcattatttttacaaggaactatatataagctagcacataattatccttctgttcttagatctgtatcttcataataaaaaattttgccc

SEQ ID NO: 11607 - protein, 41 aa, Homo sapiens
MEVVLGKLDPQKAFFSGRLKARGNIMLSQKLQMILKDYAKL

SEQ ID NO: 11608 - DNA, 1210 bp, Homo sapiens
gggatacaaagacaaaacatgtttgtgccagcaaagacctaatattaagggaaggtagcataaacaaaaacagttccttctttctcctgtagtgaccctttgtgatttgtaaagtatatatcttaataagatcctcaggggtctccaagttttcaaatgccatattctcatctgttacctcacccctccctcattaaatgctgtgaagtatgactgaaattgttatggactctttcagaagcttagttattaataaatacagagctaaaaatcaacagtaagatgcctgtaatgaattctgccactaagagaaaatgaatacaatctctttcttcacttctgaaataagattagctgtgatcttataggtgtctataaactcaaggtgatggtggtggttgcagaccatgacctgagccactacagaactggaagttccacttctttacctcaaatttctgtattcttgtatttctatattttgctttttttctaaatgacagataatgtataattgatagatagaatatgtgtagaataagtgccacattaacatggaaactatagaaatgtctgcattttacttggtttattttaccctcattttgttggagagaaaaagatacacattggtttcttcctatttttcccagctattgacctgaaaagtggttctggaaaagtgtaccaaggccctgcaaaaggtgctgctgatacaacaatcatactttcagatgaagatttcatggaggtggtcctgggcaagcttgaccctcagaaggcattctttagtggcaggctgaaggccagagggaacatcatgctgagccagaaacttcagatgattcttaaagactacgccaagctctgaagggcacactacactattaataaaaatggaatcattaaatactctcttcacccaaatatgcttgattattctgcaaaagtgattagaactaagatgcaggggaaattgcttaacattttcagatatcagataactgcagattttcattttctactaatttttcatgtatcattatttttacaaggaactatatataagctagcacataattatccttctgttcttagatctgtatcttcataataaaaaattttgcccaagtcctgtttccttagaatttgtgatagcattgataagttgaaaggaaaattaaatcaataaaggcctttgatacctttg

SEQ ID NO: 11609 - protein, 41 aa, Homo sapiens; identical to SEQ ID NO: 11607

SEQ ID NO: 11610 - DNA, 276 bp, Homo sapiens
aaaggtgatattgtagacatcaagggaatgggtactgctcaaaaaggaatgccccacaagtgttatcatggcaaaactggaagagtctacaatgttacctggcatgctgttggccttattgtaaacaaacaagttaaaggcaagattcttgccaagagaattaatgcgcttattgaacacattaagcactctaagagccaagatagtttcctgaaacgcgtgaaggaaaataatcagaaaaagaagccaaagacaaaggtacctggattcaactga

SEQ ID NO: 11611 - protein, 82 aa, Homo sapiens
MGTAQKGMPHKCYHGKTGRVYNVTWHAVGLIVNKQVKGKILAKRINALIEHIKHSKSQDSFLKRVKENNQKKKPKTKVPGFN

SEQ ID NO: 11612 - DNA, 1233 bp, Homo sapiens
aaccttaacagccctgcagtgtagtgggcactgggcagtgctgctccttcactaagcggtctgagttctttagctatctcggagattcaactacgtttactcgtactgaatctttttaatgaatttcctgagagccaagaagggccaatctacaggaaaaagtgggaggtggacattaagcatcttctagaaactcttctagctgatatcatgaaacgacgacaaaagaggaaacatttggaaaatgaagagtcccaggaaaccgctgagaagggaggaggaatccagagaatacatcgagacagcccccagcctcaatcacccctggcccaggttcaggaacgaggagagactcctccccgctcacaacatgtctccttgtcgtcctattcatcctataagacttgtgtgtcctctctgtgtgtaaacaaagaggaaaggggcatgaaaatatactacatgcaggtacaaatgaacaaaggtgtggctgtctcctgggagacagaggaaactttggagtccttagaaaagcagccaaggatggaagaagtgaccctttctgaggttgtgagggtaggtactcccccctctgatgtgtccaccagaaacctcctgtctgacagtgagcccagtggggaggagaaagagcatgaggaaaggacagaatcagacagcctgccaggctcacccaccgttgaggacacacccagagccaagactcctgactggctggtgaccatggagaacggcttcaggtgcatggcctgctgccgggtgttcaccaccatggaagccctccaggagcatgtgcagtttgggatcagagagggcttcagctgccacgtctttcatctcaccatggctcagctgacaggcaacatggaatcagagagcacccaagatgagcaggaggaggaaaatggaaatgagaaggaggaggaagagaaaccagaagcaaaggaggaggaggggcagcccacagaagaagaccttggcctgaggagatcctggagccaatgtccaggctgtgtgtttcattctccaaaggacaggaactgagacttatgggccagaagatactggaagatggtgtggccttctcttgcaagagggagaagaaagagccatggagatagtagcagacaggctgcccaaggtatgaagcagatgagggaccagcactcagtctaacatgtaaacatcatacgtaataaaggttgtgtttcaaacctt

SEQ ID NO: 11613 - protein, 282 aa, Homo sapiens
MKRRQKRKHLENEESQETAEKGGGIQRIHRDSPQPQSPLAQVQERGETPPRSQHVSLSSYSSYKTCVSSLCVNKEERGMKIYYMQVQMNKGVAVSWETEETLESLEKQPRMEEVTLSEVVRVGTPPSDVSTRNLLSDSEPSGEEKEHEERTESDSLPGSPTVEDTPRAKTPDWLVTMENGFRCMACCRVFTTMEALQEHVQFGIREGFSCHVFHLTMAQLTGNMESESTQDEQEEENGNEKEEEEKPEAKEEEGQPTEEDLGLRRSWSQCPGCVFHSPKDRN

SEQ ID NO: 11614 - DNA, 1336 bp, Homo sapiens
tgctgctccttcactaagcggtctgagttctttagctatctcggagattcaactacgtttactcgtactgaatctttttaatgaatttcctgagagccaagaagggccaatctacaggaaaaagtgggaggtggacattaagcatcttctagaaactcttctagctgatatcatgaaacgacgacaaaagaggaaacatttggaaaatgaagagtcccaggaaaccgctgagaagggaggaggaatgtcaaagtcccaagaggatgccctgcagcctggatccactagagtggccaaaggctggagccaaggggtgggagaagttacttctacctccgaatactgctcctgcgtttcttcttcacgcaagctcatccacagtggaatccagagaatacatcgagacagcccccagcctcaatcacccctggcccaggttcaggaacgaggagagactcctccccgctcacaacatgtctccttgtcgtcctattcatcctataagacttgtgtgtcctctctgtgtgtaaacaaagaggaaaggggcatgaaaatatactacatgcaggtacaaatgaacaaaggtgtggctgtctcctgggagacagaggaaactttggagtccttagaaaagcagccaaggatggaagaagtgaccctttctgaggttgtgagggtaggtactcccccctctgatgtgtccaccagaaacctcctgtctgacagtgagcccagtggggaggagaaagagcatgaggaaaggacagaatcagacagcctgccaggctcacccaccgttgaggacacacccagagccaagactcctgactggctggtgaccatggagaacggcttcaggtgcatggcctgctgccgggtgttcaccaccatggaagccctccaggagcatgtgcagtttgggatcagagagggcttcagctgccacgtctttcatctcaccatggctcagctgacaggcaacatggaatcagagagcacccaagatgagcaggaggaggaaaatggaaatgagaaggaggaggaagagaaaccagaagcaaaggaggaggaggggcagcccacagaagaagaccttggcctgaggagatcctggagccaatgtccaggctgtgtgtttcattctccaaaggacaggaactgagacttatgggccagaagatactggaagatggtgtggccttctcttgcaagagggagaagaaagagccatggagatagtagcagacaggctgcccaaggtatgaagcagatgagggaccagcactcagtctaacatgtaaacatcatacgtaataaaggttgtgtttcaaacctt

SEQ ID NO: 11615 - protein, 329 aa, Homo sapiens
MKRRQKRKHLENEESQETAEKGGGMSKSQEDALQPGSTRVAKGWSQGVGEVTSTSEYCSCVSSSRKLIHSGIQRIHRDSPQPQSPLAQVQERGETPPRSQHVSLSSYSSYKTCVSSLCVNKEERGMKIYYMQVQMNKGVAVSWETEETLESLEKQPRMEEVTLSEVVRVGTPPSDVSTRNLLSDSEPSGEEKEHEERTESDSLPGSPTVEDTPRAKTPDWLVTMENGFRCMACCRVFTTMEALQEHVQFGIREGFSCHVFHLTMAQLTGNMESESTQDEQEEENGNEKEEEEKPEAKEEEGQPTEEDLGLRRSWSQCPGCVFHSPKDRN

SEQ ID NO: 11616 - DNA, 875 bp, Homo sapiens
ggcggcgctatgctgtcctgcttcaggctcctctccaggcacatcagcccttcgctggcgtctctgcgcccggtgcgctgctgcttcgcgctcccgctgcgttgggccccggggcgccccttggaccccaggcagatcgccccccgccgccccctggccgcagccgcctcctcccgggaccctaccgggcccgccgccggcccctctcgggtgcgccagaacttccaccccgactccgaggctgccatcaaccgccagatcaacctcgagctctatgcgtcctacgtgtacttgtccatggcctattacttctcccgggatgacgtggccttgaacaacttctccaggtatttccttcaccagtcccgggaggagaccgagcacgcggagaagctgatgaggctgcagaaccagcgaggaggccggatccgcctgcaggacatcaagaagccggaacaggacgactgggaaagcgggctgcatgccatggagtgtgctctactcttggaaaagaacgtgaaccagtcgttgctggaattgcacgctctagcctcagataaaggtgacccccatttgtgcgatttcctggaaacctactacctgaatgagcaggtgaagtctatcaaagaactaggtgaccacgtgcacaacttagtgaagatgggggccccggatgctggcctggcggagtacctttttgacacacatacccttggaaatgaaaacaagcagaactaagccacgagctgccttcctcccaggctagtggatccaaagaccaaagtcagctgtctcctgctttcttgcccttaaaatcacctccatctttatattcttctgttatactattcctccaataaagtgatttgtagaaa

SEQ ID NO: 11617 - protein, 242 aa, Homo sapiens [sequence omitted]

SEQ ID NO: 11618 - DNA, 2170 bp, Homo sapiens
gtggcgacgcagccgcggtctgagagaccggttcacgtgcaggcagcggcggatcatattccttcatctaccatggctcagccgggaactctgaacctcaataacgaggttgtgaagatgagaaaagaagtgaagagaattcgagttttagttatccgaaaacttgtcaggagtgttggccgactgaagtcaaaaaagggtactgaagatgcactgttaaaaaaccaaagacgggcgcaaagattgcttgaagaaatccatgccatgaaggaattgaaacctgacatagtaactaaatctgctcttggtgatgatatcaactttgaaaaaatcttcaaaaagccagattctactgcaactgaaagagcaattgccagactagcagtacatcctcttctgaagaaaaagatagatgtgctaaaagctgctgtacaagcctttaaagaagcaagacaaaatgttgctgaagttgagtcatcaaagaatgcttcagaggacaatcattctgagaatactttgtattcaaatgataatggaagtaatttacagcgtgaagcaactgtcatcagtgagcaaaaagtcaaagaaaccaaaatattggcgaagaaaccaatacataattcaaaggaaaaaatagcaaagatggaacatggacctaaagcagtgactattgcaaattctccatcaaagccttcagaaaaggattctgtagtttcccttgagtcccagaagacacctgctgacccaaaactgaaaactctaagtcaaaccaaaaaaaacaaaggatctgatagctcactctctggtaacagtgatggcggagaagaattttgtgaagaggagaaggaatattttgatgatagcacagaagaaaggttttacaagcagtcttccatgtctgaagatagtgatagcggtgacgacttcttcattgggaaagtcagacggacacgaaagaaggaaagtagttgtcattcttcagttaaggaacaaaaaccactagaaaaagtgtttcttaaagaagatacaggtgaaactcatggggatacaagaaatgacaaaatcaagccaagtacagaaaccagaaagttagaatcagtgtttttccactctttatctggatctaaaagctctagaagaaatttcaaagaacaggctccaaaaacaagatccctagattttccacagaatgagcctcagatcaagaatcagtttaataagaagctatcaggaagacttgaaaatacaaaacagcaattgcagctgcctcttcatccttcatgggaagcaagcagaaggcgaaaagaacagcaatctaatattgctgtgtttcaggggaaaaaaattacgtttgatgattgattagtgcctctttctgcaaacttttccatctaaaaaaaaaaatgttttttttaagacaggatctcattctgttgcccagactagagtacaatattgcaatcacagctcactgcagcctcaaactcctgggctcaagtgatcctcccacctctgcctcccaaagggctgggactgcaggtgcatgcactaccatgcccagctttctcaccccaggctctgcagctattacttaaactcgtatttgaataagtctcttggggagaattatagaatgtttgtttttgtatttttttttaaagtaaattcaacttacgcttatataagcctttcacaaatccaatatgtacttaaattgatttttaataatatccctcagactgtttcccttatgaagtaatttggggattttagtgatctcatattttctctttagtgcttatcatgaaatgtgcttcactggttcagctctgttgtttccttaaacataaatgtcaatatatatttaaaataataatggaaacataggaaatcagctatttaaaccagatcacccttgttaaaaatcattcttgttagcaaactaaaatagtaacttttattatggatgtacagataaatattaattttattatagttttaagtacttgtgatcatgtactttttgattctaaaatagttgtctaggacaattttgggattcttaattatattttagttaagaaaattgtttaaatatagcaatacaaccaataatttgttttatgtttcactgcatataaatatttccattaaatcaagaatgtatatt

SEQ ID NO: 11619 - protein, 429 aa, Homo sapiens; identical to SEQ ID NO: 1102

SEQ ID NO: 11620 - DNA, 2840 bp, Homo sapiens
gtggcgacgcagccgcggtctgagagaccggttcacgtgcaggcagcggcggatcatattccttcatctaccatggctcagccgggaactctgaacctcaataacgaggttgtgaagatgagaaaagaagtgaagagaattcgagttttagttatccgaaaacttgtcaggagtgttggccgactgaagtcaaaaaagggtactgaagatgcactgttaaaaaaccaaagacgggcgcaaagattgcttgaagaaatccatgccatgaaggaattgaaacctgacatagtaactaaatctgctcttggtgatgatatcaactttgaaaaaatcttcaaaaagccagattctactgcaactgaaagagcaattgccagactagcagtacatcctcttctgaagaaaaagatagatgtgctaaaagctgctgtacaagcctttaaagaagcaagacaaaatgttgctgaagttgagtcatcaaagaatgcttcagaggacaatcattctgagaatactttgtattcaaatgataatggaagtaatttacagcgtgaagcaactgtcatcagtgagcaaaaagtcaaagaaaccaaaatattggcgaagaaaccaatacataattcaaaggaaaaaatagcaaagatggaacatggacctaaagcagtgactattgcaaattctccatcaaagccttcagaaaaggattctgtagtttcccttgagtcccagaagacacctgctgacccaaaactgaaaactctaagtcaaaccaaaaaaaacaaaggatctgatagctcactctctggtaacagtgatggcggagaagaattttgtgaagaggagaaggaatattttgatgatagcacagaagaaaggttttacaagcagtcttccatgtctgaagatagtgatagcggtgacgacttcttcattgggaaagtcagacggacacgaaagaaggaaagtagttgtcattcttcagttaaggaacaaaaaccactagaaaaagtgtttcttaaagaagatacaggtgaaactcatggggatacaagaaatgacaaaatcaagccaagtacagaaaccagaaagttagaatcagtgtttttccactctttatctggatctaaaagctctagaagaaatttcaaagaacaggctccaaaaacaagatccctagattttccacagaatgagcctcagatcaagaatcagtttaataagaagctatcaggaagacttgaaaatacaaaacagcaattgcagctgcctcttcatccttcatgggaagcaagcagaaggcgaaaagaacagcaatctaatattgctgtgtttcaggggaaaaaaattacgtttgatgattgattagtgcctctttctgcaaacttttccatctaaaaaaaaaaatgttttttttaagacaggatctcattctgttgcccagactagagtacaatattgcaatcacagctcactgcagcctcaaactcctgggctcaagtgatcctcccacctctgcctcccaaagggctgggactgcaggtgcatgcactaccatgcccagctttctcaccccaggctctgcagctattacttaaactcgtatttgaataagtctcttggggagaattatagaatgtttgtttttgtatttttttttaaagtaaattcaacttacgcttatataagcctttcacaaatccaatatgtacttaaattgatttttaataatatccctcagactgtttcccttatgaagtaatttggggattttagtgatctcatattttctctttagtgcttatcatgaaatgtgcttcactggttcagctctgttgtttccttaaacataaatgtcaatatatatttaaaataataatggaaacataggaaatcagctatttaaaccagatcacccttgttaaaaatcattcttgttagcaaactaaaatagtaacttttattatggatgtacagataaatattaattttattatagttttaagtacttgtgatcatgtactttttgattctaaaatagttgtctaggacaattttgggattcttaattatattttagttaagaaaattgtttaaatatagcaatacaaccaataatttgttttatgtttcactgcatataaatatttccattaaatcaagaatgtatattatctagtttttactatacttattttaaaatttttgaggaatcatagattctaatttttaagaacaaattctgaaggtggtaggattaaaagaatatttccactgatggctaagcaaagaagttgtaagatgactcactgaggaagggactgctttatacatcacagtactgctatttaaaaggaaaacagaaatttttaaatcccttcaaatgtttcacttttgctatgctgggaaaaattttgaagttcttggtaaactgaataatgctaatccatgtttcctgcacattagttcctttaatggcagggaaggccatctggttaacctgtattcacaaactctcaagagtttctacttatttcaggagcttaagaatttagataactcagccgggcgtggtgactcatgcctataatcccagcactttgggaggctgaggcgggtagatcgctagaggcaaggagttcaaaaccagcctgggcaacatggtgaaaccctgtctctactaaaaatacagaaaattatccaggcgtggtggccggcatctgtaattccagctactcagaaggctgaggcataagaattgcttgaacctgggaggtggaggttgcagtgagccaagattgcaccactgcactccagcctgggtgacagagtatgactgtctc

SEQ ID NO: 11621 - protein, 429 aa, Homo sapiens; identical to SEQ ID NO: 1102

SEQ ID NO: 11622 - DNA, 2102 bp, Homo sapiens
gcagccgcggtctgagagaccggttcacgtgcaggcagcggcggatcatattccttcatctaccatggctcagccgggaactctgaacctcaataacgaggttgtgaagatgagaaaagaagtgaagagaattcgagttttagttatccgaaaacttgtcaggagtgttggccgactgaagtcaaaaaagggtactgaagatgcactgttaaaaaaccaaagacgggcgcaaagattgcttgaagaaatccatgccatgaaggaattgaaacctgacatagtaactaaatctgctcttggtgatgatatcaactttgaaaaaatcttcaaaaagccagattctactgcaactgaaagagcaattgccagactagcagtacatcctcttctgaagaaaaagatagatgtgctaaaagctgctgtacaagcctttaaagaagcaagacaaaatgttgctgaagttgagtcatcaaagaatgcttcagaggacaatcattctgagaatactttgtattcaaatgataatggaagtaatttacagcgtgaagcaactgtcatcagtgagcaaaaagtcaaagaaaccaaaatattggcgaagaaaccaatacataattcaaaggaaaaaatagcaaagatggaacatggacctaaagcagtgactattgcaaattctccatcaaagccttcagaaaaggattctgtagtttcccttgagtcccagaagacacctgctgacccaaaactgaaaactctaagtcaaaccaaaaaaaacaaaggatctgatagctcactctctggtaacagtgatggcggagaagaattttgtgaagaggagaaggaatattttgatgatagcacagaagaaaggttttacaagcagtcttccatgtctgaagatagtgatagcggtgacgacttcttcattgggaaagtcagacggacacgaaagaaggaaagtagttgtcattcttcagttaaggaacaaaaaccactagaaaaagtgtttcttaaagaagatacaggtgaaactcatggggatacaagaaatgacaaaatcaagccaagtacagaaaccagaaagttagaatcagtgtttttccactctttatctggatctaaaagctctagaagaaatttcaaagaacaggctccaaaaacaagatccctagattttccacagaatgagcctcagatcaagaatcagtttaataagaagctatcaggaagacttgaaaatacaaaacagcaattgcagctgcctcttcatccttcatgggaagcaagcagaaggcgaaaagaacagcaatctaatattgctgtgtttcaggggaaaaaaattacgtttgatgattgattagtgcctctttctgcaaacttttccatctaaaaaaaaaaatgttttttttaagacaggatctcattctgttgcccagactagagtacaatattgcaatcacagctcactgcagcctcaaactcctgggctcaagtgatcctcccacctctgcctcccaaagggctgggactgcaggtgcatgcactaccatgcccagctttctcaccccaggctctgcagctattacttaaactcgtatttgaataagtctcttggggagaattatagaatgtttgtttttgtatttttttttaaagtaaattcaacttacgcttatataagcctttcacaaatccaatatgtacttaaattgatttttaataatatccctcagactgtttcccttatgaagtaatttggggattttagtgatctcatattttctctttagtgcttatcatgaaatgtgcttcactggttcagctctgttgtttccttaaacataaatgtcaatatatatttaaaataataatggaaacataggaaatcagctatttaaaccagatcacccttgttaaaaatcattcttgttagcaaactaaaatagtaacttttattatggatgtacagataaatattaattttattatagttttaagtacttgtgatcatgtactttttgattctaaaatagttgtctaggacaattttgggattcttaattatattttagttaagaaaattgtttaaatatagcaatacaacc

SEQ ID NO: 11623 - protein, 429 aa, Homo sapiens; identical to SEQ ID NO: 1102

SEQ ID NO: 11624 - DNA, 5173 bp, Homo sapiens
cgtgaacaaatagctgaggggcggccgggccagaacggcttgtgtaactttgcaaacgtgccagaaagtttaaaatctctcctccttccttcactccagacactgcccgctctccgggactgccgcgccgctccccgttgccttccaggactgagaaaggggaaagggaagggtgccacgtccgagcagccgccttgactggggaagggtctgaatcccacccttggcattgcttggtggagactgagatacccgtgctccgctcgcctccttggttgaagatttctccttccctcacgtgatttgagccccgtttttattttctgtgagccacgtcctcctcgagcggggtcaatctggcaaaaggagtgatgcgcttcgcctggaccgtgctcctgctcgggcctttgcagctctgcgcgctagtgcactgcgcccctcccgccgccggccaacagcagcccccgcgcgagccgccggcggctccgggcgcctggcgccagcagatccaatgggagaacaacgggcaggtgttcagcttgctgagcctgggctcacagtaccagcctcagcgccgccgggacccgggcgccgccgtccctggtgcagccaacgcctccgcccagcagccccgcactccgatcctgctgatccgcgacaaccgcaccgccgcggcgcgaacgcggacggccggctcatctggagtcaccgctggccgccccaggcccaccgcccgtcactggttccaagctggctactcgacatctagagcccgcgaagctggcgcctcgcgcgcggagaaccagacagcgccgggagaagttcctgcgctcagtaacctgcggccgcccagccgcgtggacggcatggtgggcgacgacccttacaacccctacaagtactctgacgacaacccttattacaactactacgatacttatgaaaggcccagacctgggggcaggtaccggcccggatacggcactggctacttccagtacggtctcccagacctggtggccgacccctactacatccaggcgtccacgtacgtgcagaagatgtccatgtacaacctgagatgcgcggcggaggaaaactgtctggccagtacagcatacagggcagatgtcagagattatgatcacagggtgctgctcagatttccccaaagagtgaaaaaccaagggacatcagatttcttacccagccgaccaagatattcctgggaatggcacagttgtcatcaacattaccacagtatggatgagtttagccactatgacctgcttgatgccaacacccagaggagagtggctgaaggccacaaagcaagtttctgtcttgaagacacatcctgtgactatggctaccacaggcgatttgcatgtactgcacacacacagggattgagtcctggctgttatgatacctatggtgcagacatagactgccagtggattgatattacagatgtaaaacctggaaactatatcctaaaggtcagtgtaaaccccagctacctggttcctgaatctgactataccaacaatgttgtgcgctgtgacattcgctacacaggacatcatgcgtatgcctcaggctgcacaatttcaccgtattagaaggcaaagcaaaactcccaatggataaatcagtgcctggtgttctgaagtgggaaaaaatagactaacttcagtaggatttatgtattttgaaaaagagaacagaaaacaacaaaagaatttttgtttggactgttttcaataacaaagcacataactggattttgaacgcttaagtcatcattacttgggaaatttttaatgtttattatttacatcactttgtgaattaacacagtgtttcaattctgtaattacatatttgactctttcaaagaaatccaaatttctcatgttccttttgaaattgtagtgcaaaatggtcagtattatctaaatgaatgagccaaaatgactttgaactgaaacttttctaaagtgctggaactttagtgaaacataataataatgggtttatatatgtcatagcatagatgaatttagaaacaatgctcctactgtttaaatacatatggacacatctggtgctgagaaagaaacaaacacattaccattggtgtcaagaaatattactatatagcagagaaatggcaatacatgtactcagatagttacatccctatataaaaagtatgtttacatttaaaaaattagtagataacttcctttctttcaagtgcacaatttcattttgacttgagtcaacttttgttttggaacaaattaagtaagggagctgcccaatcctgtctgatatttcttgaggctgccctctatcattttatctttcccatgggcagagatgttgtaagtgggattcttaatatcaccattcttgggactggtatacataaggcagccgtgaaactggaaagtcattttgatgactgatgtgatacatccagaggtaaaatgcatttaaacatattaaagtatttgccaaagatacaattttcttgctgacataaaaatcacacaaacaagtcccccccaaaccacaactgtctctcaaatagcttaaaaaaattgaaaaacattttaggatttttcaagttttctagattttaaaaagatgttcagctattagaggaatgttaaaaattttatattatctagaacacaggaacatcatcctgggttattcaggaatcagtcacacatgtgtgtgtgtctgagatatagtctaaattagcaaagcacatagtattacatacttgaggggttggtgaacaaaggaaaaatatactttctgcaaaaccaaggactgtgctgcgtaatgagacagctgtgatttcatttgaaactgtgaaaccatgtgccataatagaattttgagaattttgcttttacctaaattcaagaaaatgaaattacacttttaagttagtggtgcttaagcataatttttcctatattaaccagtattaaaatctcaagtaagattttccagtgccagaacatgttaggtggaattttaaaagtgcctcggcatcctgtattacatgtcatagaattgtaaagtcaacatcaattactagtaatcattctgcactcactgggtgcatagcatggttagaggggctagagatggacagtcatcaactggcggatatagcggtacatatgatccttagccaccagggcacaagcttaccagtagacaatacagacagagcttttgttgagctgtaactgagctatggaatagcttctttgatgtacctctttgccttaaattgctttttagttctaagattgtagaatgatcctttcaaattgtaatcttttctaacagagatattttaatatacttgctttcttaaaaaacaaaaaaactactgtcagtattaatactgagccagactggcatctacagatttcagatctatcattttattgattcttaagcttgtattaaaaactaggcaatatcatcatggatacataggagaagacacatttacaatcattcattgggccttttatctgtctatccatccatcatcatttgaaggcctaatatatgccaagtactcacatggtatgcattgagacataaaaaagactgtctataacctcaataagtattaaaaatcccattattacccataaggttcatcttatttcatttttagggaataaaattacatgtctatgaaatttcaattttaagcactattgtttttcatgaccataatttatttttaaaaataaattaaaggttaattatatgcatgtatgtatttctaataattaaaaatgtgttcaatccctgaaatgtctgccttttaaatataacacctactatttggttaattttgacgatttttttttttcaattaggaagctaaaaatactactttattccttatatgaacattcatccccctcctggcacctctaaacacacccaaataactcacaagtactgatttaacactctgtattactgaacttctttgaactattttgaactttgaatctcttctctgaataactgccgaaactcaaagataataattagttgatgaaggttatcaattaataaaataacacagaccagtcttaccaaactctaaatacattttaaaaaataggaactggcaatgataaaaagaatgttgagtactgacaggagattggcttttacactaaaaaagacagaaaatggactaaataggaacataatttcagagtttatgagtcagtttacaatatgccatattagcgatctcatgatgattcagaccacagtctgggttaaagatgtcttgacctctgaggctagcataacatatatgagaatacaacttgcctatttccagaaaatctgtatatttttatagaataactttatttacaatttctatcatccaattactcactaggcattatttgtagtactttttttctctttgaaatctcataggatagtcacacttataaacattcccaatattcggattctagaagaaatgcaattcattaaaattttcctggcactgagagttaatctttagcagattgcatgaaaatactgaattcctggtaaggagatattttgttttaaaaataatgtgttttgatacgaatcagtgtattaactgataactaaaaagtactcttttttctatatatacatatttttttgaactcatattcacaatcaacatattcaatcagtgagttaagtctcattcctagctaccaaaattcctgggccacttttaaacactaaacatttcatttatcctctaagctaaaatggtgctgagttatttaaatctgaatgtaaaatgcattaaatcttagcttgtggtatataaacatttaattaatataaaactgcttgctataaactaagtaacatgtcatttggtgttaggtttttagtgaagttttagcttctcccaaatttttcaggaatgttatttgtaagacgtgtaacttttttgaagaactcttattttaaatgctcagacattggctttatgttcctctttgcattctcatattcttttattatacatctatactatgattgcaagattatataaaaatgccttgaataaatgatttcaagtgtc

SEQ ID NO: 11625 - protein, 417 aa, Homo sapiens; identical to SEQ ID NO: 1104

SEQ ID NO: 11626 - DNA, 3861 bp, Homo sapiens
cgtgaacaaatagctgaggggcggccgggccagaacggcttgtgtaactttgcaaacgtgccagaaagtttaaaatctctcctccttccttcactccagacactgcccgctctccgggactgccgcgccgctccccgttgccttccaggactgagaaaggggaaagggaagggtgccacgtccgagcagccgccttgactggggaagggtctgaatcccacccttggcattgcttggtggagactgagatacccgtgctccgctcgcctccttggttgaagatttctccttccctcacgtgatttgagccccgtttttattttctgtgagccacgtcctcctcgagcggggtcaatctggcaaaaggagtgatgcgcttcgcctggaccgtgctcctgctcgggcctttgcagctctgcgcgctagtgcactgcgcccctcccgccgccggccaacagcagcccccgcgcgagccgccggcggctccgggcgcctggcgccagcagatccaatgggagaacaacgggcaggtgttcagcttgctgagcctgggctcacagtaccagcctcagcgccgccgggacccgggcgccgccgtccctggtgcagccaacgcctccgcccagcagccccgcactccgatcctgctgatccgcgacaaccgcaccgccgcggcgcgaacgcggacggccggctcatctggagtcaccgctggccgccccaggcccaccgcccgtcactggttccaagctggctactcgacatctagagcccgcgaagctggcgcctcgcgcgcggagaaccagacagcgccgggagaagttcctgcgctcagtaacctgcggccgcccagccgcgtggacggcatggtgggcgacgacccttacaacccctacaagtactctgacgacaacccttattacaactactacgatacttatgaaaggcccagacctgggggcaggtaccggcccggatacggcactggctacttccagtacggtctcccagacctggtggccgacccctactacatccaggcgtccacgtacgtgcagaagatgtccatgtacaacctgagatgcgcggcggaggaaaactgtctggccagtacagcatacagggcagatgtcagagattatgatcacagggtgctgctcagatttccccaaagagtgaaaaaccaagggacatcagatttcttacccagccgaccaagatattcctgggaatggcacagttgtcatcaacattaccacagtatggatgagtttagccactatgacctgcttgatgccaacacccagaggagagtggctgaaggccacaaagcaagtttctgtcttgaagacacatcctgtgactatggctaccacaggcgatttgcatgtactgcacacacacagggattgagtcctggctgttatgatacctatggtgcagacatagactgccagtggattgatattacagatgtaaaacctggaaactatatcctaaaggtcagtgtaaaccccagctacctggttcctgaatctgactataccaacaatgttgtgcgctgtgacattcgctacacaggacatcatgcgtatgcctcaggctgcacaatttcaccgtattagaaggcaaagcaaaactcccaatggataaatcagtgcctggtgttctgaagtgggaaaaaatagactaacttcagtaggatttatgtattttgaaaaagagaacagaaaacaacaaaagaatttttgtttggactgttttcaataacaaagcacataactggattttgaacgcttaagtcatcattacttgggaaatttttaatgtttattatttacatcactttgtgaattaacacagtgtttcaattctgtaattacatatttgactctttcaaagaaatccaaatttctcatgttccttttgaaattgtagtgcaaaatggtcagtattatctaaatgaatgagccaaaatgactttgaactgaaacttttctaaagtgctggaactttagtgaaacataataataatgggtttatatatgtcatagcatagatgaatttagaaacaatgctcctactgtttaaatacatatggacacatctggtgctgagaaagaaacaaacacattaccattggtgtcaagaaatattactatatagcagagaaatggcaatacatgtactcagatagttacatccctatataaaaagtatgtttacatttaaaaaattagtagataacttcctttctttcaagtgcacaatttcattttgacttgagtcaacttttgttttggaacaaattaagtaagggagctgcccaatcctgtctgatatttcttgaggctgccctctatcattttatctttcccatgggcagagatgttgtaagtgggattcttaatatcaccattcttgggactggtatacataaggcagccgtgaaactggaaagtcattttgatgactgatgtgatacatccagaggtaaaatgcatttaaacatattaaagtatttgccaaagatacaattttcttgctgacataaaaatcacacaaacaagtcccccccaaaccacaactgtctctcaaatagcttaaaaaaattgaaaaacattttaggatttttcaagttttctagattttaaaaagatgttcagctattagaggaatgttaaaaattttatattatctagaacacaggaacatcatcctgggttattcaggaatcagtcacacatgtgtgtgtgtctgagatatagtctaaattagcaaagcacatagtattacatacttgaggggttggtgaacaaaggaaaaatatactttctgcaaaaccaaggactgtgctgcgtaatgagacagctgtgatttcatttgaaactgtgaaaccatgtgccataatagaattttgagaattttgcttttacctaaattcaagaaaatgaaattacacttttaagttagtggtgcttaagcataatttttcctatattaaccagtattaaaatctcaagtaagattttccagtgccagaacatgttaggtggaattttaaaagtgcctcggcatcctgtattacatgtcatagaattgtaaagtcaacatcaattactagtaatcattctgcactcactgggtgcatagcatggttagaggggctagagatggacagtcatcaactggcggatatagcggtacatatgatccttagccaccagggcacaagcttaccagtagacaatacagacagagcttttgttgagctgtaactgagctatggaatagcttctttgatgtacctctttgccttaaattgctttttagttctaagattgtagaatgatcctttcaaattgtaatcttttctaacagagatattttaatatacttgctttcttaaaaaacaaaaaaactactgtcagtattaatactgagccagactggcatctacagatttcagatctatcattttattgattcttaagcttgtattaaaaactaggcaatatcatcatggatacataggagaagacacatttacaatcattcattgggccttttatctgtctatccatccatcatcatttgaaggcctaatatatgccaagtactcacatggtatgcattgagacataaaaaagactgtctataacctcaataagtattaaaaatcccattattacccataaggttcatcttatttcatttttagggaataaaattacatgtctatgaaatttcaattttaagcactattgtttttcatgaccataatttatttttaaaaataaattaaaggttaattatatgcatgtatgtatttctaataattaaaaatgtgttcaatccctg

SEQ ID NO: 11627 - protein, 417 aa, Homo sapiens; identical to SEQ ID NO: 1104

SEQ ID NO: 11628 - DNA, 3816 bp, Homo sapiens
cgtgaacaaatagctgaggggcggccgggccagaacggcttgtgtaactttgcaaacgtgccagaaagtttaaaatctctcctccttccttcactccagacactgcccgctctccgggactgccgcgccgctccccgttgccttccaggactgagaaaggggaaagggaagggtgccacgtccgagcagccgccttgactggggaagggtctgaatcccacccttggcattgcttggtggagactgagatacccgtgctccgctcgcctccttggttgaagatttctccttccctcacgtgatttgagccccgtttttattttctgtgagccacgtcctcctcgagcggggtcaatctggcaaaaggagtgatgcgcttcgcctggaccgtgctcctgctcgggcctttgcagctctgcgcgctagtgcactgcgcccctcccgccgccggccaacagcagcccccgcgcgagccgccggcggctccgggcgcctggcgccagcagatccaatgggagaacaacgggcaggtgttcagcttgctgagcctgggctcacagtaccagcctcagcgccgccgggacccgggcgccgccgtccctggtgcagccaacgcctccgcccagcagccccgcactccgatcctgctgatccgcgacaaccgcaccgccgcggcgcgaacgcggacggccggctcatctggagtcaccgctggccgccccaggcccaccgcccgtcactggttccaagctggctactcgacatctagagcccgcgaagctggcgcctcgcgcgcggagaaccagacagcgccgggagaagttcctgcgctcagtaacctgcggccgcccagccgcgtggacggcatggtgggcgacgacccttacaacccctacaagtactctgacgacaacccttattacaactactacgatacttatgaaaggcccagacctgggggcaggtaccggcccggatacggcactggctacttccagtacggtctcccagacctggtggccgacccctactacatccaggcgtccacgtacgtgcagaagatgtccatgtacaacctgagatgcgcggcggaggaaaactgtctggccagtacagcatacagggcagatgtcagagattatgatcacagggtgctgctcagatttccccaaagagtgaaaaaccaagggacatcagatttcttacccagccgaccaagatattcctgggaatggcacagttgtcatcaacattaccacagtatggatgagtttagccactatgacctgcttgatgccaacacccagaggagagtggctgaaggccacaaagcaagtttctgtcttgaagacacatcctgtgactatggctaccacaggcgatttgcatgtactgcacacacacagggattgagtcctggctgttatgatacctatggtgcagacatagactgccagtggattgatattacagatgtaaaacctggaaactatatcctaaaggtcagtgtaaaccccagctacctggttcctgaatctgactataccaacaatgttgtgcgctgtgacattcgctacacaggacatcatgcgtatgcctcaggctgcacaatttcaccgtattagaaggcaaagcaaaactcccaatggataaatcagtgcctggtgttctgaagtgggaaaaaatagactaacttcagtaggatttatgtattttgaaaaagagaacagaaaacaacaaaagaatttttgtttggactgttttcaataacaaagcacataactggattttgaacgcttaagtcatcattacttgggaaatttttaatgtttattatttacatcactttgtgaattaacacagtgtttcaattctgtaattacatatttgactctttcaaagaaatccaaatttctcatgttccttttgaaattgtagtgcaaaatggtcagtattatctaaatgaatgagccaaaatgactttgaactgaaacttttctaaagtgctggaactttagtgaaacataataataatgggtttatatatgtcatagcatagatgaatttagaaacaatgctcctactgtttaaatacatatggacacatctggtgctgagaaagaaacaaacacattaccattggtgtcaagaaatattactatatagcagagaaatggcaatacatgtactcagatagttacatccctatataaaaagtatgtttacatttaaaaaattagtagataacttcctttctttcaagtgcacaatttcattttgacttgagtcaacttttgttttggaacaaattaagtaagggagctgcccaatcctgtctgatatttcttgaggctgccctctatcattttatctttcccatgggcagagatgttgtaagtgggattcttaatatcaccattcttgggactggtatacataaggcagccgtgaaactggaaagtcattttgatgactgatgtgatacatccagaggtaaaatgcatttaaacatattaaagtatttgccaaagatacaattttcttgctgacataaaaatcacacaaacaagtcccccccaaaccacaactgtctctcaaatagcttaaaaaaattgaaaaacattttaggatttttcaagttttctagattttaaaaagatgttcagctattagaggaatgttaaaaattttatattatctagaacacaggaacatcatcctgggttattcaggaatcagtcacacatgtgtgtgtgtctgagatatagtctaaattagcaaagcacatagtattacatacttgaggggttggtgaacaaaggaaaaatatactttctgcaaaaccaaggactgtgctgcgtaatgagacagctgtgatttcatttgaaactgtgaaaccatgtgccataatagaattttgagaattttgcttttacctaaattcaagaaaatgaaattacacttttaagttagtggtgcttaagcataatttttcctatattaaccagtattaaaatctcaagtaagattttccagtgccagaacatgttaggtggaattttaaaagtgcctcggcatcctgtattacatgtcatagaattgtaaagtcaacatcaattactagtaatcattctgcactcactgggtgcatagcatggttagaggggctagagatggacagtcatcaactggcggatatagcggtacatatgatccttagccaccagggcacaagcttaccagtagacaatacagacagagcttttgttgagctgtaactgagctatggaatagcttctttgatgtacctctttgccttaaattgctttttagttctaagattgtagaatgatcctttcaaattgtaatcttttctaacagagatattttaatatacttgctttcttaaaaaacaaaaaaactactgtcagtattaatactgagccagactggcatctacagatttcagatctatcattttattgattcttaagcttgtattaaaaactaggcaatatcatcatggatacataggagaagacacatttacaatcattcattgggccttttatctgtctatccatccatcatcatttgaaggcctaatatatgccaagtactcacatggtatgcattgagacataaaaaagactgtctataacctcaataagtattaaaaatcccattattacccataaggttcatcttatttcatttttagggaataaaattacatgtctatgaaatttcaattttaagcactattgtttttcatgaccataatttatttttaaaaataaattaaaggttaattat

SEQ ID NO: 11629 - protein, 417 aa, Homo sapiens; identical to SEQ ID NO: 1104

SEQ ID NO: 11630 - DNA, 1979 bp, Homo sapiens
cgtgaacaaatagctgaggggcggccgggccagaacggcttgtgtaactttgcaaacgtgccagaaagtttaaaatctctcctccttccttcactccagacactgcccgctctccgggactgccgcgccgctccccgttgccttccaggactgagaaaggggaaagggaagggtgccacgtccgagcagccgccttgactggggaagggtctgaatcccacccttggcattgcttggtggagactgagatacccgtgctccgctcgcctccttggttgaagatttctccttccctcacgtgatttgagccccgtttttattttctgtgagccacgtcctcctcgagcggggtcaatctggcaaaaggagtgatgcgcttcgcctggaccgtgctcctgctcgggcctttgcagctctgcgcgctagtgcactgcgcccctcccgccgccggccaacagcagcccccgcgcgagccgccggcggctccgggcgcctggcgccagcagatccaatgggagaacaacgggcaggtgttcagcttgctgagcctgggctcacagtaccagcctcagcgccgccgggacccgggcgccgccgtccctggtgcagccaacgcctccgcccagcagccccgcactccgatcctgctgatccgcgacaaccgcaccgccgcggcgcgaacgcggacggccggctcatctggagtcaccgctggccgccccaggcccaccgcccgtcactggttccaagctggctactcgacatctagagcccgcgaagctggcgcctcgcgcgcggagaaccagacagcgccgggagaagttcctgcgctcagtaacctgcggccgcccagccgcgtggacggcatggtgggcgacgacccttacaacccctacaagtactctgacgacaacccttattacaactactacgatacttatgaaaggcccagacctgggggcaggtaccggcccggatacggcactggctacttccagtacggtctcccagacctggtggccgacccctactacatccaggcgtccacgtacgtgcagaagatgtccatgtacaacctgagatgcgcggcggaggaaaactgtctggccagtacagcatacagggcagatgtcagagattatgatcacagggtgctgctcagatttccccaaagagtgaaaaaccaagggacatcagatttcttacccagccgaccaagatattcctgggaatggcacagttgtcatcaacattaccacagtatggatgagtttagccactatgacctgcttgatgccaacacccagaggagagtggctgaaggccacaaagcaagtttctgtcttgaagacacatcctgtgactatggctaccacaggcgatttgcatgtactgcacacacacagggattgagtcctggctgttatgatacctatggtgcagacatagactgccagtggattgatattacagatgtaaaacctggaaactatatcctaaaggtcagtgtaaaccccagctacctggttcctgaatctgactataccaacaatgttgtgcgctgtgacattcgctacacaggacatcatgcgtatgcctcaggctgcacaatttcaccgtattagaaggcaaagcaaaactcccaatggataaatcagtgcctggtgttctgaagtgggaaaaaatagactaacttcagtaggatttatgtattttgaaaaagagaacagaaaacaacaaaagaatttttgtttggactgttttcaataacaaagcacataactggattttgaacgcttaagtcatcattacttgggaaatttttaatgtttattatttacatcactttgtgaattaacacagtgtttcaattctgtaattacatatttgactctttcaaagaaatccaaatttctcatgttccttttgaaattgtagtgcaaaatggtcagtattatctaaatgaatgagccaaaatg

SEQ ID NO: 11631 - protein, 417 aa, Homo sapiens; identical to SEQ ID NO: 1104

SEQ ID NO: 11632 - DNA, 1902 bp, Homo sapiens
cgtgaacaaatagctgaggggcggccgggccagaacggcttgtgtaactttgcaaacgtgccagaaagtttaaaatctctcctccttccttcactccagacactgcccgctctccgggactgccgcgccgctccccgttgccttccaggactgagaaaggggaaagggaagggtgccacgtccgagcagccgccttgactggggaagggtctgaatcccacccttggcattgcttggtggagactgagatacccgtgctccgctcgcctccttggttgaagatttctccttccctcacgtgatttgagccccgtttttattttctgtgagccacgtcctcctcgagcggggtcaatctggcaaaaggagtgatgcgcttcgcctggaccgtgctcctgctcgggcctttgcagctctgcgcgctagtgcactgcgcccctcccgccgccggccaacagcagcccccgcgcgagccgccggcggctccgggcgcctggcgccagcagatccaatgggagaacaacgggcaggtgttcagcttgctgagcctgggctcacagtaccagcctcagcgccgccgggacccgggcgccgccgtccctggtgcagccaacgcctccgcccagcagccccgcactccgatcctgctgatccgcgacaaccgcaccgccgcggcgcgaacgcggacggccggctcatctggagtcaccgctggccgccccaggcccaccgcccgtcactggttccaagctggctactcgacatctagagcccgcgaagctggcgcctcgcgcgcggagaaccagacagcgccgggagaagttcctgcgctcagtaacctgcggccgcccagccgcgtggacggcatggtgggcgacgacccttacaacccctacaagtactctgacgacaacccttattacaactactacgatacttatgaaaggcccagacctgggggcaggtaccggcccggatacggcactggctacttccagtacggtctcccagacctggtggccgacccctactacatccaggcgtccacgtacgtgcagaagatgtccatgtacaacctgagatgcgcggcggaggaaaactgtctggccagtacagcatacagggcagatgtcagagattatgatcacagggtgctgctcagatttccccaaagagtgaaaaaccaagggacatcagatttcttacccagccgaccaagatattcctgggaatggcacagttgtcatcaacattaccacagtatggatgagtttagccactatgacctgcttgatgccaacacccagaggagagtggctgaaggccacaaagcaagtttctgtcttgaagacacatcctgtgactatggctaccacaggcgatttgcatgtactgcacacacacagggattgagtcctggctgttatgatacctatggtgcagacatagactgccagtggattgatattacagatgtaaaacctggaaactatatcctaaaggtcagtgtaaaccccagctacctggttcctgaatctgactataccaacaatgttgtgcgctgtgacattcgctacacaggacatcatgcgtatgcctcaggctgcacaatttcaccgtattagaaggcaaagcaaaactcccaatggataaatcagtgcctggtgttctgaagtgggaaaaaatagactaacttcagtaggatttatgtattttgaaaaagagaacagaaaacaacaaaagaatttttgtttggactgttttcaataacaaagcacataactggattttgaacgcttaagtcatcattacttgggaaatttttaatgtttattatttacatcactttgtgaattaacacagtgtttcaattctgtaattacatatttgactctttcaaag

SEQ ID NO: 11633 - protein, 417 aa, Homo sapiens; identical to SEQ ID NO: 1104

SEQ ID NO: 11634 - DNA, 488 bp, Homo sapiens
catccgttatctcaaatcttttaaccatcctacaagaactctttttgcccaacagaatgtggacagcagaactgctttataaattgggaggaaggcacacctggaagatggtgatgccagcacaatgggaaatgtgccagtgtgtagaattcttctctggtctttgtaaatagaaatgctcactttctatgtgaaacacctaaatgattcgatgccaaacgcagaataagtttaaaggtagaacaagcaaatagctaaacaagggagtgtttcagaaaggaaatatgtcaagccttggctcaaaagcaaaacagtcttttcatgaagggaagtgttcacagcatctattaaatgcatactcagtcacaaaaataaaacccatctgtttaatattaacatttgtaataaacattttaaaaaaaggaatgtagaaggcaaaaatgtattgtaaaacaaaatgtacactcttgggataactaaaacttcct

SEQ ID NO: 11635 - protein, 48 aa, Homo sapiens
MSSLGSKAKQSFHEGKCSQHLLNAYSVTKIKPICLILTFVINILKKGM

SEQ ID NO: 11636 - DNA, 730 bp, Homo sapiens
tactctgtgaatccagaccccacaggttatggaagaaaagcaacagacagaagatgggaaaaacaggtcacgtttataagaccagcttgaagaccatgccacactgaggagtttggtttttcgttaggcaaagaaactagctgttttttcttcaatgttcatcggaaaacttgcccagcagctgtgagtgactcttcagctttcgaatcattgtcttggaatcttctaaaccaggactttaaaaaatactgtaacggttaatattgagtgtcaacttgattggattgaaggatgcaaagtattgttcctgggtgtgtctgtgagggtgttgccaaaggagattaacattccagtcagtggactgggaaaggcagacccaccctcaatctgggtgggcaccatctaatcagctgccagtgtggccagaataaagcaggaaaatgtggaaggacttgacttgctgagtcttctggtcttcagctttctcccatgctggatgcttcctgccttagagcattggactccaggtcttcagcttttggactctcggacttacaccagtggtttgccaggggctctcaggcctttggacacagactgaaggctgcactgtcggcttccctacttttgaggttttgggcttccctactcctcagcttgcagatggcctattgtggaactttaccctgtgatcatgtgagtcaatacattttaataaacttcccatcat

SEQ ID NO: 11637 - protein, 79 aa, Homo sapiens
MLDASCLRALDSRSSAFGLSDLHQWFARGSQAFGHRLKAALSASLLLRFWASLLLSLQMAYCGTLPCDHVSQYILINFP

SEQ ID NO: 11638 - DNA, 1948 bp, Homo sapiens
aaagactgcggttcctgttactcagcagcctcaaaaactcacaccagctcctgcaaggaatgtgaatcttggagctcccagctattctgttcctgtttctgtcagctccttccctgaaaactcagaggtgctcagcatgccatgctaaaaggcaaaataaaaagatcttggagacatctcagctttaatgaggactttccaacattccagactgccgtcctgcaatgaagctctgagtcacggtctgtgaggctaaggtactggcaacggtgtgaaccccaggacaactaacctcactaaccttcactctaagcagaagcccaaagtgagtctggcctgaaatcagagcaagcactacagaaagacatctttgttaatggaaagaggaaagaagaaaagaatttccaataagttacaacaaacttttcaccattctaaagaacccactttccttatcaaccaagctgggcttctctctagtgactcctattctagcctttccccagaaacagagagtgttaatcctggtgaaaatataaagacagacactcagaaaaagagacctgggactgtgatactatcaaaactgtcaagtagaagaattatatcggaaagccagcttagcccccctgtgatcccggcccgcaggcctggattccgggtatgctatatctgtggccgagaatttgggtcccagtcaattgccattcatgaaccccagtgcttgcagaagtggcatattgaaaacagcaagttgcccaagcatttgaggaggccagaaccctccaaaccacagtctctcagcagcagtgggtcctacagtcttcaggcaactaacgaggctgcatttcagagtgcccaggctcagctgctgccctgtgaatcctgtggccgcacattcttgccagatcatcttcttgttcatcacagaagctgcaagccaaagggtgagggtcccagagcaccacactcaaacagttctgatcatcttactggcctcaagaaagcttgtagtggaaccccagcccgaccaaggactgttatctgctacatatgtggtaaggaatttggcaccctgtcccttcctattcatgagcccaaatgcctggaaaagtggaaaatggaaaatgaccggctccctgtggagctccaccagccactcccacagaagcctcagccccttccgaatgcacagtccagccaagcgggaccaaatcaagctcagcttgtgttctgcccacattgtagccgaatctttacctcagaccgcctcctggtacaccagagaagttgtaaaactcatccttatgggccaaaatatcagaatttgaatttagggagtaaaggaggcctaaaagagtacactaattccaagcagcaaaggaacagggcagcacccagtgtaactgataaggtaattcatgccacacaagacgcattaggtgaacctggtggtgccctctgcctgtaggggaacaagagaaaactatccccagaatcagccacctcagcccctagtattttttctatcaatgccttgtatcagcctcaaagcagcctgttcaagttaactccctgttgaactccagggcctatacctctcttggctgaatagatataagaacatccttgcctgatgggttcatattcctcttcaattctgctgtctaaaagaagaagagatggacttctttcttccctgatccctgatacaaataatccctgggagagacagtaatttgaaaatgagtcattaatgctgtgtctacattacagagatataattcccattccaacagccaatatttattgtcggtttattttagtcatctaccttaggaattcatttttggcaatgctgggttatgctgagtttatcttactaaaatagaatctgtgtcaaaaacccccaatgactttagcaacaattaaacactgaagcacttgc

SEQ ID NO: 11639 - protein, 364 aa, Homo sapiens; identical to SEQ ID NO: 1106

SEQ ID NO: 11640 - DNA, 426 bp, Homo sapiens
agatttgatagaaggatcacaggagcatctgtatcataagggacctgagccaatctattttggagaaacattctgagggaaagaccccacaggttatggaagaaaagcaacagacagaagatgggaaaaacaggtcacgtttataagaccagcttgaagaccatgccacactgaggagtttggtttttcgttaggcaaagaaactagctgttttttcttcaatgttcatcggaaaacttgcccagcagctgtgagtgactcttcagctttcgaatcattgtcttggaatcttctaaaccagtaagaccatacttattttattttaaacatggaatttaggagcaaaggactagacagtcctcaaagtaataaaataaaaaagaaagaaaaatcatattagaaataaagaatgccgcctccccaacc

SEQ ID NO: 11641 - protein, 48 aa, Homo sapiens
RPCHTEEFGFSLGKETSCFFFNVHRKTCPAAVSDSSAFESLSWNLLNQ

SEQ ID NO: 11642 - DNA, 1049 bp, Homo sapiens
ggaagtccgaaatcaaggtaccagcaggatttttatgaacttgtgaggaatgctctacttccaagatgtgtggaatggtggaagacaaacattcaggatcttggctagagaaaacctgtgggaggaagatatttcagctaagacataaaaggtgtgaaagcactagccaagaggaaacatgtggaggaagggaatggttagagaaaaagacattcggatcaatggcagcatgtatgaaggtcctgagtggtcctagttcacctcctcagctgtgctgatgtcatgaaaaccagccttgacctcacaaactaccccttgatgatgctgaccgctggactactaatatccaactgcctgtgtcatttcttcatctttccttggtgccaaccatgcctgcatatcagggcagcattctatgatcccatggctctcacatcgacagaccacaacactaaggttaaaaggaacaaaagaaaactccaaatcacaagtaacagactcttttatggttggccaatagacagaccggattgggaaattcttttacacggcatccagtgatttccaaaaacaatttaatttcaaacaacgatccttccagatatgacatttgggaagaattgtttaaaaacaccagaagtaaatgtgaaataccagtggtttctagacaatcaaactctgcaattgttaagaagcaactggaatcagacagacctggattcagatcatagatgcacagttaaatcaaatacctttgaacaagttacttaacctccccaagcctcagtttctaccataagaggttggaatgagaggatgactgcaaaggacctgggatggtgcctaacaaaactttatctgtcagcttctccctgccacttcacaggagacccaactctctgcaacagaaaccagcttttccacttagtaatcactgtgtgctttagtttcctggtttataaaataggggcattgagctctgcccagagggttattatgagaacaaatgaaataaagcatgtaaagtgtttagtacagggcctgttagt

SEQ ID NO: 11643 - protein, 92 aa, Homo sapiens
MKTSLDLTNYPLMMLTAGLLISNCLCHFFIFPWCQPCLHIRAAFYDPMALTSTDHNTKVKRNKRKLQITSNRLFYGWPIDRPDWEILLHGIQ

SEQ ID NO: 11644 - DNA, 439 bp, Homo sapiens
atctttccttggtgccaaccatgcctgcatatcagggcagcattctatgatcccatggctctcacatcgacagaccacaacactaagccaacaatgatacggcgtccaccagcagttgtttgctacatttgtggtcgtgaatatggaacaaaatctattagcattcatgagccacaatgtctgaaaaaatggcataatgaaaacaacttgttgcctaaagagttaaggagaccagtacctaaaaaaccagaagtcaggaccattactgccaaaggcttctatgatcttgatgctttaaatgaagctgcttggacaagtgcccacagccagttggttccctgtaatgtttgtgggcgtaccttcctgccagacagactgattgttcaccaacgatcttgtaaacccaaagccgccaagtaaagcccttttctctctactg

SEQ ID NO: 11645 - protein, 121 aa, Homo sapiens
MALTSTDHNTKPTMIRRPPAVVCYICGREYGTKSISIHEPQCLKKWHNENNLLPKELRRPVPKKPEVRTITAKGFYDLDALNEAAWTSAHSQLVPCNVCGRTFLPDRLIVHQRSCKPKAAK

SEQ ID NO: 11646 - DNA, 482 bp, Homo sapiens
caaccatgcctgcatatcagggcagcattctatgatcccatggctctcacatcgacagaccacaacactaagccaacaatgatacggcgtccaccagcagttgtttgctacatttgtggtcgtgaatatggaacaaaatctattagcattcatgagccacaatgtctgaaaaaatggcataatgaaaacaacttgttgcctaaagagttaaggagaccagtacctaaaaaaccagaagtcaggaccattactgacaaataagaaaaacagttctgaaatgcctgtccaaagaattatcttctgatgctgagacataaagacactatgtcctggcaacactgtgcatgagagggacctatgggaatttgctgtattctccaaaagtttctttcatacatcatcaaaccctttgaatgtaaaataaataataaaatacttaaaaaataaaaatgaataaaacttaaaaaaatatgaaacttaaa

SEQ ID NO: 11647 - protein, 73 aa, Homo sapiens
MALTSTDHNTKPTMIRRPPAVVCYICGREYGTKSISIHEPQCLKKWHNENNLLPKELRRPVPKKPEVRTITDK

SEQ ID NO: 11648 - DNA, 8192 bp, Homo sapiens
ggcagttagggcaactggaaggctgggagctgaaatcacctgaagtctcattcactcacatgtctgatggttgatattgtctatcagattcttttttgtctccttctctgcaagaggctggcaccagatcacctcctgagtagagcagacattccaaaggatgtcctgccaacaataatggaaagctggatacaactgaatatgtaaaatgatgttaatgaagaattgaagagcactgtatctagttttctgctctccccttattttgaatcaaacccaggcatcctatcatttcatctataaagactttagttcctaaaagtggaattgctggatcaaagggtaaaggcataggcaattctagagcatttagatttaatgtgatggacaggaatgaaccatgaagccacgagtgtttgatttttaaattgtgatattccactaaatgagaaatgaccaggacttcacagagatttcatgaaaggagggccacaaaggaagaacccagagcaggccggtgagaggcactctaagagctttccaatatccgtcttcggagcgcacgggaatccgccgagctctgcgtgcaggcccttttttcttttgaggttcacattttttgaaattttacgccagggcttttgtaatttcctcccccgcccgctgacggtcctggagtcgctcggggctttaggccggttatgcaacgtgtaccgctcggggctgccggctgcacctccgccgcgcctcgccgctcactgcgctagacccggcgccccgcgtctcgcttcgcgggcagtcagggggccggcgctctgtcgaggtctccagctagagcagggagcccgagcccgagggagtccccggagccgacgaagggcttattagaccctgactcttttctgaggcgcgcagattttgtctttgatcactccctctccgcgggtctacggccgcgcgctttcggcgccggcgatggggagaagacggaggctgtgtctccagctctacttcctgtggctgggctgtgtggtgctctgggcgcagggcacggccggccagcctcagcctcctccgcccaagccgccccggccccagccgccgccgcaacaggttcggtccgctacagcaggctctgaaggcgggtttctagcgcccgagtatcgcgaggagggtgccgcagtggccagccgcgtccgccggcgaggacagcaggacgtgctccgagggcccaacgtgtgcggctccagattccactcctactgctgccctggatggaagacgctccctggaggaaaccagtgcattgtcccgatttgtagaaatagttgtggagatggattttgttcccgtcctaacatgtgtacttgttccagtgggcaaatatcatcaacctgtggatcaaaatcaattcagcagtgcagtgtgagatgcatgaatggtgggacctgtgcagatgaccactgccagtgccagaaaggatatattggaacttattgtggacaacctgtctgtgaaaatggatgtcagaatggtggacgttgcatcggacccaaccgctgtgcttgtgtttatgggttcactggtccacagtgtgaaagagattacaggacaggcccgtgtttcactcaggtcaacaaccagatgtgccaagggcagctgacaggcattgtctgcacgaagactctgtgctgtgccaccattggacgggcgtggggccatccctgtgagatgtgtccagcccagcctcagccctgccgacggggtttcatccccaacatccgcactggagcttgccaagatgttgatgaatgccaggctatcccagggatatgccaaggaggaaactgtatcaatacagtgggctcttttgaatgcagatgccctgctggtcacaaacagagtgaaactactcagaaatgtgaagacattgatgagtgcagcatcattcctgggatatgtgaaactggtgaatgttccaacaccgtgggaagctatttttgtgtttgtccacgtggatatgtaacctcaacagatggctctcgatgcatcgatcagagaacaggcatgtgtttctcgggcctggtgaatggccgctgtgcacaagagctcccggggagaatgacgaaaatgcagtgctgctgtgagcctggccgctgctggggcatcggaaccattcctgaagcctgtcctgtcagaggttctgaggaatatcgcagactttgcatggatggacttccaatgggaggaattccagggagtgctggttccagacctggaggcactgggggaaatggctttgccccaagtggcaatggcaatggctatggcccaggagggacaggcttcatccccatccctggaggcaatggcttttctcctggcgttgggggagccggtgtgggggccgggggacagggacctatcatcactggactaacaattctgaaccagacaatagatatctgtaagcatcatgctaacctttgtttaaatggacgctgtataccaactgtctcaagctaccgatgtgaatgcaacatgggttataagcaggatgcaaatggagattgtatagatgttgatgaatgcacatcaaatccctgcactaatggagattgtgttaacacacctggttcctattattgtaaatgtcatgctggattccagaggactcctaccaagcaagcatgcattgatattgatgagtgcatccagaatggggttctttgtaaaaacggtcgatgcgtgaacacagatggaagtttccagtgcatttgcaatgccggctttgaattaactacagatggaaaaaactgtgttgatcatgatgaatgtacaactaccaacatgtgtttgaatggaatgtgcatcaatgaagatggcagcttcaagtgcatctgcaaaccaggatttgtcttggctccaaatgggcgttactgtactgatgttgatgaatgccagaccccaggaatctgcatgaatgggcactgcatcaacagtgaagggtccttccgctgtgactgtcccccaggcctggctgtgggcatggatggacgtgtgtgtgttgatactcacatgcgcagtacctgctatggaggaatcaagaaaggagtgtgtgtgcgtcctttccccggtgcagtgaccaagtccgaatgctgctgtgccaatccagactatggttttggagaaccctgccagccatgccctgcaaaaaattcagctgaattccacggcctttgtagtagtggagtaggtatcactgtggatggaagagatatcaatgaatgtgctttggatcctgatatatgtgccaatgggatttgtgaaaacttacgtggtagttaccgttgtaattgcaacagtggctatgaaccagatgcctctggaagaaactgtattgacattgatgaatgtttagtaaacagactgctttgtgataacggattgtgccgaaacacgccaggaagttacagctgtacgtgcccaccagggtatgtgttcaggactgagacagagacctgtgaagatataaatgaatgtgaaagcaacccatgtgtcaatggggcctgcagaaacaaccttggatctttcaattgtgaatgttcgcccggcagcaaactcagctccacaggattgatctgtattgacagcctgaaggggacctgttggctcaacatccaggacagccgctgtgaggtgaatattaatggagccactctgaaatctgaatgctgtgccaccctcggagccgcctgggggagcccctgtgagcggtgtgaactagatacagcttgcccaagagggcttgccaggattaaaggtgttacgtgtgaagatgttaatgagtgtgaggtgttccctggcgtttgtccaaatggacgctgtgtcaacagtaagggatcttttcattgcgagtgccctgaaggccttacgttggatgggactggccgtgtatgtttggatattcgcatggagcagtgttacttgaagtgggatgaagatgaatgcatccaccccgttcctggaaagttccgcatggatgcctgctgctgtgctgtcggggcggcttggggcaccgagtgtgaggagtgccccaaacctggcaccaaggaatacgagacgctgtgcccccgcggggctggctttgctaaccgaggggatgttcttactgggcggccattttacaaagacatcaatgaatgcaaagcatttcctgggatgtgcacttatgggaagtgcagaaatacaatcggaagcttcaaatgccgttgcaatagtggctttgctctagacatggaggaaagaaactgcacggacatcgacgagtgcaggatttctcctgacctctgtggcagtggaatctgcgtcaatacaccgggcagctttgagtgcgagtgcttcgaaggctatgaaagtggcttcatgatgatgaagaactgcatggacattgacgaatgtgaacgtaaccctctcctttgtaggggtggcacctgtgtgaacactgagggcagctttcagtgtgactgcccactgggacacgagctgtcaccatcccgtgaggactgtgtggatattaatgaatgctccctgagtgacaatctctgcagaaatggaaaatgtgtgaacatgattggaacctatcagtgctcttgcaatcctggatatcaggctacgccagaccgccagggctgtacagatattgatgaatgtatgataatgaacggaggctgtgacacccagtgcacaaattcagagggaagctacgaatgcagctgcagtgagggttatgccctgatgccagatgggagatcgtgtgcagacattgatgaatgtgaaaacaatcctgatatctgtgatggcggccagtgtaccaacattcctggagagtatcgctgcctctgctatgatggcttcatggcttccatggacatgaaaacatgcattgatgtcaatgaatgtgacctaaattcaaatatctgcatgtttggggaatgtgagaacacaaagggatccttcatttgccactgtcagctgggttactcagtgaagaaggggaccacaggatgtacagatgtggatgagtgtgaaattggtgctcataactgcgacatgcatgcctcatgtctgaatatcccaggaagcttcaagtgtagctgcagagaaggctggattggaaacggcatcaagtgtattgatctggacgaatgttctaatggaacccaccagtgtagcatcaatgctcagtgtgtaaataccccgggctcataccgctgtgcctgctccgaaggtttcactggtgatggctttacctgctcagatgttgatgagtgtgcagaaaacataaacctctgtgagaacggacagtgccttaatgtcccgggtgcatatcgctgcgagtgtgagatgggcttcactccagcctcagacagcagatcctgccaagatattgatgaatgctccttccaaaacatttgtgtctttggaacatgtaataacctgcctggaatgtttcattgcatctgcgatgatggttatgaattggacagaacaggagggaactgtacagatattgatgagtgtgcagatcctataaactgtgtcaatggcctatgtgtcaacacgcctggtcgctatgagtgtaactgcccacccgattttcagttgaacccaactggtgtgggttgtgttgacaaccgtgtgggcaactgctacctgaagtttggacctcgaggagatgggagtctgtcttgcaacaccgagatcggggtgggcgtcagtcgctcttcatgctgctgctctctgggaaaggcctggggaaacccctgtgagacatgcccccctgtcaatagcactgaatattacaccctgtgtcccggaggtgaaggcttcagacctaaccccatcacaatcattttagaagacattgacgaatgccaggagttaccaggtctctgccagggtggaaactgcatcaacacttttgggagcttccagtgtgagtgcccacaaggctactacctcagcgaggatacccgcatctgtgaagatattgatgagtgttttgcacatcctggtgtgtgtgggcctgggacctgctataacaccctgggaaattacacctgcatttgcccacctgagtacatgcaggtcaatggaggccacaactgcatggacatgagaaaaagcttttgctaccgaagctataatggaaccacttgtgagaatgagttgcctttcaatgtgacaaaaaggatgtgctgctgcacatataatgtgggcaaagcctggaacaaaccttgtgaaccatgcccaactccaggaacagctgactttaaaaccatatgtggaaatattcctggattcacctttgacattcacacaggaaaagctgttgacattgatgaatgtaaagagattccaggcatttgtgcaaatggtgtgtgcattaaccagattggcagtttccgctgtgaatgccctacaggattcagttacaatgacctgctgttggtttgtgaagatatagatgagtgcagcaatggtgataatctctgccagcggaatgcagactgcatcaatagtcctggtagttaccgctgtgaatgtgccgcgggtttcaaactttcacccaatggggcctgtgtagatcgcaatgaatgtttagaaattcctaacgtttgcagtcatggcttgtgtgttgatctgcaaggaagttaccagtgcatctgccacaatggctttaaggcttctcaggaccagaccatgtgcatggatgttgatgagtgcgagcggcatccatgtggaaatggaacttgtaaaaacaccgttggatcctataactgtctgtgctacccagggtttgaactcactcataataatgattgcctggacatagatgagtgcagttccttttttggtcaggtgtgcagaaatggacgttgttttaatgaaattggttctttcaagtgtctatgtaacgaaggttatgaacttaccccagatggcaaaaactgtatagacactaatgagtgtgtcgcccttcccggctcttgctctcctggtacctgtcagaatttggagggatccttcagatgcatctgtcccccagggtatgaagtaaaaagcgagaactgcattgatataaatgaatgtgatgaagatcccaacatttgtctttttggttcctgtactaatactccagggggcttccagtgcctctgcccccctggctttgtactatctgataatggacggagatgctttgatactcgccagagcttctgcttcacaaattttgaaaatggaaagtgttctgtacccaaagctttcaacaccacaaaagcaaaatgctgctgtagtaagatgccaggagagggctggggggacccctgtgagctgtgccccaaagacgatgaagttgcatttcaggatttgtgtccatatggccatggaactgtccctagtcttcatgatacacgtgaagatgtcaatgagtgtcttgagagcccaggcatttgttcaaatggtcaatgtatcaacaccgacggatcttttcgctgtgaatgtccaatgggctacaaccttgactacactggagtacgctgtgtggatactgatgagtgttcaatcggcaatccgtgtggaaatggtacatgcaccaatgttattgggagttttgaatgcaattgcaatgaaggctttgagccagggcccatgatgaattgtgaagatatcaacgaatgtgcccagaacccactgctgtgtgctttccgctgcatgaacacttttgggtcctatgaatgcacgtgcccgattggctatgccctcagggaagatcaaaagatgtgcaaagatctggatgaatgtgctgaagggttacacgactgtgaatctaggggcatgatgtgtaagaatctaatcggcaccttcatgtgcatctgccctcctggaatggcccgaaggcccgatggagaaggctgtgtagatgaaaatgaatgcaggaccaagccaggaatctgtgaaaatggacgttgtgttaacattattggaagctatagatgtgagtgtaatgaaggattccagtcaagttcttcaggcactgaatgccttgacaatcgacagggtctctgctttgcagaggtactgcagacaatatgtcaaatggcatccagtagtcgcaatctcgtcac

SEQ ID NO: 11649 - protein, 2912 aa, Homo sapiens; identical to SEQ ID NO: 1108

SEQ ID NO: 11650 - DNA, 8192 bp, Homo sapiens; identical to SEQ ID NO: 11648

SEQ ID NO: 11651 - protein, 2912 aa, Homo sapiens; identical to SEQ ID NO: 1108

SEQ ID NO: 11652 - DNA, 742 bp, Homo sapiens
acagatggaagtttccagtgcatttgcaatgccggctttgaattaactacagatggaaaaaactgtgttgatcatgatgaatgtacaactaccaacatgtgtttgaatggaatgtgcatcaatgaagatggcagcttcaagtgcatctgcaaaccaggatttgtcttggctccaaatgggcgttactgtactgatgttgatgaatgccagaccccaggaatctgcatgaatgggcactgcatcaacagtgaagggtccttccgctgtgactgtcccccaggcctggctgtgggcatggatggacgtgtgtgtgttgatactcacatgcgcagtacctgctatggaggaatcaagaaaggagtgtgtgtgcgtcctttccccggtgcagtgaccaagtccgaatgctgctgtgccaatccagactatggttttggagaaccctgccagccatgccctgcaaaaaattcagctgaattccacggcctttgtagtagtggagtaggtatcactgtggatggaagagtacagcctttccagcagagccagcctctattggaaactacttgatcattcatacaagcacatcagtgcacaagttccactgcccctcggtgatatagtagtagtagtcatgttcacggctcgttataaaacgtcatgttctgaagcatccatgtttaaagtgtcctctccagtaatttcaagtatcagcaatgagaaacacttattaaatattagtaac

SEQ ID NO: 11653 - protein, 156 aa, Homo sapiens
MCLNGMCINEDGSFKCICKPGFVLAPNGRYCTDVDECQTPGICMNGHCINSEGSFRCDCPPGLAVGMDGRVCVDTHMRSTCYGGIKKGVCVRPFPGAVTKSECCCANPDYGFGEPCQPCPAKNSAEFHGLCSSGVGITVDGRVQPFQQSQPLLETT

SEQ ID NO: 11654 - DNA, 2233 bp, Homo sapiens
ggcagttagggcaactggaaggctgggagctgaaatcacctgaagtctcattcactcacatgtctgatggttgatattgtctatcagattcttttttgtctccttctctgcaagaggctggcaccagatcacctcctgagtagagcagacattccaaaggatgtcctgccaacaataatggaaagctggatacaactgaatatgtaaaatgatgttaatgaagaattgaagagcactgtatctagttttctgctctccccttattttgaatcaaacccaggcatcctatcatttcatctataaagactttagttcctaaaagtggaattgctggatcaaagggtaaaggcataggcaattctagagcatttagatttaatgtgatggacaggaatgaaccatgaagccacgagtgtttgatttttaaattgtgatattccactaaatgagaaatgaccaggacttcacagagatttcatgaaaggagggccacaaaggaagaacccagagcaggccggtgagaggcactctaagagctttccaatatccgtcttcggagcgcacgggaatccgccgagctctgcgtgcaggcccttttttcttttgaggttcacattttttgaaattttacgccagggcttttgtaatttcctcccccgcccgctgacggtcctggagtcgctcggggctttaggccggttatgcaacgtgtaccgctcggggctgccggctgcacctccgccgcgcctcgccgctcactgcgctagacccggcgccccgcgtctcgcttcgcgggcagtcagggggccggcgctctgtcgaggtctccagctagagcagggagcccgagcccgagggagtccccggagccgacgaagggcttattagaccctgactcttttctgaggcgcgcagattttgtctttgatcactccctctccgcgggtctacggccgcgcgctttcggcgccggcgatggggagaagacggaggctgtgtctccagctctacttcctgtggctgggctgtgtggtgctctgggcgcagggcacggccggccagcctcagcctcctccgcccaagccgccccggccccagccgccgccgcaacaggttcggtccgctacagcaggctctgaaggcgggtttctagcgcccgagtatcgcgaggagggtgccgcagtggccagccgcgtccgccggcgaggacagcaggacgtgctccgagggcccaacgtgtgcggctccagattccactcctactgctgccctggatggaagacgctccctggaggaaaccagtgcattgtcccgatttgtagaaatagttgtggagatggattttgttcccgtcctaacatgtgtacttgttccagtgggcaaatatcatcaacctgtggatcaaaatcaattcagcagtgcagtgtgagatgcatgaatggtgggacctgtgcagatgaccactgccagtgccagaaaggatatattggaacttattgtggacaacctgtctgtgaaaatggatgtcagaatggtggacgttgcatcggacccaaccgctgtgcttgtgtttatgggttcactggtccacagtgtgaaagagattacaggacaggcccgtgtttcactcaggtcaacaaccagatgtgccaagggcagctgacaggcattgtctgcacgaagactctgtgctgtgccaccattggacgggcgtggggccatccctgtgagatgtgtccagcccagcctcagccctgccgacggggtttcatccccaacatccgcactggagcttgccaagatgttgatgaatgccaggctatcccagggatatgccaaggaggaaactgtatcaatacagtgggctcttttgaatgcagatgccctgctggtcacaaacagagtgaaactactcagaaatgtgaagacattgatgagtgcagcatcattcctgggatatgtgaaactggtgaatgttccaacaccgtgggaagctatttttgtgtttgtccacgtggatatgtaacctcaacagatggctctcgatgcatcgatttgttcaggatccccccgacctgctgccgtgaactcgattctctttctcctatttgttaagaagttatgtactttatttctgttgcttcagtggctatcctagctgttttaagatgcatatttaaaattacctgtatgtttgcctatatataaataataaaagaatatttaagtggtt

SEQ ID NO: 11655 - protein, 379 aa, Homo sapiens
MGRRRRLCLQLYFLWLGCVVLWAQGTAGQPQPPPPKPPRPQPPPQQVRSATAGSEGGFLAPEYREEGAAVASRVRRRGQQDVLRGPNVCGSRFHSYCCPGWKTLPGGNQCIVPICRNSCGDGFCSRPNMCTCSSGQISSTCGSKSIQQCSVRCMNGGTCADDHCQCQKGYIGTYCGQPVCENGCQNGGRCIGPNRCACVYGFTGPQCERDYRTGPCFTQVNNQMCQGQLTGIVCTKTLCCATIGRAWGHPCEMCPAQPQPCRRGFIPNIRTGACQDVDECQAIPGICQGGNCINTVGSFECRCPAGHKQSETTQKCEDIDECSIIPGICETGECSNTVGSYFCVCPRGYVTSTDGSRCIDLFRIPPTCCRELDSLSPIC

SEQ ID NO: 11656 - DNA, 1965 bp, Homo sapiens
gccgcatcttctccagcgcccagcctcccgccctctctcttgctggccgcacgccccggccccgcgcacctccgcccggctccgcagccgctacccgcgcttcgttgccctgtgggactccgagcgagcccggagggaaccctcctcttcttctgggggcgacttttgtttgcttgcctgtttctttctggtgacttttgcagctttccaatatccgtcttcggagcgcacgggaatccgccgagctctgcgtgcaggcccttttttcttttgaggttcacattttttgaaattttacgccagggcttttgtaatttcctcccccgcccgctgacggtcctggagtcgctcggggctttaggccggttatgcaacgtgtaccgctcggggctgccggctgcacctccgccgcgcctcgccgctcactgcgctagacccggcgccccgcgtctcgcttcgcgggcagtcagggggccggcgctctgtcgaggtctccagctagagcagggagcccgagcccgagggagtccccggagccgacgaagggcttattagaccctgactcttttctgaggcgcgcagattttgtctttgatcactccctctccgcgggtctacggccgcgcgctttcggcgccggcgatggggagaagacggaggctgtgtctccagctctacttcctgtggctgggctgtgtggtgctctgggcgcagggcacggccggccagcctcagcctcctccgcccaagccgccccggccccagccgccgccgcaacaggttcggtccgctacagcaggctctgaaggcgggtttctagcgcccgagtatcgcgaggagggtgccgcagtggccagccgcgtccgccggcgaggacagcaggacgtgctccgagggcccaacgtgtgcggctccagattccactcctactgctgccctggatggaagacgctccctggaggaaaccagtgcattgtcccgatttgtagaaatagttgtggagatggattttgttcccgtcctaacatgtgtacttgttccagtgggcaaatatcatcaacctgtggatcaaaatcaattcagcagtgcagtgtgagatgcatgaatggtgggacctgtgcagatgaccactgccagtgccagaaaggatatattggaacttattgtggacaacctgtctgtgaaaatggatgtcagaatggtggacgttgcatcggacccaaccgctgtgcttgtgtttatgggttcactggtccacagtgtgaaagagattacaggacaggcccgtgtttcactcaggtcaacaaccagatgtgccaagggcagctgacaggcattgtctgcacgaagactctgtgctgtgccaccattggacgggcgtggggccatccctgtgagatgtgtccagcccagcctcagccctgccgacggggtttcatccccaacatccgcactggagcttgccaagatgttgatgaatgccaggctatcccagggatatgccaaggaggaaactgtatcaatacagtgggctcttttgaatgcagatgccctgctggtcacaaacagagtgaaactactcagaaatgtgaagtccatgtggataaagcacaagcaggagccagatgtccttgcgtgatcctcccttccagactataccttcgttaacattccttgagctagttattctttcctggcttacatgggaggcagaaaaagaacatcattgtattggaaagtttcccttaaatggctctttatgtggcagatagttgtttgcaatttagtttgaagagttttcagctttgttccattaacacagcattttgttgtttgagacttgtgacaacaaatatatttatttaggctcatgaaactcataaaagttgttggcacagtctcctctgctgctgttccaactctgcttagataaaccatggaaaataaactttctgtactaaactg

SEQ ID NO: 11657 - protein, 341 aa, Homo sapiens
MGRRRRLCLQLYFLWLGCVVLWAQGTAGQPQPPPPKPPRPQPPPQQVRSATAGSEGGFLAPEYREEGAAVASRVRRRGQQDVLRGPNVCGSRFHSYCCPGWKTLPGGNQCIVPICRNSCGDGFCSRPNMCTCSSGQISSTCGSKSIQQCSVRCMNGGTCADDHCQCQKGYIGTYCGQPVCENGCQNGGRCIGPNRCACVYGFTGPQCERDYRTGPCFTQVNNQMCQGQLTGIVCTKTLCCATIGRAWGHPCEMCPAQPQPCRRGFIPNIRTGACQDVDECQAIPGICQGGNCINTVGSFECRCPAGHKQSETTQKCEVHVDKAQAGARCPCVILPSRLYLR

SEQ ID NO: 11658 - DNA, 1164 bp, Homo sapiens
caggctctgaaggcgggtttctagcgcccgagtatcgcgaggagggtgccgcagtggccagccgcgtccgccggcgaggacagcaggacgtgctccgagggcccaacgtgtgcggctccagattccactcctactgctgccctggatggaagacgctccctggaggaaaccagtgcattgtcccgatttgtagaaatagttgtggagatggattttgttcccgtcctaacatgtgtacttgttccagtgggcaaatatcatcaacctgtggatcaaaatcaattcagcagtgcagtgtgagatgcatgaatggtgggacctgtgcagatgaccactgccagtgccagaaaggatatattggaacttattgtggacaacctgtctgtgaaaatggatgtcagaatggtggacgttgcatcggacccaaccgctgtgcttgtgtttatgggttcactggtccacagtgtgaaagagattacaggacaggcccgtgtttcactcaggtcaacaaccagatgtgccaagggcagctgacaggcattgtctgcacgaagactctgtgctgtgccaccattggacgggcgtggggccatccctgtgagatgtgtccagcccagcctcagccctgccgacggggtttcatccccaacatccgcactggagcttgccaagatgttgatgaatgccaggctatcccagggatatgccaaggaggaaactgtatcaatacagtgggctcttttgaatgcagatgccctgctggtcacaaacagagtgaaactactcagaaatgtgaaggtgagtctctctactttgggaagcatgcctaattgtgactttaatgcaagaaaaacaggacttcatttgaaattttgaagactactggtcacaattaaaactctttatctactatgaaagcataggtttaagcctagagtagttctgtgtttgtgtattgtagccttagtgggtttgatttgaaaagagtcaatgagcatttgcatctagtttgttatctcagttgtgttgcattgagaatgggagtaatccagccatttatgtttcttcttaataaagtaggtttccatttcacttataaagttatatcaaaaacgaaaattgagatagaaataagaagtccaagtgaaatacagtatcatgtgt

SEQ ID NO: 11659 - protein, 199 aa, Homo sapiens
MCTCSSGQISSTCGSKSIQQCSVRCMNGGTCADDHCQCQKGYIGTYCGQPVCENGCQNGGRCIGPNRCACVYGFTGPQCERDYRTGPCFTQVNNQMCQGQLTGIVCTKTLCCATIGRAWGHPCEMCPAQPQPCRRGFIPNIRTGACQDVDECQAIPGICQGGNCINTVGSFECRCPAGHKQSETTQKCEGESLYFGKHA

SEQ ID NO: 11660 - DNA, 324 bp, Homo sapiens
tgttcaggctctgaatgggttggatgatgccctcccatattgcggtggccaatatgctttactcagtctacagattcaaatgctaatctcttctggaaacaaactcacagacacactcaaaaataatgtttaactagatatctggacatccggtgtcaaggttgaagaagaaataaagaagcacggaagtaataacatgggattatcagaaaacctgactgattgtgctgctgctggcaatggtgatgatggactaattccacaaagagcagaaaacctgaaaatcagcaatttcctaggacggagaatgaagagtatcatagg

SEQ ID NO: 11661 - protein, 41 aa, Homo sapiens
MGLSENLTDCAAAGNGDDGLIPQRAENLKISNFLGRRMKSI

SEQ ID NO: 11662 - DNA, 286 bp, Homo sapiens
caggctggaaagccggcgcagggaggtcacctttgatgtagacatcgtcgtcggcgcgcatgaaccactcatacttgtccagaaatcagcatgagaagatgatcaaaattcatatattgaaacatgaaaaggctctgaatgggttggatgatgccctcccatattgcggtggccaatatgctttactcagtctacagattcaaatgctaatctcttctggaaacaaactcacagacacactcaaaaataatgtttaactagatatctggacatccggtgctcaagg

SEQ ID NO: 11663 - protein, 65 aa, Homo sapiens
MNHSYLSRNQHEKMIKIHILKHEKALNGLDDALPYCGGQYALLSLQIQMLISSGNKLTDTLKNNV

SEQ ID NO: 11664 - DNA, 3850 bp, Homo sapiens
gggtggcagcctaggagcggacgcgttgccgccgccgctgctcctcctcctcctcctgcagctcctccagctgccgctgctgccgccgctgccgccaccgccgccgccgggagaagtttcactcccgacccttgctcggagccccggcccagagctgagcgggagcccggcaggcagctgcagcccgcggcagtcgaggcgtccgcggcgcttcgacctccagccggtgtcggcgcctaggcggccggctgcggccgcggctgggggcgcaaaggcggaggaggggcgggtgtgagccggggaaaccgcgtgccgcgccgcgacagcccagcgagcgtccgcgcccgggacagccgcgatggctgtgcgctctcgccgcccgtggatgagcgtggcattagggctggtgctgggcttcaccgccgcgtcctggctcatcgcccccagggtggcggagctgagcgagaggaagagacgtggctccagcctctgctcctactacggtcgctctgctgctggcccccgcgccggcgctcagcagccgctcccccagccccagtcccgaccacggcaggagcagtcgccgccccccgcgcgccaggatctccaggggccaccgctgcccgaggcagcacccgggatcaccagttttcgaagcagcccctggcagcagccacctccgctgcagcagcggcggcgaggacgcgagcctgagggcgcgacggggcttcccggtgctccagcggccgagggggagcccgaggaggaggacgggggcgcggctgggcagcggagagacggccggccggggagtagccacaacggcagcggggacgggggcgctgccgccccgagcgcccgaccccgggacttcctgtacgtgggggtgatgaccgcgcagaagtacctgggcagccgcgcgctggccgcgcagcggacctgggcgcgtttcatcccgggccgcgtggagttcttttccagccagcagccccccaacgccggccagcccccgccacccctgcctgtcatcgcgctaccgggtgtggacgactcctatcctccccagaaaaagtccttcatgatgatcaagtacatgcacgaccactacctggacaagtatgagtggttcatgcgcgccgacgacgatgtctacatcaaaggtgataaattagaagagtttcttagatcgctaaacagcagtaagcctctctacctgggacagactggcctggggaatattgaagagcttggaaagctgggactggagcctggggaaaacttctgtatgggaggacctggcatgatctttagccgagaagttctcaggaggatggtgccacatattggtgaatgccttagagaaatgtacacgactcatgaggatgtggaagtaggaagatgcgttcgccgttttggtgggactcagtgtgtctggtcttacgagatgcaacaactgttccatgaaaattatgaacacaatcggaagggttacatccaagaccttcacaatagcaaaatccatgcagccataacacttcatcccaacaaaaggcctgcataccaatacaggctgcataattacatgctcagccgcaaaatttctgaacttcgctaccgcaccatccagctccacagggaaagtgccctgatgagcaagctcagtaacacagaagtgagcaaagaggaccagcagctgggagtgataccttctttcaaccacttccagcctcgggagagaaatgaagtgatagaatgggagttcctgacagggaagcttctatactcagcagctgagaaccagccccctcgacagagcctcagtagcattttaagaacagcactggatgataccgtcctacaggtgatggagatgatcaatgagaatgccaagagcagaggacggctcattgacttcaaggaaattcagtatggctaccgcagagttaaccccatgcacggggtggagtacattttggatttactccttttatacaaaagacacaagggaaggaaactgactgtgccagtgagacgtcatgcctatcttcagcagttgttcagcaagcctttcttcagagagaccgaagagctagatgtcaacagtcttgtggagagtattaacagtgaaactcagtcattctcctttatatctaattctttaaagatattatcttcttttcaaggtgccaaagaaatgggagggcacaatgaaaagaaagtacacattctcgttcctctcatcggaaggtatgacattttcttgagattcatggagaactttgaaaacatgtgtcttatcccaaagcagaatgtaaagttggtcattatccttttcagtagggattctggccaagactccagcaagcatattgagctgataaaagggtaccagaacaagtaccccaaagcagaaatgaccctgatcccaatgaagggagagttttccagaggtcttggtcttgaaatggcttctgcccagtttgacaatgacactttgctgctattttgtgatgttgacttgatcttcagagaagattttctccaacgatgtagagacaatacaattcagggacaacaggtgtactatcccatcatctttagccagtatgacccaaaggtaacaaacgggggaaatcctcccactgatgattacttcatattctcaaaaaagactggattttggagagactatggatatggcatcacctgtatttacaaaagtgatcttctaggtgcaggtggatttgatacctcaatacaaggctggggactagaagatgtagatctctacaataaagtcattctatctggcttaaggccattcagaagccaagaagtaggagtggtgcatattttccatccagttcattgtgatcctaacttggaccctaagcagtataagatgtgcttaggatccaaggcaagtactttcgcctcaaccatgcaactggctgaactctggcttgaaaaacatttaggtgtcaggtacaatcgaactctctcctgacagtccaggcaacacattttgccttttttaaggggagtttacctcattgttggttgttgttatttttattgtattattgttattttattattattattgttataattttattttgttgtcctggtcttaaactactcttggttgtcttcctaagggtgtttgttgacctcaagcaagaagagtctgcagttcactgatgtttcagatttctactgaagtcaatatgttattacttttatataactttatttgagattgagttaaatcatagcaatcaaatgacttttgaaacgcattcatcacaagagacagcttagaagaatgttctcttggggcttaaagatgcaatatcgacttttatttggtttctcaaattcaatgtgatacaaatatttactggtgaaaggtaccacaaaagtgctttatgcttcctatggggaagggactctgtaacataaacttgagttttgtaatttatacaaggacttaaatatataaacaataattttcttcatctttagaatttttaaagtaaatgaatacctatgattgtatgtttattttttaaaaaaagttttaaaaattgaggagttttgttccacaagcaaccggtactggctaccctggtcttatgacaattatgagctcctcacaactgtctgctataaatgcgaatgaactttattttctcaaggaaatatgatttaattaaatattcatgtacattttagaagctttatgaaacaatgtccttcatttgctggcaagaagataaaatatgacagaacctgtttatttaaaataaaacacaggtatagcagtattctttttcaaaaacactga

SEQ ID NO: 11665 - protein, 882 aa, Homo sapiens; identical to SEQ ID NO: 1110

SEQ ID NO: 11666 - DNA, 714 bp, Homo sapiens
gagtctgggtggaaatgatgccttcgcagagctgagagcacaaaatgaagttggtgattcatgggcagcagccacttgaaaatatgaacactcctgcgtccccagccccgccggcctttcacacccatttggaggcgtgttgagcagagctgctagcctgctgcatcctagtctgcatgtgtttgggcaggatgtgaggacaggccggttctaccctgacaaggagcctgcaaagggcagcagcacgcctgggagcactccaagaacgtctgcccaccccccgagaggcctcggctggaacccagggcagggctgagtaagaggtgaagtggcacagtaacgcattccaggaggacatcgctgagggccccaattgtgaggacattgcccatcaatcttggagcctccacaccaagctgggattctctctcttctggacttcatagccttctgagaccgcactggggagaacagtaagagagctttgtaaggccactctggctcctcacccaccttttctgggctcactcttctgaagccatagctgacctaagcgacccacctgggcttttaaggtgggctacattcccccaggcccaggaactacaaatgggaggccaggagtgctatatgccgcagccagaggcgtctgtgctccaaaaagtcttctgagtgggcttctcagcagtggatgggaacgtagggcagtcttct

SEQ ID NO: 11667 - protein, 32 aa, Homo sapiens
MKLVIHGQQPLENMNTPASPAPPAFHTHLEAC

SEQ ID NO: 11668 - DNA, 331 bp, Homo sapiens
ccaccccccgagaggcctcggctggaacccagggcagggctgagtaagaggtgaagtggcacagtaacgcattccaggaggacatcgctgagggccccaattgtgaggacattgcccatcaatcttggagcctccacaccaagctgggattctctctcttctggacttcatagccttctgagaccgcactggggagaacatgtctggctgagtctaaattgaattattaatctactcctgtgtgcccgtgtcattttccagacaaccagtttattcatgactcgcccactatcaatttcaacatgcaatttgcaatgaaatttgactgatc

SEQ ID NO: 11669 - protein, 55 aa, Homo sapiens [sequence omitted]

SEQ ID NO: 11670 - DNA, 1107 bp, Homo sapiens
tggggtcattgggctgccttagattcccccccccacctctcagcctgctgcctctggacaaagctctgcagaggagccccatctccttcagccccctcctgcctttggggtgcaagtttcctgaaggacttgagtgagatgtcaccaagcaacaggctgtcaggctcttggcagcaagtactggcccagcgactcgcggcagagtctctccttggggcgtctgtccttatcaggggtggatgctgtcagacttgctaatggtggaatttctggcatgtggcagggccaagtgcagtggctcacacctataatcccagcactttgggaggctgaggcacgaggattgcttgagcccaggagttcatcaccagcctgggcaatatagccagacccggtctccacaaaaaaatttttaaaaattagctgggcatggtggcctgtgcctgtagtcccagctctttgggagactgaggcaggaggatcaacttgagcccagaaggtcgaagctgcagtaagccatggtcatgccagcggagttgagcctggaccacagagcaagacactatagggaagacagccaggtgaaaatgaaggcagagaccagagttatgcatccgaaaggcaaggaatgccgggggctgccagaagctggaagaggcaaggcaggatcccccactaaaggccttggagggagcatggctttagcagcacctcaatttgggatgtctattttccggaacagcgggaataagtgtctgctgctgtaagccaccctgcctgtggcactttgttacagcagcccaggaacctgacccagccaggctgctcctgctgcccagtgtgcccttctctcatccctccagctggtctctcactgccttcgagccccatcacctgctcgggctccccctctgtgtgtccccagttctggacacttattcagcagacctgtaagttttgctggccagcctatctccctggctagactgaaggctccttcagggcaggcctaacctgtgctagggcagcatgatgcctggtacagaataggggctccttagatgtggggtaaataaaggaatgctcgaagggtgatgggcccctgtg

SEQ ID NO: 11671 - protein, 36 aa, Homo sapiens
MWQGQVQWLTPIIPALWEAEARGLLEPRSSSPAWAI

SEQ ID NO: 11672 - DNA, 402 bp, Homo sapiens
ccccttccatgggaagataaatattcaatttacataagatgacatttatgtgacaattaagaagattccccgatggaatgttgtgaacacatttgcttataggagaaataaatctaataataaacaaactcataataacagcacaaatcctccgacagggcggattgtctacccaacaaagagggagatgatgaatgctgaaataagcagtttttgcaacaagaaagaaatatgagcccttgaaaatacctcttgcttaggactggaagccctatcaaaatccttggattcccacagttctctgctgctgtttaaggttaaccttggaagctttaacagaatgataacgataaagctaattgtaactccttaatctttattaaaagtctcacaaatcattca

SEQ ID NO: 11673 - protein, 34 aa, Homo sapiens
THLLIGEINLIINKLIITAQILRQGGLSTQQRGR

SEQ ID NO: 11674 - DNA, 4404 bp, Homo sapiens
taaaaagaaacagaaacatacacagggggttggtgaatggtgccgaccgcggccatcgcagttggaggctattttttggggggggtgagtagcgtccatggagttactttgcgcccactcctagcggcaccggcttaggtcctgcgggccgaccgtccccggcggggggcgtggggcctgggacgccgcgggcccggccgcctccctcgccgcgaccccggatggatgcgcgccccccgccctcccgcgccggccccaggagctcccggcttcgggagcatccttcccgcgccggtccctgcagcggcgcgtagccgagggcagcgcccgtcaggggggcaccgcggagcaagatggaagagaagaggcgaaaatactccatcagcagtgacaactctgacaccactgacagtcatgcgacatctacatccgcatcaagatgctccaaactgcccagcagcaccaagtcgggctggccccgacagaacgaaaagaagccctccgaggttttccggacagacttgatcacagccatgaagatcccggactcataccagctcagcccggatgactactacatcctggcagacccatggcgacaggaatgggagaaaggtgtgcaggtgcctgccggggcagaggccatcccagagcccgtggtgaggatcctcccaccactggaaggcccccctgcccaggcatccccgagcagcaccatgcttggtgagggctcccagcctgattggccagggggcagccgctatgacttggacgagattgatgcctactggctggagctcatcaactcggagcttaaggagatggagaggccggagctggacgagctgacattagagcgtgtgctggaggagctggagaccctgtgccaccagaatatggccagggccattgagacgcaggaggggctgggcatcgagtacgacgaggatgttgtctgcgacgtgtgtcgctctcctgagggcgaggatggcaacgagatggtcttctgtgacaagtgcaacgtctgtgtgcatcaggcatgctacgggatcctcaaggtgcccacgggcagctggctgtgccggacgtgtgccctgggtgtccagccaaagtgcctgctctgccccaagcgaggaggagccttgaagcccactagaagtgggaccaagtgggtgcatgtcagctgtgccctatggattcctgaggtcagcatcggctgcccagagaagatggagcccatcaccaagatctcgcatatcccagccagccgctgggctctgtcctgcagcctctgcaaggaatgcacaggcacctgcatccagtgttccatgccttcctgcgtcacagcgttccatgtcacatgcgcctttgaccacggcctggaaatgcggactatattagcagacaacgatgaggtcaagttcaagtcattctgccaggagcacagtgacgggggcccacgtaatgagcccacatctgagcccacggaacccagccaggctggcgaggacctggaaaaggtgaccctgcgcaagcagcggctgcagcagctagaggaggacttctacgagctggtggagccggctgaggtggctgagcggctggacctggctgaggcactggtcgacttcatctaccagtactggaagctgaagaggaaagccaatgccaaccagccgctgctgacccccaagaccgacgaggtggacaacctggcccagcaggagcaggacgtcctctaccgccgcctgaagctcttcacccatctgcggcaggacctagagagggttagaaatctgtgctacatggtgacaaggcgcgagagaacgaaacacgccatctgcaaactccaggagcagatattccacctgcagatgaaacttattgaacaggatctgtgtcgagagcggtctgggaggagagcaaagggcaagaagagtgactcgaagaggaagggctgcgagggctccaagggcagcactgagaagaaagagaaagtgaaggcggggcctgactcagtcctggggcagctgggtgagtgagggccatgctggcctgcagacacggcaggcttgaccatcaccacgcttgcagctctgtctgccctgcggaaggccagctgcacagagtaggagactgaggctcaagagcggtaaccaggcccttgcttgcccaggtgcacacaccttccacccacaaaggagacagatctcagagccccgtgtgacatcctgggaaatgccccgtctgtagacctggatggaggctgggccacgcccactcaggaactgtccagtcattcccctggctggggggtcctgggtgctggattttcccagaggcccctgggacagccccatgctgggaggggaggatctgccagaaagccccatccttgtcctactctcccagaatcctctaagtgggcccttcctgcaacagcagcagactctcctggagctgcccagaggagtggctgcaggctctggccctgcccaccacctccactgtcccaggcctcctgttaggcagagcagcctaatgggagcagtgtgactcatggacctcacgtgcttcctccagagatctcagggagcatcatggagtccccttccagaccttgcctctgggatggaagccccaggtcatcctttctgtccctctgtctcaagaaggggacaacccaggcgtggtggtgcatgcctgtattcctagctgctcaggaggctgagttgggaggatcgcttgagcccaggaggttgaggctgcagtgcaccatgatcatgccactgcactccagcctgggtgacagagcaagaccctgttccttcatttcacacccctcccgcaaaaagaaggggataacttgggtgtctaacaggaaacccagtctcccgtctcgccagctgccccctcccaagacctcggtaaggaaggaaggctctgccgccctcacatctgctggcgtctcacttgcctcccctctccctgacatccaggagggactggatactgcttgctacccctattcgtacctgatccctttatccatgctctttgctgcaagcgctgggaggcaacgcttataaagactgagcgccctctggcggcctgagggcattttcctccagattcctccttccccaaccccaccagaatgggggtagtgggcaggtccaacttcgtgggtagcaacctgtgcagtgccacggggtccttgttcttggttaatgctctgctgctgccaccttgaattttctttcccatggcaggctttctggtaaaatccaaaaaacctgctagacaaactaaaagagctataacactccaccttgaaattcttaataatatttgaacaaggagcctatattttcattttacactctagcccacaaattatgaagcccatcttgagggcagcacgtccttctggagagaagcgtataagtagtccctactctttggtggtgttggcaggagggatggacaaaacaagatagctcacctgggtctggcacagggggacagagagaagacgatgcctggtggtgtgctgggagcgtcagtgggcttcctgaaagggtgggacacacgtctgctggcgtctcacttgcctcctctctcccctcagcaggcctgtccacctcattccccatcgatggcaccttcttcaacagctggctggcacagtcggtgcagatcacagcagagaacatggccatgagcgagtggccactgaacaatgggcaccgcgaggaccctgctccagggctgctgtcagaggaactgctgcaggacgaggagacactgctcagcttcatgcgggacccctcgctgcgacctggtgaccctgctaggaaggcccgaggccgcacccgcctgcctgccaagaagaaaccaccaccaccaccaccccggacgaggcagcctcagtagctgctgactcagatgtccaagtgcctggccctgcagcaagccctaagcctttgggccggctccggccaccccgcgagagcaaggtaacccggagattgccgggtgccaggcctgatgctgggatgggaccaccttcagctgtggctgagaggcccaaggtcagcctgcattttgacactgagactgatggctacttctctgatggggagatgagcgactcagatgtagaggccgaggacggtggggtgcagcggggtccccgggaggcaggggcagaggaggtggtccgcatgggcgtactggcctcctaactcacccccttccctgtcccaggccctgccctggtccccccacaaggcctcagcccagtcacaactgccatttccagtctctgctgagtgtcccagaccctcgaggctgccactccgtcgtggttttatttttaatatagagagagttttgaattct

SEQ ID NO: 11675 - protein, 562 aa, Homo sapiens
MEEKRRKYSISSDNSDTTDSHATSTSASRCSKLPSSTKSGWPRQNEKKPSEVFRTDLITAMKIPDSYQLSPDDYYILADPWRQEWEKGVQVPAGAEAIPEPVVRILPPLEGPPAQASPSSTMLGEGSQPDWPGGSRYDLDEIDAYWLELINSELKEMERPELDELTLERVLEELETLCHQNMARAIETQEGLGIEYDEDVVCDVCRSPEGEDGNEMVFCDKCNVCVHQACYGILKVPTGSWLCRTCALGVQPKCLLCPKRGGALKPTRSGTKWVHVSCALWIPEVSIGCPEKMEPITKISHIPASRWALSCSLCKECTGTCIQCSMPSCVTAFHVTCAFDHGLEMRTILADNDEVKFKSFCQEHSDGGPRNEPTSEPTEPSQAGEDLEKVTLRKQRLQQLEEDFYELVEPAEVAERLDLAEALVDFIYQYWKLKRKANANQPLLTPKTDEVDNLAQQEQDVLYRRLKLFTHLRQDLERVRNLCYMVTRRERTKHAICKLQEQIFHLQMKLIEQDLCRERSGRRAKGKKSDSKRKGCEGSKGSTEKKEKVKAGPDSVLGQLGE

SEQ ID NO: 11676 - DNA, 3222 bp, Homo sapiens
taaaaagaaacagaaacatacacagggggttggtgaatggtgccgaccgcggccatcgcagttggaggctattttttggggggggtgagtagcgtccatggagttactttgcgcccactcctagcggcaccggcttaggtcctgcgggccgaccgtccccggcggggggcgtggggcctgggacgccgcgggcccggccgcctccctcgccgcgaccccggatggatgcgcgccccccgccctcccgcgccggccccaggagctcccggcttcgggagcatccttcccgcgccggtccctgcagcggcgcgtagccgagggcagcgcccgtcaggggggcaccgcggagcaagatggaagagaagaggcgaaaatactccatcagcagtgacaactctgacaccactgacagtcatgcgacatctacatccgcatcaagatgctccaaactgcccagcagcaccaagtcgggctggccccgacagaacgaaaagaagccctccgaggttttccggacagacttgatcacagccatgaagatcccggactcataccagctcagcccggatgactactacatcctggcagacccatggcgacaggaatgggagaaaggtgtgcaggtgcctgccggggcagaggccatcccagagcccgtggtgaggatcctcccaccactggaaggcccccctgcccaggcatccccgagcagcaccatgcttggtgagggctcccagcctgattggccagggggcagccgctatgacttggacgagattgatgcctactggctggagctcatcaactcggagcttaaggagatggagaggccggagctggacgagctgacattagagcgtgtgctggaggagctggagaccctgtgccaccagaatatggccagggccattgagacgcaggaggggctgggcatcgagtacgacgaggatgttgtctgcgacgtgtgtcgctctcctgagggcgaggatggcaacgagatggtcttctgtgacaagtgcaacgtctgtgtgcatcaggcatgctacgggatcctcaaggtgcccacgggcagctggctgtgccggacgtgtgccctgggtgtccagccaaagtgcctgctctgccccaagcgaggaggagccttgaagcccactagaagtgggaccaagtgggtgcatgtcagctgtgccctatggattcctgaggtcagcatcggctgcccagagaagatggagcccatcaccaagatctcgcatatcccagccagccgctgggctctgtcctgcagcctctgcaaggaatgcacaggcacctgcatccagtgttccatgccttcctgcgtcacagcgttccatgtcacatgcgcctttgaccacggcctggaaatgcggactatattagcagacaacgatgaggtcaagttcaagtcattctgccaggagcacagtgacgggggcccacgtaatgagcccacatctgagcccacggaacccagccaggctggcgaggacctggaaaaggtgaccctgcgcaagcagcggctgcagcagctagaggaggacttctacgagctggtggagccggctgaggtggctgagcggctggacctggctgaggcactggtcgacttcatctaccagtactggaagctgaagaggaaagccaatgccaaccagccgctgctgacccccaagaccgacgaggtggacaacctggcccagcaggagcaggacgtcctctaccgccgcctgaagctcttcacccatctgcggcaggacctagagagggttagaaatctgtgctacatggtgacaaggcgcgagagaacgaaacacgccatctgcaaactccaggagcagatattccacctgcagatgaaacttattgaacaggatctgtgtcgaggcctgtccacctcattccccatcgatggcaccttcttcaacagctggctggcacagtcggtgcagatcacagcagagaacatggccatgagcgagtggccactgaacaatgggcaccgcgaggaccctgctccagggctgctgtcagaggaactgctgcaggacgaggagacactgctcagcttcatgcgggacccctcgctgcgacctggtgaccctgctaggaaggcccgaggccgcacccgcctgcctgccaagaagaaaccaccaccaccaccaccgcaggacgggcctggttcacggacgactccagacaaagcccccaagaagacctggggccaggatgcaggcagtggcaaggggggtcaagggccacctaccaggaagccaccacgtcggacatcttctcacttgccgtccagccctgcagccggggactgtcccatcctagccacccctgaaagccccccgccactggcccctgagaccccggacgaggcagcctcagtagctgctgactcagatgtccaagtgcctggccctgcagcaagccctaagcctttgggccggctccggccaccccgcgagagcaaggtaacccggagattgccgggtgccaggcctgatgctgggatgggaccaccttcagctgtggctgagaggcccaaggtcagcctgcattttgacactgagactgatggctacttctctgatggggagatgagcgactcagatgtagaggccgaggacggtggggtgcagcggggtccccgggaggcaggggcagaggaggtggtccgcatgggcgtactggcctcctaactcacccccttccctgtcccaggccctgccctggtccccccacaaggcctcagcccagtcacaactgccatttccagtctctgctgagtgtcccagaccctcgaggctgccactccgtcgtggttttatttttaatatagagagagttttgaattctacactgttgtctttcctctgtgctggcctaggacattaggattccttccacggctccggccgctaggaccctgccaggtcccgcgcaccatccctgccctgcccacgtggtattgctgggctcctggctagatgcaagcaaggtggacaagagctcaggactccagcccactgccactgggtgacacagactgtcgtttgggcattatttcatggcagatgggccagtccagggcctaccccgccttgcccccagatcccactggggtccatttggggggtcctgctacactccaccgatccccaaggaagtataataaacgatacccagccagagtct

SEQ ID NO: 11677 - protein, 790 aa, Homo sapiens; identical to SEQ ID NO: 1112

SEQ ID NO: 11678 - DNA, 8161 bp, Homo sapiens
taaaaagaaacagaaacatacacagggggttggtgaatggtgccgaccgcggccatcgcagttggaggctattttttggggggggtgagtagcgtccatggagttactttgcgcccactcctagcggcaccggcttaggtcctgcgggccgaccgtccccggcggggggcgtggggcctgggacgccgcgggcccggccgcctccctcgccgcgaccccggatggatgcgcgccccccgccctcccgcgccggccccaggagctcccggcttcgggagcatccttcccgcgccggtccctgcagcggcgcgtagccgagggcagcgcccgtcaggggggcaccgcggagcaagatggaagagaagaggcgaaaatactccatcagcagtgacaactctgacaccactgacagtcatgcgacatctacatccgcatcaagatgctccaaactgcccagcagcaccaagtcgggctggccccgacagaacgaaaagaagccctccgaggttttccggacagacttgatcacagccatgaagatcccggactcataccagctcagcccggatgactactacatcctggcagacccatggcgacaggaatgggagaaaggtgtgcaggtgcctgccggggcagaggccatcccagagcccgtggtgaggatcctcccaccactggaaggcccccctgcccaggcatccccgagcagcaccatgcttggtgagggctcccagcctgattggccagggggcagccgctatgacttggacgagattgatgcctactggctggagctcatcaactcggagcttaaggagatggagaggccggagctggacgagctgacattagagcgtgtgctggaggagctggagaccctgtgccaccagaatatggccagggccattgagacgcaggaggggctgggcatcgagtacgacgaggatgttgtctgcgacgtgtgtcgctctcctgagggcgaggatggcaacgagatggtcttctgtgacaagtgcaacgtctgtgtgcatcaggcatgctacgggatcctcaaggtgcccacgggcagctggctgtgccggacgtgtgccctgggtgtccagccaaagtgcctgctctgccccaagcgaggaggagccttgaagcccactagaagtgggaccaagtgggtgcatgtcagctgtgccctatggattcctgaggtcagcatcggctgcccagagaagatggagcccatcaccaagatctcgcatatcccagccagccgctgggctctgtcctgcagcctctgcaaggaatgcacaggcacctgcatccagtgttccatgccttcctgcgtcacagcgttccatgtcacatgcgcctttgaccacggcctggaaatgcggactatattagcagacaacgatgaggtcaagttcaagtcattctgccaggagcacagtgacgggggcccacgtaatgagcccacatctgagcccacggaacccagccaggctggcgaggacctggaaaaggtgaccctgcgcaagcagcggctgcagcagctagaggaggacttctacgagctggtggagccggctgaggtggctgagcggctggacctggctgaggcactggtcgacttcatctaccagtactggaagctgaagaggaaagccaatgccaaccagccgctgctgacccccaagaccgacgaggtggacaacctggcccagcaggagcaggacgtcctctaccgccgcctgaagctcttcacccatctgcggcaggacctagagagggttagaaatctgtgctacatggtgacaaggcgcgagagaacgaaacacgccatctgcaaactccaggagcagatattccacctgcagatgaaacttattgaacaggatctgtgtcgagagcggtctgggaggagagcaaagggcaagaagagtgactcgaagaggaagggctgcgagggctccaagggcagcactgagaagaaagagaaagtgaaggcggggcctgactcagtcctggggcagctgggtgagtgagggccatgctggcctgcagacacggcaggcttgaccatcaccacgcttgcagctctgtctgccctgcggaaggccagctgcacagagtaggagactgaggctcaagagcggtaaccaggcccttgcttgcccaggtgcacacaccttccacccacaaaggagacagatctcagagccccgtgtgacatcctgggaaatgccccgtctgtagacctggatggaggctgggccacgcccactcaggaactgtccagtcattcccctggctggggggtcctgggtgctggattttcccagaggcccctgggacagccccatgctgggaggggaggatctgccagaaagccccatccttgtcctactctcccagaatcctctaagtgggcccttcctgcaacagcagcagactctcctggagctgcccagaggagtggctgcaggctctggccctgcccaccacctccactgtcccaggcctcctgttaggcagagcagcctaatgggagcagtgtgactcatggacctcacgtgcttcctccagagatctcagggagcatcatggagtccccttccagaccttgcctctgggatggaagccccaggtcatcctttctgtccctctgtctcaagaaggggacaacccaggcgtggtggtgcatgcctgtattcctagctgctcaggaggctgagttgggaggatcgcttgagcccaggaggttgaggctgcagtgcaccatgatcatgccactgcactccagcctgggtgacagagcaagaccctgttccttcatttcacacccctcccgcaaaaagaaggggataacttgggtgtctaacaggaaacccagtctcccgtctcgccagctgccccctcccaagacctcggtaaggaaggaaggctctgccgccctcacatctgctggcgtctcacttgcctcccctctccctgacatccaggagggactggatactgcttgctacccctattcgtacctgatccctttatccatgctctttgctgcaagcgctgggaggcaacgcttataaagactgagcgccctctggcggcctgagggcattttcctccagattcctccttccccaaccccaccagaatgggggtagtgggcaggtccaacttcgtgggtagcaacctgtgcagtgccacggggtccttgttcttggttaatgctctgctgctgccaccttgaattttctttcccatggcaggctttctggtaaaatccaaaaaacctgctagacaaactaaaagagctataacactccaccttgaaattcttaataatatttgaacaaggagcctatattttcattttacactctagcccacaaattatgaagcccatcttgagggcagcacgtccttctggagagaagcgtataagtagtccctactctttggtggtgttggcaggagggatggacaaaacaagatagctcacctgggtctggcacagggggacagagagaagacgatgcctggtggtgtgctgggagcgtcagtgggcttcctgaaagggtgggacacacgtctgctggcgtctcacttgcctcctctctcccctcagcaggcctgtccacctcattccccatcgatggcaccttcttcaacagctggctggcacagtcggtgcagatcacagcagagaacatggccatgagcgagtggccactgaacaatgggcaccgcgaggaccctgctccagggctgctgtcagaggaactgctgcaggacgaggagacactgctcagcttcatgcgggacccctcgctgcgacctggtgaccctgctaggaaggcccgaggccgcacccgcctgcctgccaagaagaaaccaccaccaccaccaccccggacgaggcagcctcagtagctgctgactcagatgtccaagtgcctggccctgcagcaagccctaagcctttgggccggctccggccaccccgcgagagcaaggtaacccggagattgccgggtgccaggcctgatgctgggatgggaccaccttcagctgtggctgagaggcccaaggtcagcctgcattttgacactgagactgatggctacttctctgatggggagatgagcgactcagatgtagaggccgaggacggtggggtgcagcggggtccccgggaggcaggggcagaggaggtggtccgcatgggcgtactggcctcctaactcacccccttccctgtcccaggccctgccctggtccccccacaaggcctcagcccagtcacaactgccatttccagtctctgctgagtgtcccagaccctcgaggctgccactccgtcgtggttttatttttaatatagagagagttttgaattctacactgttgtctttcctctgtgctggcctaggacattaggattccttccacggctccggccgctaggaccctgccaggtcccgcgcaccatccctgccctgcccacgtggtattgctgggctcctggctagatgcaagcaaggtggacaagagctcaggactccagcccactgccactgggtgacacagactgtcgtttgggcattatttcatggcagatgggccagtccagggcctaccccgccttgcccccagatcccactggggtccatttggggggtcctgctacactccaccgatccccaaggaagtataataaacgatacccagccagagtctactcactgtcacaagcacaacgagtttatatgagaaagcactgagggggtgcagagggcccgctagttccaggggaactgaaagctgttcctgatcagcccgtatcatctgaggcctgcctgcccaccctgccaccctcccctcccttgctgctctgcccctgccagtgcccagcccagcggctctgggaaggggttcccagaatccctcctgagctgtgccatttactcaggggactcccaaacagccagctgccagtgcaggtggagggctgtaggggagggccagtgcccagacagggtcatggggctcagaccagcccactgtagagaatcactctgaggctccaacttccttccttccttcggggccagtctcggccgaagtctggtcacgctcagacagagctgaccagaccagaccgtttgccttttcaagtttcctagtcctgctacaagatgagcttcttccgtggtttccttttggaaactcctccttccaacaagcagtgggatcccggggcccagggcgggccggtgttggccgctggggctgttgtaagtcttgctggatgttcccctgttcctgagccttaacccctcgcacagccatccccccccccgtcctgccatccccccccgccgtcctgccttccccaccccacccttaggtcccaggtagttgctctgaagagtttcagtagagtggccccagggtgatagctcagggaacaacaaaaaaggaattccgtgaaaacatttttttttctttgatgaattactcctgggtcacttccaccactggtaaagccagaacttctccaaaaagaaccttgcaaaaagtccagtgaatcagtcgaatcattctgtggatgccaaagaatattttgaccataatacagcacagcctggacctgacaacttgtcatttggacttttttttaaatggagttctttagcaacaaagtatagaaacatgttcattgcacacacccaaggagaagagctcaagcgcttggaagaggatgctttgctgctgctgaagtgtacctgggtgttagatttcagatcctgggctgagcccactgtgagctttcctaaactgtgagactcacagaggggaaagatactgacggtgaaaccagcatggaaaacgtctttaccatgtggttccctcctccccaaatacataaagcaaataagcaggatggggaacagcttgaccttcatccacccctaactccaaaactatcaaggtacgacagtggcattgtcatcgacactcaatttcatgtgaattttagcaaaacaggaaacaaagataatgactcagttcagaggatcggacaaatgtgtctagtccgggtggactcggagggagtggggtgggcttcaaggattctgggcgttgggatggcatgagctaccctgtagagtttagtctgcctgcccgccttggtagtagtgaccagtcagtgtcagcatcagtgtcccaaccccagtctctgtttactgcctttgaacagaacttcttccttccccatgctttgggtcacctcgggctgcaaccctgtctgtgccagattgcccggtctgaccctgcaggaagcaaagaggtgagcttaaagaacaaccaaactctgccaggggtcccagaaagcccagggtccagcagtctcagcacttggccccttgccccttcacaccatcctggggcaggggctgggcctccctggtggcaggggtgggtggagaattagggagagggtgcaacgagtctggccccttgcctcgggctggctggtgttcttccaagagcctctgctcacattgttggcctctggattctggcccttcttcattggctgttgctttggactggactgttgctgagcctgtgtcctgcagaacccagatgtctgttaggctggctggctgctgcgaggggaggggggtggcctttcatttggggtgccctttcactcccaggccaagccctggagcaatcttcttcaggcagctgtctccacctccaggatgtccagcaggctgcaaggagaaggatgccagccacccatcctcccccagttcccagcctttcccctgttggtcacagccgcttctgtctttttccggtctactgtccccagtgtagagggctttgctgtccctgagactgaggcaggttccttttccaggtcagaggtggaggtagatctttctctcaaccacatctgcctccacacacagctcctccgcagggaaggagaagctgctctgtaactcattctggctatcgtcccccttctcactgacctgaccgcccaccacctccttccccctcatcacatgacaaaggataatgtgcaagaaaagtatttttatgtatcataaatgtattttgaaacaaatgagaagaagaaaggtagaagggtttattttattaaatgagcctgacttagtgacagtgtgtgagcatttgcaatgtaagggcctcagcttccttggagaagccaccccaggtttccagacatagatgttgaattgtttgtggggggtgtgccaggccacgtctcgtgtgtccgtatgcaggcatgcctgtgtatactgtgtatgggcacactgggactagctgggacaattcctagagattcaactgcccaattctaaccaacattggcagcggctgaacttggcatttccttgctaactgccagatgtggccaacctttgtccatatgcaaaccactgaaaaatgatctggatttctatagcaaggcccttggggagggcactctcccatgcccttggcctcgctggccacattggccaatgagccagggctggagtctgagacctttggttgttctttaaggcacctcctgccactttctccctcagaggcacaaacactttgtgttccacgtcagtttgaggggacggtggggggatgatatgaatgtcacaggaggagacaccttctgtctttgtttcaaagaaagtgatgtgccatttgttaatatacaagagaaatattgaaaatatattgaaaagagcaattttaaattatttttggcttatgttgcaatatttattttcttgtattagaaaagattcctttgtagagaaaaaatgtatttttcattaacgcaaagacctatttctcctttttgtacattgtccatgtgcgcaacccttaacgagcaatagaatgtatggtcacctgggtgtggccagtgcccgctgtgccctgcatgattctgtgttgccgctgctgcatagttcccagccccatcctgtcctgctcactcatgggggcttccagaccccggccccaccagggcttgtgtcatagggagccctttgcactcctcgtgtgttggcaaacgcagttaataaagcagtgttttctgtgctgg

SEQ ID NO: 11679 - protein, 562 aa, Homo sapiens; identical to SEQ ID NO: 11675

SEQ ID NO: 11680 - DNA, 2745 bp, Homo sapiens
aaaaagaaacagaaacatacacagggggttggtgaatggtgccgaccgcggccatcgcagttggaggctattttttgggggggatggaagagaagaggcgaaaatactccatcagcagtgacaactctgacaccactgacagtcatgcgacatctacatccgcatcaagatgctccaaactgcccagcagcaccaagtcgggctggccccgacagaacgaaaagaagccctccgaggttttccggacagacttgatcacagccatgaagatcccggactcataccagctcagcccggatgactactacatcctggcagacccatggcgacaggaatgggagaaaggtgtgcaggtgcctgccggggcagaggccatcccagagcccgtggtgaggatcctcccaccactggaaggcccccctgcccaggcatccccgagcagcaccatgcttggtgagggctcccagcctgattggccagggggcagccgctatgacttggacgagattgatgcctactggctggagctcatcaactcggagcttaaggagatggagaggccggagctggacgagctgacattagagcgtgtgctggaggagctggagaccctgtgccaccagaatatggccagggccattgagacgcaggaggggctgggcatcgagtacgacgaggatgttgtctgcgacgtgtgtcgctctcctgagggcgaggatggcaacgagatggtcttctgtgacaagtgcaacgtctgtgtgcatcaggcatgctacgggatcctcaaggtgcccacgggcagctggctgtgccggacgtgtgccctgggtgtccagccaaagtgcctgctctgccccaagcgaggaggagccttgaagcccactagaagtgggaccaagtgggtgcatgtcagctgtgccctatggattcctgaggtcagcatcggctgcccagagaagatggagcccatcaccaagatctcgcatatcccagccagccgctgggctctgtcctgcagcctctgcaaggaatgcacaggcacctgcatccagtgttccatgccttcctgcgtcacagcgttccatgtcacatgcgcctttgaccacggcctggaaatgcggactatattagcagacaacgatgaggtcaagttcaagtcattctgccaggagcacagtgacgggggcccacgtaatgagcccacatctgagcccacggaacccagccaggctggcgaggacctggaaaaggtgaccctgcgcaagcagcggctgcagcagctagaggaggacttctacgagctggtggagccggctgaggtggctgagcggctggacctggctgaggcactggtcgacttcatctaccagtactggaagctgaagaggaaagccaatgccaaccagccgctgctgacccccaagaccgacgaggtggacaacctggcccagcaggagcaggacgtcctctaccgccgcctgaagctcttcacccatctgcggcaggacctagagagggttagaaatctgtgctacatggtgacaaggcgcgagagaacgaaacacgccatctgcaaactccaggagcagatattccacctgcagatgaaacttattgaacaggatctgtgtcgagagcggtctgggaggagagcaaagggcaagaagagtgactcgaagaggaagggctgcgagggctccaagggcagcactgagaagaaagagaaagtgaaggcggggcctgactcagtcctggggcagctggcaggcctgtccacctcattccccatcgatggcaccttcttcaacagctggctggcacagtcggtgcagatcacagcagagaacatggccatgagcgagtggccactgaacaatgggcaccgcgaggaccctgctccagggctgctgtcagaggaactgctgcaggacgaggagacactgctcagcttcatgcgggacccctcgctgcgacctggtgaccctgctaggaaggcccgaggccgcacccgcctgcctgccaagaagaaaccaccaccaccaccaccgcaggacgggcctggttcacggacgactccagacaaagcccccaagaagacctggggccaggatgcaggcagtggcaaggggggtcaagggccacctaccaggaagccaccacgtcggacatcttctcacttgccgtccagccctgcagccggggactgtcccatcctagccacccctgaaagccccccgccactggcccctgagaccccggacgaggcagcctcagtagctgctgactcagatgtccaagtgcctggccctgcagcaagccctaagcctttgggccggctccggccaccccgcgagagcaaggtaacccggagattgccgggtgccaggcctgatgctgggatgggaccaccttcagctgtggctgagaggcccaaggtcagcctgcattttgacactgagactgatggctacttctctgatggggagatgagcgactcagatgtagaggccgaggacggtggggtgcagcggggtccccgggaggcaggggcagaggaggtggtccgcatgggcgtactggcctcctaactcacccccttccctgtcccaggccctgccctggtccccccacaaggcctcagcccagtcacaactgccatttccagtctctgctgagtgtcccagaccctcgaggctgccactccgtcgtggttttatttttaatatagagagagttttgaattct

SEQ ID NO: 11681 - protein, 850 aa, Homo sapiens
MVPTAAIAVGGYFLGGMEEKRRKYSISSDNSDTTDSHATSTSASRCSKLPSSTKSGWPRQNEKKPSEVFRTDLITAMKIPDSYQLSPDDYYILADPWRQEWEKGVQVPAGAEAIPEPVVRILPPLEGPPAQASPSSTMLGEGSQPDWPGGSRYDLDEIDAYWLELINSELKEMERPELDELTLERVLEELETLCHQNMARAIETQEGLGIEYDEDVVCDVCRSPEGEDGNEMVFCDKCNVCVHQACYGILKVPTGSWLCRTCALGVQPKCLLCPKRGGALKPTRSGTKWVHVSCALWIPEVSIGCPEKMEPITKISHIPASRWALSCSLCKECTGTCIQCSMPSCVTAFHVTCAFDHGLEMRTILADNDEVKFKSFCQEHSDGGPRNEPTSEPTEPSQAGEDLEKVTLRKQRLQQLEEDFYELVEPAEVAERLDLAEALVDFIYQYWKLKRKANANQPLLTPKTDEVDNLAQQEQDVLYRRLKLFTHLRQDLERVRNLCYMVTRRERTKHAICKLQEQIFHLQMKLIEQDLCRERSGRRAKGKKSDSKRKGCEGSKGSTEKKEKVKAGPDSVLGQLAGLSTSFPIDGTFFNSWLAQSVQITAENMAMSEWPLNNGHREDPAPGLLSEELLQDEETLLSFMRDPSLRPGDPARKARGRTRLPAKKKPPPPPPQDGPGSRTTPDKAPKKTWGQDAGSGKGGQGPPTRKPPRRTSSHLPSSPAAGDCPILATPESPPPLAPETPDEAASVAADSDVQVPGPAASPKPLGRLRPPRESKVTRRLPGARPDAGMGPPSAVAERPKVSLHFDTETDGYFSDGEMSDSDVEAEDGGVQRGPREAGAEEVVRMGVLAS

SEQ ID NO: 11682 - DNA, 6502 bp, Homo sapiens
aaaaagaaacagaaacatacacagggggttggtgaatggtgccgaccgcggccatcgcagttggaggctattttttgggggggatggaagagaagaggcgaaaatactccatcagcagtgacaactctgacaccactgacagtcatgcgacatctacatccgcatcaagatgctccaaactgcccagcagcaccaagtcgggctggccccgacagaacgaaaagaagccctccgaggttttccggacagacttgatcacagccatgaagatcccggactcataccagctcagcccggatgactactacatcctggcagacccatggcgacaggaatgggagaaaggtgtgcaggtgcctgccggggcagaggccatcccagagcccgtggtgaggatcctcccaccactggaaggcccccctgcccaggcatccccgagcagcaccatgcttggtgagggctcccagcctgattggccagggggcagccgctatgacttggacgagattgatgcctactggctggagctcatcaactcggagcttaaggagatggagaggccggagctggacgagctgacattagagcgtgtgctggaggagctggagaccctgtgccaccagaatatggccagggccattgagacgcaggaggggctgggcatcgagtacgacgaggatgttgtctgcgacgtgtgtcgctctcctgagggcgaggatggcaacgagatggtcttctgtgacaagtgcaacgtctgtgtgcatcaggcatgctacgggatcctcaaggtgcccacgggcagctggctgtgccggacgtgtgccctgggtgtccagccaaagtgcctgctctgccccaagcgaggaggagccttgaagcccactagaagtgggaccaagtgggtgcatgtcagctgtgccctatggattcctgaggtcagcatcggctgcccagagaagatggagcccatcaccaagatctcgcatatcccagccagccgctgggctctgtcctgcagcctctgcaaggaatgcacaggcacctgcatccagtgttccatgccttcctgcgtcacagcgttccatgtcacatgcgcctttgaccacggcctggaaatgcggactatattagcagacaacgatgaggtcaagttcaagtcattctgccaggagcacagtgacgggggcccacgtaatgagcccacatctgagcccacggaacccagccaggctggcgaggacctggaaaaggtgaccctgcgcaagcagcggctgcagcagctagaggaggacttctacgagctggtggagccggctgaggtggctgagcggctggacctggctgaggcactggtcgacttcatctaccagtactggaagctgaagaggaaagccaatgccaaccagccgctgctgacccccaagaccgacgaggtggacaacctggcccagcaggagcaggacgtcctctaccgccgcctgaagctcttcacccatctgcggcaggacctagagagggttagaaatctgtgctacatggtgacaaggcgcgagagaacgaaacacgccatctgcaaactccaggagcagatattccacctgcagatgaaacttattgaacaggatctgtgtcgagagcggtctgggaggagagcaaagggcaagaagagtgactcgaagaggaagggctgcgagggctccaagggcagcactgagaagaaagagaaagtgaaggcggggcctgactcagtcctggggcagctggcaggcctgtccacctcattccccatcgatggcaccttcttcaacagctggctggcacagtcggtgcagatcacagcagagaacatggccatgagcgagtggccactgaacaatgggcaccgcgaggaccctgctccagggctgctgtcagaggaactgctgcaggacgaggagacactgctcagcttcatgcgggacccctcgctgcgacctggtgaccctgctaggaaggcccgaggccgcacccgcctgcctgccaagaagaaaccaccaccaccaccaccgcaggacgggcctggttcacggacgactccagacaaagcccccaagaagacctggggccaggatgcaggcagtggcaaggggggtcaagggccacctaccaggaagccaccacgtcggacatcttctcacttgccgtccagccctgcagccggggactgtcccatcctagccacccctgaaagccccccgccactggcccctgagaccccggacgaggcagcctcagtagctgctgactcagatgtccaagtgcctggccctgcagcaagccctaagcctttgggccggctccggccaccccgcgagagcaaggtaacccggagattgccgggtgccaggcctgatgctgggatgggaccaccttcagctgtggctgagaggcccaaggtcagcctgcattttgacactgagactgatggctacttctctgatggggagatgagcgactcagatgtagaggccgaggacggtggggtgcagcggggtccccgggaggcaggggcagaggaggtggtccgcatgggcgtactggcctcctaactcacccccttccctgtcccaggccctgccctggtccccccacaaggcctcagcccagtcacaactgccatttccagtctctgctgagtgtcccagaccctcgaggctgccactccgtcgtggttttatttttaatatagagagagttttgaattctacactgttgtctttcctctgtgctggcctaggacattaggattccttccacggctccggccgctaggaccctgccaggtcccgcgcaccatccctgccctgcccacgtggtattgctgggctcctggctagatgcaagcaaggtggacaagagctcaggactccagcccactgccactgggtgacacagactgtcgtttgggcattatttcatggcagatgggccagtccagggcctaccccgccttgcccccagatcccactggggtccatttggggggtcctgctacactccaccgatccccaaggaagtataataaacgatacccagccagagtctactcactgtcacaagcacaacgagtttatatgagaaagcactgagggggtgcagagggcccgctagttccaggggaactgaaagctgttcctgatcagcccgtatcatctgaggcctgcctgcccaccctgccaccctcccctcccttgctgctctgcccctgccagtgcccagcccagcggctctgggaaggggttcccagaatccctcctgagctgtgccatttactcaggggactcccaaacagccagctgccagtgcaggtggagggctgtaggggagggccagtgcccagacagggtcatggggctcagaccagcccactgtagagaatcactctgaggctccaacttccttccttccttcggggccagtctcggccgaagtctggtcacgctcagacagagctgaccagaccagaccgtttgccttttcaagtttcctagtcctgctacaagatgagcttcttccgtggtttccttttggaaactcctccttccaacaagcagtgggatcccggggcccagggcgggccggtgttggccgctggggctgttgtaagtcttgctggatgttcccctgttcctgagccttaacccctcgcacagccatccccccccccgtcctgccatccccccccgccgtcctgccttccccaccccacccttaggtcccaggtagttgctctgaagagtttcagtagagtggccccagggtgatagctcagggaacaacaaaaaaggaattccgtgaaaacatttttttttctttgatgaattactcctgggtcacttccaccactggtaaagccagaacttctccaaaaagaaccttgcaaaaagtccagtgaatcagtcgaatcattctgtggatgccaaagaatattttgaccataatacagcacagcctggacctgacaacttgtcatttggacttttttttaaatggagttctttagcaacaaagtatagaaacatgttcattgcacacacccaaggagaagagctcaagcgcttggaagaggatgctttgctgctgctgaagtgtacctgggtgttagatttcagatcctgggctgagcccactgtgagctttcctaaactgtgagactcacagaggggaaagatactgacggtgaaaccagcatggaaaacgtctttaccatgtggttccctcctccccaaatacataaagcaaataagcaggatggggaacagcttgaccttcatccacccctaactccaaaactatcaaggtacgacagtggcattgtcatcgacactcaatttcatgtgaattttagcaaaacaggaaacaaagataatgactcagttcagaggatcggacaaatgtgtctagtccgggtggactcggagggagtggggtgggcttcaaggattctgggcgttgggatggcatgagctaccctgtagagtttagtctgcctgcccgccttggtagtagtgaccagtcagtgtcagcatcagtgtcccaaccccagtctctgtttactgcctttgaacagaacttcttccttccccatgctttgggtcacctcgggctgcaaccctgtctgtgccagattgcccggtctgaccctgcaggaagcaaagaggtgagcttaaagaacaaccaaactctgccaggggtcccagaaagcccagggtccagcagtctcagcacttggccccttgccccttcacaccatcctggggcaggggctgggcctccctggtggcaggggtgggtggagaattagggagagggtgcaacgagtctggccccttgcctcgggctggctggtgttcttccaagagcctctgctcacattgttggcctctggattctggcccttcttcattggctgttgctttggactggactgttgctgagcctgtgtcctgcagaacccagatgtctgttaggctggctggctgctgcgaggggaggggggtggcctttcatttggggtgccctttcactcccaggccaagccctggagcaatcttcttcaggcagctgtctccacctccaggatgtccagcaggctgcaaggagaaggatgccagccacccatcctcccccagttcccagcctttcccctgttggtcacagccgcttctgtctttttccggtctactgtccccagtgtagagggctttgctgtccctgagactgaggcaggttccttttccaggtcagaggtggaggtagatctttctctcaaccacatctgcctccacacacagctcctccgcagggaaggagaagctgctctgtaactcattctggctatcgtcccccttctcactgacctgaccgcccaccacctccttccccctcatcacatgacaaaggataatgtgcaagaaaagtatttttatgtatcataaatgtattttgaaacaaatgagaagaagaaaggtagaagggtttattttattaaatgagcctgacttagtgacagtgtgtgagcatttgcaatgtaagggcctcagcttccttggagaagccaccccaggtttccagacatagatgttgaattgtttgtggggggtgtgccaggccacgtctcgtgtgtccgtatgcaggcatgcctgtgtatactgtgtatgggcacactgggactagctgggacaattcctagagattcaactgcccaattctaaccaacattggcagcggctgaacttggcatttccttgctaactgccagatgtggccaacctttgtccatatgcaaaccactgaaaaatgatctggatttctatagcaaggcccttggggagggcactctcccatgcccttggcctcgctggccacattggccaatgagccagggctggagtctgagacctttggttgttctttaaggcacctcctgccactttctccctcagaggcacaaacactttgtgttccacgtcagtttgaggggacggtggggggatgatatgaatgtcacaggaggagacaccttctgtctttgtttcaaagaaagtgatgtgccatttgttaatatacaagagaaatattgaaaatatattgaaaagagcaattttaaattatttttggcttatgttgcaatatttattttcttgtattagaaaagattcctttgtagagaaaaaatgtatttttcattaacgcaaagacctatttctcctttttgtacattgtccatgtgcgcaacccttaacgagcaatagaatgtatggtcacctgggtgtggccagtgcccgctgtgccctgcatgattctgtgttgccgctgctgcatagttcccagccccatcctgtcctgctcactcatgggggcttccagaccccggccccaccagggcttgtgtcatagggagccctttgcactcctcgtgtgttggcaaacgcagttaataaagcagtgttttctgtgctgg

SEQ ID NO: 11683 - protein, 850 aa, Homo sapiens; identical to SEQ ID NO: 11681

SEQ ID NO: 11684 - DNA, 6466 bp, Homo sapiens
ctctcttgctcgctcgctccctctctctcctgctggctgcctgttctaggaagccagcgcggagaggggggggatgcacagcacaggggagagagattgcgcatgttggtcagtcgtgttttaaagagtacagtgcggggaggctgagaggggcgcatgcaacaacaacttttggaaggatggaagagaagaggcgaaaatactccatcagcagtgacaactctgacaccactgacagtcatgcgacatctacatccgcatcaagatgctccaaactgcccagcagcaccaagtcgggctggccccgacagaacgaaaagaagccctccgaggttttccggacagacttgatcacagccatgaagatcccggactcataccagctcagcccggatgactactacatcctggcagacccatggcgacaggaatgggagaaaggtgtgcaggtgcctgccggggcagaggccatcccagagcccgtggtgaggatcctcccaccactggaaggcccccctgcccaggcatccccgagcagcaccatgcttggtgagggctcccagcctgattggccagggggcagccgctatgacttggacgagattgatgcctactggctggagctcatcaactcggagcttaaggagatggagaggccggagctggacgagctgacattagagcgtgtgctggaggagctggagaccctgtgccaccagaatatggccagggccattgagacgcaggaggggctgggcatcgagtacgacgaggatgttgtctgcgacgtgtgtcgctctcctgagggcgaggatggcaacgagatggtcttctgtgacaagtgcaacgtctgtgtgcatcaggcatgctacgggatcctcaaggtgcccacgggcagctggctgtgccggacgtgtgccctgggtgtccagccaaagtgcctgctctgccccaagcgaggaggagccttgaagcccactagaagtgggaccaagtgggtgcatgtcagctgtgccctatggattcctgaggtcagcatcggctgcccagagaagatggagcccatcaccaagatctcgcatatcccagccagccgctgggctctgtcctgcagcctctgcaaggaatgcacaggcacctgcatccagtgttccatgccttcctgcgtcacagcgttccatgtcacatgcgcctttgaccacggcctggaaatgcggactatattagcagacaacgatgaggtcaagttcaagtcattctgccaggagcacagtgacgggggcccacgtaatgagcccacatctgagcccacggaacccagccaggctggcgaggacctggaaaaggtgaccctgcgcaagcagcggctgcagcagctagaggaggacttctacgagctggtggagccggctgaggtggctgagcggctggacctggctgaggcactggtcgacttcatctaccagtactggaagctgaagaggaaagccaatgccaaccagccgctgctgacccccaagaccgacgaggtggacaacctggcccagcaggagcaggacgtcctctaccgccgcctgaagctcttcacccatctgcggcaggacctagagagggttagaaatctgtgctacatggtgacaaggcgcgagagaacgaaacacgccatctgcaaactccaggagcagatattccacctgcagatgaaacttattgaacaggatctgtgtcgaggcctgtccacctcattccccatcgatggcaccttcttcaacagctggctggcacagtcggtgcagatcacagcagagaacatggccatgagcgagtggccactgaacaatgggcaccgcgaggaccctgctccagggctgctgtcagaggaactgctgcaggacgaggagacactgctcagcttcatgcgggacccctcgctgcgacctggtgaccctgctaggaaggcccgaggccgcacccgcctgcctgccaagaagaaaccaccaccaccaccaccgcaggacgggcctggttcacggacgactccagacaaagcccccaagaagacctggggccaggatgcaggcagtggcaaggggggtcaagggccacctaccaggaagccaccacgtcggacatcttctcacttgccgtccagccctgcagccggggactgtcccatcctagccacccctgaaagccccccgccactggcccctgagaccccggacgaggcagcctcagtagctgctgactcagatgtccaagtgcctggccctgcagcaagccctaagcctttgggccggctccggccaccccgcgagagcaaggtaacccggagattgccgggtgccaggcctgatgctgggatgggaccaccttcagctgtggctgagaggcccaaggtcagcctgcattttgacactgagactgatggctacttctctgatggggagatgagcgactcagatgtagaggccgaggacggtggggtgcagcggggtccccgggaggcaggggcagaggaggtggtccgcatgggcgtactggcctcctaactcacccccttccctgtcccaggccctgccctggtccccccacaaggcctcagcccagtcacaactgccatttccagtctctgctgagtgtcccagaccctcgaggctgccactccgtcgtggttttatttttaatatagagagagttttgaattctacactgttgtctttcctctgtgctggcctaggacattaggattccttccacggctccggccgctaggaccctgccaggtcccgcgcaccatccctgccctgcccacgtggtattgctgggctcctggctagatgcaagcaaggtggacaagagctcaggactccagcccactgccactgggtgacacagactgtcgtttgggcattatttcatggcagatgggccagtccagggcctaccccgccttgcccccagatcccactggggtccatttggggggtcctgctacactccaccgatccccaaggaagtataataaacgatacccagccagagtctactcactgtcacaagcacaacgagtttatatgagaaagcactgagggggtgcagagggcccgctagttccaggggaactgaaagctgttcctgatcagcccgtatcatctgaggcctgcctgcccaccctgccaccctcccctcccttgctgctctgcccctgccagtgcccagcccagcggctctgggaaggggttcccagaatccctcctgagctgtgccatttactcaggggactcccaaacagccagctgccagtgcaggtggagggctgtaggggagggccagtgcccagacagggtcatggggctcagaccagcccactgtagagaatcactctgaggctccaacttccttccttccttcggggccagtctcggccgaagtctggtcacgctcagacagagctgaccagaccagaccgtttgccttttcaagtttcctagtcctgctacaagatgagcttcttccgtggtttccttttggaaactcctccttccaacaagcagtgggatcccggggcccagggcgggccggtgttggccgctggggctgttgtaagtcttgctggatgttcccctgttcctgagccttaacccctcgcacagccatccccccccccgtcctgccatccccccccgccgtcctgccttccccaccccacccttaggtcccaggtagttgctctgaagagtttcagtagagtggccccagggtgatagctcagggaacaacaaaaaaggaattccgtgaaaacatttttttttctttgatgaattactcctgggtcacttccaccactggtaaagccagaacttctccaaaaagaaccttgcaaaaagtccagtgaatcagtcgaatcattctgtggatgccaaagaatattttgaccataatacagcacagcctggacctgacaacttgtcatttggacttttttttaaatggagttctttagcaacaaagtatagaaacatgttcattgcacacacccaaggagaagagctcaagcgcttggaagaggatgctttgctgctgctgaagtgtacctgggtgttagatttcagatcctgggctgagcccactgtgagctttcctaaactgtgagactcacagaggggaaagatactgacggtgaaaccagcatggaaaacgtctttaccatgtggttccctcctccccaaatacataaagcaaataagcaggatggggaacagcttgaccttcatccacccctaactccaaaactatcaaggtacgacagtggcattgtcatcgacactcaatttcatgtgaattttagcaaaacaggaaacaaagataatgactcagttcagaggatcggacaaatgtgtctagtccgggtggactcggagggagtggggtgggcttcaaggattctgggcgttgggatggcatgagctaccctgtagagtttagtctgcctgcccgccttggtagtagtgaccagtcagtgtcagcatcagtgtcccaaccccagtctctgtttactgcctttgaacagaacttcttccttccccatgctttgggtcacctcgggctgcaaccctgtctgtgccagattgcccggtctgaccctgcaggaagcaaagaggtgagcttaaagaacaaccaaactctgccaggggtcccagaaagcccagggtccagcagtctcagcacttggccccttgccccttcacaccatcctggggcaggggctgggcctccctggtggcaggggtgggtggagaattagggagagggtgcaacgagtctggccccttgcctcgggctggctggtgttcttccaagagcctctgctcacattgttggcctctggattctggcccttcttcattggctgttgctttggactggactgttgctgagcctgtgtcctgcagaacccagatgtctgttaggctggctggctgctgcgaggggaggggggtggcctttcatttggggtgccctttcactcccaggccaagccctggagcaatcttcttcaggcagctgtctccacctccaggatgtccagcaggctgcaaggagaaggatgccagccacccatcctcccccagttcccagcctttcccctgttggtcacagccgcttctgtctttttccggtctactgtccccagtgtagagggctttgctgtccctgagactgaggcaggttccttttccaggtcagaggtggaggtagatctttctctcaaccacatctgcctccacacacagctcctccgcagggaaggagaagctgctctgtaactcattctggctatcgtcccccttctcactgacctgaccgcccaccacctccttccccctcatcacatgacaaaggataatgtgcaagaaaagtatttttatgtatcataaatgtattttgaaacaaatgagaagaagaaaggtagaagggtttattttattaaatgagcctgacttagtgacagtgtgtgagcatttgcaatgtaagggcctcagcttccttggagaagccaccccaggtttccagacatagatgttgaattgtttgtggggggtgtgccaggccacgtctcgtgtgtccgtatgcaggcatgcctgtgtatactgtgtatgggcacactgggactagctgggacaattcctagagattcaactgcccaattctaaccaacattggcagcggctgaacttggcatttccttgctaactgccagatgtggccaacctttgtccatatgcaaaccactgaaaaatgatctggatttctatagcaaggcccttggggagggcactctcccatgcccttggcctcgctggccacattggccaatgagccagggctggagtctgagacctttggttgttctttaaggcacctcctgccactttctccctcagaggcacaaacactttgtgttccacgtcagtttgaggggacggtggggggatgatatgaatgtcacaggaggagacaccttctgtctttgtttcaaagaaagtgatgtgccatttgttaatatacaagagaaatattgaaaatatattgaaaagagcaattttaaattatttttggcttatgttgcaatatttattttcttgtattagaaaagattcctttgtagagaaaaaatgtatttttcattaacgcaaagacctatttctcctttttgtacattgtccatgtgcgcaacccttaacgagcaatagaatgtatggtcacctgggtgtggccagtgcccgctgtgccctgcatgattctgtgttgccgctgctgcatagttcccagccccatcctgtcctgctcactcatgggggcttccagaccccggccccaccagggcttgtgtcatagggagccctttgcactcctcgtgtgttggcaaacgcagttaataaagcagtgttttctgtgctgg

SEQ ID NO: 11685 - protein, 790 aa, Homo sapiens; identical to SEQ ID NO: 1112

SEQ ID NO: 11686 - DNA, 310 bp, Homo sapiens
tgcggatccgtccctgaagcgggacgcgaaccggcagagttgggagaagagcctccaaccccaggagccgagcatgtgcgtatcaacaaaatgaaactcggggagacaggagggcagatagctccaggttctcggagcccccgcccgggccgctcgacctccccaccgtacccatctcccgccgcagcccctacgcccggccggagcccgcggggaagttgcagccctggcgcgcccccgcccgcccgcgccccctcgccggcccgggggcgctttgccgcagtcattaataaagaaggtcgccaagctc

SEQ ID NO: 11687 - protein, 72 aa, Homo sapiens
MKLGETGGQIAPGSRSPRPGRSTSPPYPSPAAAPTPGRSPRGSCSPGAPPPARAPSPARGRFAAVINKEGRQ

SEQ ID NO: 11688 - DNA, 4278 bp, Homo sapiens
acattagagcgtgtgctggaggagctggagaccctgtgccaccagaatatggccagggccattgagacgcaggatgcctggccctgcagcaagccctaagcctttgggccggctccggccaccccgcgagagcaaggtaacccggagattgccgggtgccaggcctgatgctgggatgggaccaccttcagctgtggctgagaggcccaaggtcagcctgcattttgacactgagactgatggctacttctctgatggggagatgagcgactcagatgtagaggccgaggacggtggggtgcagcggggtccccgggaggcaggggcagaggaggtggtccgcatgggcgtactggcctcctaactcacccccttccctgtcccaggccctgccctggtccccccacaaggcctcagcccagtcacaactgccatttccagtctctgctgagtgtcccagaccctcgaggctgccactccgtcgtggttttatttttaatatagagagagttttgaattctacactgttgtctttcctctgtgctggcctaggacattaggattccttccacggctccggccgctaggaccctgccaggtcccgcgcaccatccctgccctgcccacgtggtattgctgggctcctggctagatgcaagcaaggtggacaagagctcaggactccagcccactgccactgggtgacacagactgtcgtttgggcattatttcatggcagatgggccagtccagggcctaccccgccttgcccccagatcccactggggtccatttggggggtcctgctacactccaccgatccccaaggaagtataataaacgatacccagccagagtctactcactgtcacaagcacaacgagtttatatgagaaagcactgagggggtgcagagggcccgctagttccaggggaactgaaagctgttcctgatcagcccgtatcatctgaggcctgcctgcccaccctgccaccctcccctcccttgctgctctgcccctgccagtgcccagcccagcggctctgggaaggggttcccagaatccctcctgagctgtgccatttactcaggggactcccaaacagccagctgccagtgcaggtggagggctgtaggggagggccagtgcccagacagggtcatggggctcagaccagcccactgtagagaatcactctgaggctccaacttccttccttccttcggggccagtctcggccgaagtctggtcacgctcagacagagctgaccagaccagaccgtttgccttttcaagtttcctagtcctgctacaagatgagcttcttccgtggtttccttttggaaactcctccttccaacaagcagtgggatcccggggcccagggcgggccggtgttggccgctggggctgttgtaagtcttgctggatgttcccctgttcctgagccttaacccctcgcacagccatccccccccccgtcctgccatccccccccgccgtcctgccttccccaccccacccttaggtcccaggtagttgctctgaagagtttcagtagagtggccccagggtgatagctcagggaacaacaaaaaaggaattccgtgaaaacatttttttttctttgatgaattactcctgggtcacttccaccactggtaaagccagaacttctccaaaaagaaccttgcaaaaagtccagtgaatcagtcgaatcattctgtggatgccaaagaatattttgaccataatacagcacagcctggacctgacaacttgtcatttggacttttttttaaatggagttctttagcaacaaagtatagaaacatgttcattgcacacacccaaggagaagagctcaagcgcttggaagaggatgctttgctgctgctgaagtgtacctgggtgttagatttcagatcctgggctgagcccactgtgagctttcctaaactgtgagactcacagaggggaaagatactgacggtgaaaccagcatggaaaacgtctttaccatgtggttccctcctccccaaatacataaagcaaataagcaggatggggaacagcttgaccttcatccacccctaactccaaaactatcaaggtacgacagtggcattgtcatcgacactcaatttcatgtgaattttagcaaaacaggaaacaaagataatgactcagttcagaggatcggacaaatgtgtctagtccgggtggactcggagggagtggggtgggcttcaaggattctgggcgttgggatggcatgagctaccctgtagagtttagtctgcctgcccgccttggtagtagtgaccagtcagtgtcagcatcagtgtcccaaccccagtctctgtttactgcctttgaacagaacttcttccttccccatgctttgggtcacctcgggctgcaaccctgtctgtgccagattgcccggtctgaccctgcaggaagcaaagaggtgagcttaaagaacaaccaaactctgccaggggtcccagaaagcccagggtccagcagtctcagcacttggccccttgccccttcacaccatcctggggcaggggctgggcctccctggtggcaggggtgggtggagaattagggagagggtgcaacgagtctggccccttgcctcgggctggctggtgttcttccaagagcctctgctcacattgttggcctctggattctggcccttcttcattggctgttgctttggactggactgttgctgagcctgtgtcctgcagaacccagatgtctgttaggctggctggctgctgcgaggggaggggggtggcctttcatttggggtgccctttcactcccaggccaagccctggagcaatcttcttcaggcagctgtctccacctccaggatgtccagcaggctgcaaggagaaggatgccagccacccatcctcccccagttcccagcctttcccctgttggtcacagccgcttctgtctttttccggtctactgtccccagtgtagagggctttgctgtccctgagactgaggcaggttccttttccaggtcagaggtggaggtagatctttctctcaaccacatctgcctccacacacagctcctccgcagggaaggagaagctgctctgtaactcattctggctatcgtcccccttctcactgacctgaccgcccaccacctccttccccctcatcacatgacaaaggataatgtgcaagaaaagtatttttatgtatcataaatgtattttgaaacaaatgagaagaagaaaggtagaagggtttattttattaaatgagcctgacttagtgacagtgtgtgagcatttgcaatgtaagggcctcagcttccttggagaagccaccccaggtttccagacatagatgttgaattgtttgtggggggtgtgccaggccacgtctcgtgtgtccgtatgcaggcatgcctgtgtatactgtgtatgggcacactgggactagctgggacaattcctagagattcaactgcccaattctaaccaacattggcagcggctgaacttggcatttccttgctaactgccagatgtggccaacctttgtccatatgcaaaccactgaaaaatgatctggatttctatagcaaggcccttggggagggcactctcccatgcccttggcctcgctggccacattggccaatgagccagggctggagtctgagacctttggttgttctttaaggcacctcctgccactttctccctcagaggcacaaacactttgtgttccacgtcagtttgaggggacggtggggggatgatatgaatgtcacaggaggagacaccttctgtctttgtttcaaagaaagtgatgtgccatttgttaatatacaagagaaatattgaaaatatattgaaaagagcaattttaaattatttttggcttatgttgcaatatttattttcttgtattagaaaagattcctttgtagagaaaaaatgtatttttcattaacgcaaagacctatttctcctttttgtacattgtccatgtgcgcaacccttaacgagcaatagaatgtatggtcacctgggtgtggccagtgcccgctgtgccctgcatgattctgtgttgccgctgctgcatagttcccagccccatcctgtcctgctcactcatgggggcttccagaccccggccccaccagggcttgtgtcatagggagccctttgcactcctcgtgtgttggcaaacgcagttaataaagcagtgttttctgtgctgg

SEQ ID NO: 11689 - protein, 96 aa, Homo sapiens
MPGPAASPKPLGRLRPPRESKVTRRLPGARPDAGMGPPSAVAERPKVSLHFDTETDGYFSDGEMSDSDVEAEDGGVQRGPREAGAEEVVRMGVLAS

SEQ ID NO: 11690 - DNA, 2985 bp, Homo sapiens
caaggcccacgcagtcttaagcacatacacacagtcaactacacacactgacggcacactcacacattcacagacaatttaagattagtctcagatgagcacacactaacacactcatccagtggtgagcttgggagagtgaggaggaattccggcctttgagccatgcttgtttggtgtcaggagggacttgggattcaggggctcagccactgccctgtctgcccaccacctagtttcagcagacaaacccccattttggagatccctggaggcaggctggggatgagaggaatgatgcagccccctgtgtcctgcccaggtcagcatcggctgcccagagaagatggagcccatcaccaagatctcgcatatcccagccagccgctgggctctgtcctgcagcctctgcaaggaatgcacaggcacctgcatccagtgttccatgccttcctgcgtcacagcgttccatgtcacatgcgcctttgaccacggcctggaaatgcggactatattagcagacaacgatgaggtcaagttcaagtcattctgccaggagcacagtgacgggggcccacgtaatgagcccacatctgagcccacggaacccagccaggctggcgaggacctggaaaaggtgaccctgcgcaagcagcggctgcagcagctagaggaggacttctacgagctggtggagccggctgaggtggctgagcggctggacctggctgaggcactggtcgacttcatctaccagtactggaagctgaagaggaaagccaatgccaaccagccgctgctgacccccaagaccgacgaggtggacaacctggcccagcaggagcaggacgtcctctaccgccgcctgaagctcttcacccatctgcggcaggacctagagagggttagaaatctgtgctacatggtgacaaggcgcgagagaacgaaacacgccatctgcaaactccaggagcagatattccacctgcagatgaaacttattgaacaggatctgtgtcgaggtaggcgccttccccacctgccgccgccacctccctgtgccctctcttgcggggctgggtcccaaggagggtgtgtctttggatcctggtgggggtatgtgcgtggagccaagggccactggcccccactcctacccttcaccatccaattagtaggcccagacgggggcctgcaagggtcctgagttgtgcgtcactaggcagagagccagaggttggaatgtgggcatcaggcctgccctcagggagctttctggttgactaggccacagcagttcaggagctgattgcatgtgaacaggtacagagaagaagtcctagtggctctctgctggtgctgaggcaggaagggccagaagctggtgagcttccctgaaccctggtgtgcctgggagtcagttccgaagaaggcagctgtcccagagatgtgacaggacctggctgttgtttctctctgaccctaacaggatttatgccctgcatccgcggtgtttttcactgtttcattcttattattcttattctcttggcgtcacatgcgtttagtggatctggaaatcaaaggctgaaggaagcgctgacattgatcgtatctgttaattgtggatattgccagacacagggcccttcttggagcgtatacatgttaagaagggcaacacttagcccccaaaacagtaccccagtgttgcgtttacatgcagcagaaatagctggatggagagagattttgagccagggtctgccaatgccacttcagcctcagggctgagctgggcctggagaggaaagctgctgagccaccgttggagcaaatgactgaggacctctgctgcccctacttctgccccagagctgagctgacctgattgtgctttggcatcaccacccactctggccccaacatctagccttgccaagttcaggtgctagtcatgaccatgtagagctcaccgtgtacccaaagactgtggcagcttcctggctgctggagctttccaggccccctatcttctgtttattcactcagccagcattaactgagcatggactggatagggttgctgcccttgtggaatgcaccatctggagagagagaggaatgtggtatcgcagacgctacagttgctgccagtttagggatagaagtatcagggatgtcttcccagaagcagtgatgctccaacaacatctcaggcacttggctgtggccacatatcggctgcagaaggagaagcccatgcaaggcacccacagttgaggaagcagagggtggcaagccacgagcagtgccctcaggcacaggattccagaagcatgggcaagagcctggagggtccacatccccacattggttctggggacatttgcaactccttgtcttgagtgtcaacaacaggcagctctttgttcagggcagggcagggtatttggagatgactggtttgccctgtccaaagctgctgctcacactgttgagaggcttgacgcctggggtgggacatgggctgtgtgcatatcggcgaggctgtctggcctggcggctggacaaagcctcctagtggagatgatatttggcctgtgaactgaatcaggtgaaggataggagaagaaaacagcatatttggagacttagtggccagagcatgtcttggcagagaaactggaaggaggctggaatggctgcaccaggcagaaggaagactcctaaagtggggatgacgggtaacctgggtcacatgtgcgagatcttcttgtagcctgggggaggagcttacactgtcctgagagcagtggggagcctcaggagcctgcctccagagtatctaggcattagttacatgccatgttacagatgagattgcccaggcacagtggctcatgcctaaaatcccagcactttgggagaccacagtgggaagatcacttgaagccaggagttccagaccagcctgtctctaca

SEQ ID NO: 11691 - protein, 286 aa, Homo sapiens
MEPITKISHIPASRWALSCSLCKECTGTCIQCSMPSCVTAFHVTCAFDHGLEMRTILADNDEVKFKSFCQEHSDGGPRNEPTSEPTEPSQAGEDLEKVTLRKQRLQQLEEDFYELVEPAEVAERLDLAEALVDFIYQYWKLKRKANANQPLLTPKTDEVDNLAQQEQDVLYRRLKLFTHLRQDLERVRNLCYMVTRRERTKHAICKLQEQIFHLQMKLIEQDLCRGRRLPHLPPPPPCALSCGAGSQGGCVFGSWWGYVRGAKGHWPPLLPFTIQLVGPDGGLQGS

SEQ ID NO: 11692 - DNA, 1251 bp, Homo sapiens
agagcggtctgggaggagagcaaagggcaagaagagtgactcgaagaggaagggctgcgagggctccaagggcagcactgagaagaaagagaaagtgaaggcggggcctgactcagtcctggggcagctgggtgagtgagggccatgctggcctgcagacacggcaggcttgaccatcaccacgcttgcagctctgtctgccctgcggaaggccagctgcacagagtaggagactgaggctcaagagcggtaaccaggcccttgcttgcccaggcctgtccacctcattccccatcgatggcaccttcttcaacagctggctggcacagtcggtgcagatcacagcagagaacatggccatgagcgagtggccactgaacaatgggcaccgcgaggaccctgctccagggctgctgtcagaggaactgctgcaggacgaggagacactgctcagcttcatgcgggacccctcgctgcgacctggtgaccctgctaggaaggcccgaggccgcacccgcctgcctgccaagaagaaaccaccaccaccaccaccgcaggacgggcctggttcacggacgactccagacaaagcccccaagaagacctggggccaggatgcaggcagtggcaaggggggtcaagggccacctaccaggaagccaccacgtcggacatcttctcacttgccgtccagccctgcagccggggactgtcccatcctagccacccctgaaagccccccgccactggcccctgagaccccggacgaggcagcctcagtagctgctgactcagatgtccaagtgcctggccctgcagcaagccctaagcctttgggccggctccggccaccccgcgagagcaaggtaacccggagattgccgggtgccaggcctgatgctgggatgggaccaccttcagctgtggctgagaggcccaaggtcagcctgcattttgacactgagactgatggctacttctctgatggggagatgagcgactcagatgtagaggccgaggacggtggggtgcagcggggtccccgggaggcaggggcagaggaggtggtccgcatgggcgtactggcctcctaactcacccccttccctgtcccaggccctgccctggtccccccacaaggcctcagcccagtcacaactgccatttccagtctctgctgagtgtcccagaccctcgaggctgccactccgtcgtggttttatttttaatatagagagagttttgaattct

SEQ ID NO: 11693 - protein, 246 aa, Homo sapiens
MAMSEWPLNNGHREDPAPGLLSEELLQDEETLLSFMRDPSLRPGDPARKARGRTRLPAKKKPPPPPPQDGPGSRTTPDKAPKKTWGQDAGSGKGGQGPPTRKPPRRTSSHLPSSPAAGDCPILATPESPPPLAPETPDEAASVAADSDVQVPGPAASPKPLGRLRPPRESKVTRRLPGARPDAGMGPPSAVAERPKVSLHFDTETDGYFSDGEMSDSDVEAEDGGVQRGPREAGAEEVVRMGVLAS

SEQ ID NO: 11694 - DNA, 368 bp, Homo sapiens
caggcatgcctgtgtatactgtgtatgggcacactgggactagctgggacaattcctagagattcaactgcccaattctaaccaacattggcagcggctgaacttggcatttccttgctaactgccagatgtggccaacctttgtccatatgcaaaccactgaaaaatgatctggatttctatagcaagtgcccgctgtgccctgcatgattctgtgttgccgctgctgcatagttcccagccccatcctgtcctgctcactcatgggggcttccagaccccggccccaccagggcttgtgtcatagggagccctttgcactcctcgtgtgttggcaaacgcagttaataaagcagtgttttctgtgc

SEQ ID NO: 11695 - protein, 46 aa, Homo sapiens [sequence omitted]

SEQ ID NO: 11696 - DNA, 1144 bp, Homo sapiens
aggggagtatatctctgaaagaactgaatgcccgacccttagaagttttcatgtgtagtgtgctcaaaagacaaggttacggagaaggcttccgctggatggcacagtacattgattaacacaaactcacattggttccaggtctcaacgttcaggcttactcagagatttgattgctcaacatgcataacttgaattcaatagacttttgctggttataaaacagatgttttttagattattaatattaaatcaacttaatttgaatgagaattgaaaactgattcaagtaagtttgagtatcacaatgttagctttctaattccataaaagtacttggtttttacagtttataatctgacatcaccccagcgccatttgtaaagagcaactttccagcagtacatttgaagcactttttaacaacatgaaactataaaccatatttaaaagctcatcatgttaaattttttatgtacttttctggaactagtttttaaattttagattatatgtccacctatcttaagtgtacagttaataattagcttattcaatgattgcatgatgccttacagttttcaataactttttttcttatgcaaacgtcatgcaataaaacaaactctaatgtttggcatccttgttgggcaaatgtttcatttaaatgtgtcttatctagctagtatactctgaaaatttgagtatttaatattaggcatatgaagtggttgttgggaaaggagattccttcagaatatttagaatagcgtttaaggctctcaaggcttaggtatttaccattgctgatggggtctgtgtcctagtccctgtgggattggccttctgaagaaaagcacatttatggtacacaaggttgattctcagtttggtaggctctatagttccatcccagctgtctaattctgaagtgctccagtcttattggtgcccaatggggtaatctgtgcctcttccccaaaagcaatgacaggcaccagtgtctccacatttagatatattcccagtctctgtacatttaacagtactctctggggcaagcaataagtaggaccttgtgtgcagtttcattgtagagacatgtatatctgaggaataaaacagcttgttctgtgtcagtctg

SEQ ID NO: 11697 - protein, 50 aa, Homo sapiens
KFSCVVCSKDKVTEKASAGWHSTLINTNSHWFQVSTFRLTQRFDCSTCIT

SEQ ID NO: 11698 - DNA, 3672 bp, Homo sapiens
aactgttttcagacattgggcaacagctaccacaggactgtgattcctgagagaaaggaaacaactctattttggttttatgccaagaggtaattttcagaccatggtgcaaagagaggacacccaaacatagtccaatagtcttgctgagttgaggagatgtagaccagaatttggaaaggccaacaggactagaatttttttgctaggacagagaggagggagtaccggagaggagggacctctggagagaaaggactctagaaatttacatagctgaataccaatctgtgcatgcaatgggtaaagctccaaaaggctagtcaaagaacaattgtaagaatgctgttagccaaataattactagagctctcatggggccaggaattgttgtttaatcccatttagccttctaacaaatgttaaaaactgatctgtaagcaagtgaactgtcagaacaaaattcaaccttcttcaaaagactacaacaaaatccagcactcaatatgaaattactagacatgcaaagaaacaggaaagtgattcagtcagtagaaacagacacaagtgtgacaaagatgatggaattagcagattaagacataagacaatcgttatgaatgtgctcagggatttaaaggaaaacacaaacatgaggaaagaaatggaagatataacacagaatcaaatgaaacttctagaaatgaaaaatacagtatttgaaatgaaaatttcttttttttctttctttcttttttttaatagagacagggtctccctgggttgcccaggctggtctcgaactcctgggctcaagtgattctcccaccttggcctcccaaagtctgggcttacaggtgtgagctaccatgcccagcctgaaatggaaatttcactggataggattaatagtaaattagatagtgccagtactgcagaaagaaagaccactaaacttaactcaatgcaacagaaactccagaatgaagcacagagagaaaagtgactgaaagcaaaataaacagagcctcaatgactggtgagacaacatcaggcagtctaacaaacctgcaactgaagtcccagaagtggaagggaggagaaagaaagatagttatggaaataatggccacaattttttatggtaattgtttttgtaattaaagactgtcttatgtcagccataagagaaaattatttcacctgtatcatttaagatgaattatatgaacaattattagattggagcagttatttgaattcatagcaaataattgtctgaagagattaacattttcagcaggaagaatagagaaggaaaaataaatgttggatttgtggtgagtagaatactagaactgaatattacaattatttgttatattgtcagtatgaattggtgtatatctaattacaaaaaagtattattgtaccagtttgtaaatgtttgatttgaccttatttgcaataaaagtaaatcaaacattaagtagtaaatataagctattgttagaaatgcttgttccctggtgctgtaaaggatagcacttgaacataaatttaatttcctcagcaaggccatttttactttctgcagaaagggtacacttgccagcagttttgccacaagagtacaccgaacaaaggagacagggtcatttataatctgatgcgtccaccctactgctgtgtccggtttccattggctggaatgggacctcacattctgtatttgtcctgattggctagcaacttagaactttttaaaagaggcaaaggcagaggagaacaaaggaaggaggaagtaacttgtggaatgctgagaaaggtaaaaacaccttcaaataaggaagaggaacaggctatgacctaatgcttgcttggaccagtgtaagtatgccagggcaaatatttaggctaaattgtgggagctaagaacataaagtacattgatttctttattacggctggcagatatttaagaatgttagcacgggtctttgaatcaattttgcttctaagagaagttactatttattcttaattagatggggaggaaagtctttgaaaaggaacctctactttactttttacacgattaatgggtttctaattttcatgtaaaaatattttaaaatcttatttagcttccgaagaactgaccattgctggcatgacgtttacaacttttgatctgggtggacatgttcaagctcgaagagtgtggaaaaactaccttcctgctatcaatggcattgtatttctggtggattgtgcagaccacgaaaggctgttagagtcaaaagaagaacttgattcactaatgacagatgaaaccattgctaatgtgcctatactgattcttgggaataagatcgacagacctgaagccatcagtgaagagaggttgcgagagatgtttggtttatatggtcagacaacaggaaaggggagtatatctctgaaagaactgaatgcccgacccttagaagttttcatgtgtagtgtgctcaaaagacaaggttacggagaaggcttccgctggatggcacagtacattgattaacacaaactcacattggttccaggtctcaacgttcaggcttactcagagatttgattgctcaacatgcataacttgaattcaatagacttttgctggttataaaacagatgttttttagattattaatattaaatcaacttaatttgaatgagaattgaaaactgattcaagtaagtttgagtatcacaatgttagctttctaattccataaaagtacttggtttttacagtttataatctgacatcaccccagcgccatttgtaaagagcaactttccagcagtacatttgaagcactttttaacaacatgaaactataaaccatatttaaaagctcatcatgttaaattttttatgtacttttctggaactagtttttaaattttagattatatgtccacctatcttaagtgtacagttaataattagcttattcaatgattgcatgatgccttacagttttcaataactttttttcttatgcaaacgtcatgcaataaaacaaactctaatgtttggcatccttgttgggcaaatgtttcatttaaatgtgtcttatctagctagtatactctgaaaatttgagtatttaatattaggcatatgaagtggttgttgggaaaggagattccttcagaatatttagaatagcgtttaaggctctcaaggcttaggtatttaccatgagatggttgtggtcagttgcacctgataccatgtatccctgaatcatgtgtatttttattagtaatgcagccactaccattgctgatggggtctgtgtcctagtccctgtgggattggccttctgaagaaaagcacatttatggtacacaaggttgattctcagtttggtaggctctatagttccatcccagctgtctaattctgaagtgctccagtcttattggtgcccaatggggtaatctgtgcctcttccccaaaagcaatgacaggcaccagtgtctccacatttagatatattcccagtctctgtacatttaacagtactctctggggcaagcaataagtaggaccttgtgtgcagtttcattgtagagacatgtatatctgaggaataaaacagcttgttctgtgtcagtctg

SEQ ID NO: 11699 - protein, 130 aa, Homo sapiens
MTFTTFDLGGHVQARRVWKNYLPAINGIVFLVDCADHERLLESKEELDSLMTDETIANVPILILGNKIDRPEAISEERLREMFGLYGQTTGKGSISLKELNARPLEVFMCSVLKRQGYGEGFRWMAQYID

SEQ ID NO: 11700 - DNA, 1573 bp, Homo sapiens
tgctaaaagatgacagacttggacaacatgtcccaacattacatcccacttccgaagaactgaccattgctggcatgacgtttacaacttttgatctgggtggacatgttcaagctcgaagagtgtggaaaaactaccttcctgctatcaatggcattgtatttctggtggattgtgcagaccacgaaaggctgttagagtcaaaagaagaacttgattcactaatgacagatgaaaccattgctaatgtgcctatactgattcttgggaataagatcgacagacctgaagccatcagtgaagagaggttgcgagagatgtttggtttatatggtcagacaacaggaaaggggagtatatctctgaaagaactgaatgcccgacccttagaagttttcatgtgtagtgtgctcaaaagacaaggttacggagaaggcttccgctggatggcacagtacattgattaacacaaactcacattggttccaggtctcaacgttcaggcttactcagagatttgattgctcaacatgcataacttgaattcaatagacttttgctggttataaaacagatgttttttagattattaatattaaatcaacttaatttgaatgagaattgaaaactgattcaagtaagtttgagtatcacaatgttagctttctaattccataaaagtacttggtttttacagtttataatctgacatcaccccagcgccatttgtaaagagcaactttccagcagtacatttgaagcactttttaacaacatgaaactataaaccatatttaaaagctcatcatgttaaattttttatgtacttttctggaactagtttttaaattttagattatatgtccacctatcttaagtgtacagttaataattagcttattcaatgattgcatgatgccttacagttttcaataactttttttcttatgcaaacgtcatgcaataaaacaaactctaatgtttggcatccttgttgggcaaatgtttcatttaaatgtgtcttatctagctagtatactctgaaaatttgagtatttaatattaggcatatgaagtggttgttgggaaaggagattccttcagaatatttagaatagcgtttaaggctctcaaggcttaggtatttaccatgagatggttgtggtcagttgcacctgataccatgtatccctgaatcatgtgtatttttattagtaatgcagccactaccattgctgatggggtctgtgtcctagtccctgtgggattggccttctgaagaaaagcacatttatggtacacaaggttgattctcagtttggtaggctctatagttccatcccagctgtctaattctgaagtgctccagtcttattggtgcccaatggggtaatctgtgcctcttccccaaaagcaatgacaggcaccagtgtctccacatttagatatattcccagtctctgtacatttaacagtactctctggggcaagcaataagtaggaccttgtgtgcagtttcattgtagagacatgtatatctgaggaataaaacagcttgttctgtgtcagtctg

SEQ ID NO: 11701 - protein, 130 aa, Homo sapiens; identical to SEQ ID NO: 11699

SEQ ID NO: 11702 - DNA, 1938 bp, Homo sapiens
gatgcgaactggggccacggcagccatcgcgctttgcagttcggtctcctggtgtacggccaacgccaagtaggggattgcgttccctccagtcgcagagtttccctcttgtcgcccaggctggagtgaagtggcacgatctcggcttactgcaagctccgcctcccgggttcacgccattctcctgcctcagcctcccgagtagctgggactacagaccctatcagatttggatatgtccttcatatttgattggatttacagtggtttcagcagtgtgctacagtttttaggattatataagaaaactggtaaactggtatttcttggattggataatgcaggaaaaacaacattgctacacatgctaaaagatgacagacttggacaacatgtcccaacattacatcccacttccgaagaactgaccattgctggcatgacgtttacaacttttgatctgggtggacatgttcaagctcgaagagtgtggaaaaactaccttcctgctatcaatggcattgtatttctggtggattgtgcagaccacgaaaggctgttagagtcaaaagaagaacttgattcactaatgacagatgaaaccattgctaatgtgcctatactgattcttgggaataagatcgacagacctgaagccatcagtgaagagaggttgcgagagatgtttggtttatatggtcagacaacaggaaaggggagtatatctctgaaagaactgaatgcccgacccttagaagttttcatgtgtagtgtgctcaaaagacaaggttacggagaaggcttccgctggatggcacagtacattgattaacacaaactcacattggttccaggtctcaacgttcaggcttactcagagatttgattgctcaacatgcataacttgaattcaatagacttttgctggttataaaacagatgttttttagattattaatattaaatcaacttaatttgaatgagaattgaaaactgattcaagtaagtttgagtatcacaatgttagctttctaattccataaaagtacttggtttttacagtttataatctgacatcaccccagcgccatttgtaaagagcaactttccagcagtacatttgaagcactttttaacaacatgaaactataaaccatatttaaaagctcatcatgttaaattttttatgtacttttctggaactagtttttaaattttagattatatgtccacctatcttaagtgtacagttaataattagcttattcaatgattgcatgatgccttacagttttcaataactttttttcttatgcaaacgtcatgcaataaaacaaactctaatgtttggcatccttgttgggcaaatgtttcatttaaatgtgtcttatctagctagtatactctgaaaatttgagtatttaatattaggcatatgaagtggttgttgggaaaggagattccttcagaatatttagaatagcgtttaaggctctcaaggcttaggtatttaccatgagatggttgtggtcagttgcacctgataccatgtatccctgaatcatgtgtatttttattagtaatgcagccactaccattgctgatggggtctgtgtcctagtccctgtgggattggccttctgaagaaaagcacatttatggtacacaaggttgattctcagtttggtaggctctatagttccatcccagctgtctaattctgaagtgctccagtcttattggtgcccaatggggtaatctgtgcctcttccccaaaagcaatgacaggcaccagtgtctccacatttagatatattcccagtctctgtacatttaacagtactctctggggcaagcaataagtaggaccttgtgtgcagtttcattgtagagacatgtatatctgaggaataaaacagcttgttctgtgtcagtctg

SEQ ID NO: 11703 - protein, 198 aa, Homo sapiens; identical to SEQ ID NO: 1114

SEQ ID NO: 11704 - DNA, 1916 bp, Homo sapiens
gagaccaggcggctgggagacccaggcggtgttaggggttgcgagcagcctcgctcaactggggaattggcggcaagactgccaggaggcggaacctagggcgctcggcgacgcggtcctgcggactgtcgctagtgaggcacccgccggcccggaaggggctgatgcgaactggggccacggcagccatcgcgctttgcagttcggtctcctggtgtacggccaacgccaagtaggggattgcgttccctccagtcgcagaccctatcagatttggatatgtccttcatatttgattggatttacagtggtttcagcagtgtgctacagtttttaggattatataagaaaactggtaaactggtatttcttggattggataatgcaggaaaaacaacattgctacacatgctaaaagatgacagacttggacaacatgtcccaacattacatcccactcgaagagtgtggaaaaactaccttcctgctatcaatggcattgtatttctggtggattgtgcagaccacgaaaggctgttagagtcaaaagaagaacttgattcactaatgacagatgaaaccattgctaatgtgcctatactgattcttgggaataagatcgacagacctgaagccatcagtgaagagaggttgcgagagatgtttggtttatatggtcagacaacaggaaaggggagtatatctctgaaagaactgaatgcccgacccttagaagttttcatgtgtagtgtgctcaaaagacaaggttacggagaaggcttccgctggatggcacagtacattgattaacacaaactcacattggttccaggtctcaacgttcaggcttactcagagatttgattgctcaacatgcataacttgaattcaatagacttttgctggttataaaacagatgttttttagattattaatattaaatcaacttaatttgaatgagaattgaaaactgattcaagtaagtttgagtatcacaatgttagctttctaattccataaaagtacttggtttttacagtttataatctgacatcaccccagcgccatttgtaaagagcaactttccagcagtacatttgaagcactttttaacaacatgaaactataaaccatatttaaaagctcatcatgttaaattttttatgtacttttctggaactagtttttaaattttagattatatgtccacctatcttaagtgtacagttaataattagcttattcaatgattgcatgatgccttacagttttcaataactttttttcttatgcaaacgtcatgcaataaaacaaactctaatgtttggcatccttgttgggcaaatgtttcatttaaatgtgtcttatctagctagtatactctgaaaatttgagtatttaatattaggcatatgaagtggttgttgggaaaggagattccttcagaatatttagaatagcgtttaaggctctcaaggcttaggtatttaccatgagatggttgtggtcagttgcacctgataccatgtatccctgaatcatgtgtatttttattagtaatgcagccactaccattgctgatggggtctgtgtcctagtccctgtgggattggccttctgaagaaaagcacatttatggtacacaaggttgattctcagtttggtaggctctatagttccatcccagctgtctaattctgaagtgctccagtcttattggtgcccaatggggtaatctgtgcctcttccccaaaagcaatgacaggcaccagtgtctccacatttagatatattcccagtctctgtacatttaacagtactctctggggcaagcaataagtaggaccttgtgtgcagtttcattgtagagacatgtatatctgaggaataaaacagcttgttctgtgtcagtctg

SEQ ID NO: 11705 - protein, 176 aa, Homo sapiens
MSFIFDWIYSGFSSVLQFLGLYKKTGKLVFLGLDNAGKTTLLHMLKDDRLGQHVPTLHPTRRVWKNYLPAINGIVFLVDCADHERLLESKEELDSLMTDETIANVPILILGNKIDRPEAISEERLREMFGLYGQTTGKGSISLKELNARPLEVFMCSVLKRQGYGEGFRWMAQYID

SEQ ID NO: 11706 - DNA, 1982 bp, Homo sapiens
gagaccaggcggctgggagacccaggcggtgttaggggttgcgagcagcctcgctcaactggggaattggcggcaagactgccaggaggcggaacctagggcgctcggcgacgcggtcctgcggactgtcgctagtgaggcacccgccggcccggaaggggctgatgcgaactggggccacggcagccatcgcgctttgcagttcggtctcctggtgtacggccaacgccaagtaggggattgcgttccctccagtcgcagaccctatcagatttggatatgtccttcatatttgattggatttacagtggtttcagcagtgtgctacagtttttaggattatataagaaaactggtaaactggtatttcttggattggataatgcaggaaaaacaacattgctacacatgctaaaagatgacagacttggacaacatgtcccaacattacatcccacttccgaagaactgaccattgctggcatgacgtttacaacttttgatctgggtggacatgttcaagctcgaagagtgtggaaaaactaccttcctgctatcaatggcattgtatttctggtggattgtgcagaccacgaaaggctgttagagtcaaaagaagaacttgattcactaatgacagatgaaaccattgctaatgtgcctatactgattcttgggaataagatcgacagacctgaagccatcagtgaagagaggttgcgagagatgtttggtttatatggtcagacaacaggaaaggggagtatatctctgaaagaactgaatgcccgacccttagaagttttcatgtgtagtgtgctcaaaagacaaggttacggagaaggcttccgctggatggcacagtacattgattaacacaaactcacattggttccaggtctcaacgttcaggcttactcagagatttgattgctcaacatgcataacttgaattcaatagacttttgctggttataaaacagatgttttttagattattaatattaaatcaacttaatttgaatgagaattgaaaactgattcaagtaagtttgagtatcacaatgttagctttctaattccataaaagtacttggtttttacagtttataatctgacatcaccccagcgccatttgtaaagagcaactttccagcagtacatttgaagcactttttaacaacatgaaactataaaccatatttaaaagctcatcatgttaaattttttatgtacttttctggaactagtttttaaattttagattatatgtccacctatcttaagtgtacagttaataattagcttattcaatgattgcatgatgccttacagttttcaataactttttttcttatgcaaacgtcatgcaataaaacaaactctaatgtttggcatccttgttgggcaaatgtttcatttaaatgtgtcttatctagctagtatactctgaaaatttgagtatttaatattaggcatatgaagtggttgttgggaaaggagattccttcagaatatttagaatagcgtttaaggctctcaaggcttaggtatttaccatgagatggttgtggtcagttgcacctgataccatgtatccctgaatcatgtgtatttttattagtaatgcagccactaccattgctgatggggtctgtgtcctagtccctgtgggattggccttctgaagaaaagcacatttatggtacacaaggttgattctcagtttggtaggctctatagttccatcccagctgtctaattctgaagtgctccagtcttattggtgcccaatggggtaatctgtgcctcttccccaaaagcaatgacaggcaccagtgtctccacatttagatatattcccagtctctgtacatttaacagtactctctggggcaagcaataagtaggaccttgtgtgcagtttcattgtagagacatgtatatctgaggaataaaacagcttgttctgtgtcagtctg

SEQ ID NO: 11707 - protein, 198 aa, Homo sapiens; identical to SEQ ID NO: 1114

SEQ ID NO: 11708 - DNA, 2872 bp, Homo sapiens
gaggtcactctctctatctatgtcgcctcaagcagcagtggcacgcaaaggtcagtcagccctggccaggctgcgccctccccccggacagcactcaccgttggtgtagggagaccccgaggccaaggcggctccgttctgggcctggaggctggctggggcgccgccggaggccggtattcccggctgggacatgatgactgggttggaaggggctggtcggggtcgacaacagcgcacaagaagagagctgaaagaccactgctgaaagcggagggaggaggctaacgacttaagactgaagactgggagaagaggggggggcgcattaagcccgaggcatggcgccgcactctccccaggccaccggcggccacagcctagcctgggagctgaggcttgagagtcgggccggcggggccgcgaacgcccggctagaaggcggcagccaaacctagagagaaggagggaggccctggccggaagtgcctgtcagccgccggccgcgcagccgcaatcaggacacgtggcacttccggctccgggctcgcagcagccgccgccgcgccggcgaactcttctctgccagccgggctgccccgaggccacctgacagctcctggtgccccgaccccgacgaccgtgcccggcctcgccgccacgtcaccgactctcacggccggccggaagtgccgtgtgtcaccgctacggaaattcccgccgttgtgaacgtgacctcgctcgcagagccaggatcgtggggcaatctgagattcagtagccgctttcgtggggtgggactgacagttcctctcctcgggttttgtgaagattacctgagaccatagaagtcatcgtcctctgttgagaccgtaccaccactgggagctggggcggttaatgttcatcgcagtatttcattcacatttcgtcttcgtgtttcagatgtaaattataaggggttttaaaaagaggtggttaaatatgtgtacatgttaatagtgtgatcaagccaagaaggaggcctttgtctttgactggaggactcagaggaattttaattttgaaactcgctgattcacagcatagtcacgctcaagttcattagcacatttaaatggcagttttgtttcctcttctaagagtttacagtaaggaaaaacaacattgctacacatgctaaaagatgacagacttggacaacatgtcccaacattacatcccaatggagtctcgctctgtcacccaggctggagtgcagtggcacgatctcgactcactgcaacctccgcctcccaagttcacaccattctcctgcctcagcttcccgagtagctggaactacagcttccgaagaactgaccattgctggcatgacgtttacaacttttgatctgggtggacatgttcaagctcgaagagtgtggaaaaactaccttcctgctatcaatggcattgtatttctggtggattgtgcagaccacgaaaggctgttagagtcaaaagaagaacttgattcactaatgacagatgaaaccattgctaatgtgcctatactgattcttgggaataagatcgacagacctgaagccatcagtgaagagaggttgcgagagatgtttggtttatatggtcagacaacaggaaaggggagtatatctctgaaagaactgaatgcccgacccttagaagttttcatgtgtagtgtgctcaaaagacaaggttacggagaaggcttccgctggatggcacagtacattgattaacacaaactcacattggttccaggtctcaacgttcaggcttactcagagatttgattgctcaacatgcataacttgaattcaatagacttttgctggttataaaacagatgttttttagattattaatattaaatcaacttaatttgaatgagaattgaaaactgattcaagtaagtttgagtatcacaatgttagctttctaattccataaaagtacttggtttttacagtttataatctgacatcaccccagcgccatttgtaaagagcaactttccagcagtacatttgaagcactttttaacaacatgaaactataaaccatatttaaaagctcatcatgttaaattttttatgtacttttctggaactagtttttaaattttagattatatgtccacctatcttaagtgtacagttaataattagcttattcaatgattgcatgatgccttacagttttcaataactttttttcttatgcaaacgtcatgcaataaaacaaactctaatgtttggcatccttgttgggcaaatgtttcatttaaatgtgtcttatctagctagtatactctgaaaatttgagtatttaatattaggcatatgaagtggttgttgggaaaggagattccttcagaatatttagaatagcgtttaaggctctcaaggcttaggtatttaccatgagatggttgtggtcagttgcacctgataccatgtatccctgaatcatgtgtatttttattagtaatgcagccactaccattgctgatggggtctgtgtcctagtccctgtgggattggccttctgaagaaaagcacatttatggtacacaaggttgattctcagtttggtaggctctatagttccatcccagctgtctaattctgaagtgctccagtcttattggtgcccaatggggtaatctgtgcctcttccccaaaagcaatgacaggcaccagtgtctccacatttagatatattcccagtctctgtacatttaacagtactctctggggcaagcaataagtaggaccttgtgtgcagtttcattgtagagacatgtatatctgaggaataaaacagcttgttctgtgtcagtctg

SEQ ID NO: 11709 - protein, 130 aa, Homo sapiens; identical to SEQ ID NO: 11699

SEQ ID NO: 11710 - DNA, 3092 bp, Homo sapiens
aactgttttcagacattgggcaacagctaccacaggactgtgattcctgagagaaaggaaacaactctattttggttttatgccaagaggtaattttcagaccatggtgcaaagagaggacacccaaacatagtccaatagtcttgctgagttgaggagatgtagaccagaatttggaaaggccaacaggactagaatttttttgctaggacagagaggagggagtaccggagaggagggacctctggagagaaaggactctagaaatttacatagctgaataccaatctgtgcatgcaatgggtaaagctccaaaaggctagtcaaagaacaattgtaagaatgctgttagccaaataattactagagctctcatggggccaggaattgttgtttaatcccatttagccttctaacaaatgttaaaaactgatctgtaagcaagtgaactgtcagaacaaaattcaaccttcttcaaaagactacaacaaaatccagcactcaatatgaaattactagacatgcaaagaaacaggaaagtgattcagtcagtagaaacagacacaagtgtgacaaagatgatggaattagcagattaagacataagacaatcgttatgaatgtgctcagggatttaaaggaaaacacaaacatgaggaaagaaatggaagatataacacagaatcaaatgaaacttctagaaatgaaaaatacagtatttgaaatgaaaatttcttttttttctttctttcttttttttaatagagacagggtctccctgggttgcccaggctggtctcgaactcctgggctcaagtgattctcccaccttggcctcccaaagtctgggcttacaggtgtgagctaccatgcccagcctgaaatggaaatttcactggataggattaatagtaaattagatagtgccagtactgcagaaagaaagaccactaaacttaactcaatgcaacagaaactccagaatgaagcacagagagaaaagtgactgaaagcaaaataaacagagcctcaatgactggtgagacaacatcaggcagtctaacaaacctgcaactgaagtcccagaagtggaagggaggagaaagaaagatagttatggaaataatggccacaattttttatggtaattgtttttgtaattaaagactgtcttatgtcagccataagagaaaattatttcacctgtatcatttaagatgaattatatgaacaattattagattggagcagttatttgaattcatagcaaataattgtctgaagagattaacattttcagcaggaagaatagagaaggaaaaataaatgttggatttgtggtgagtagaatactagaactgaatattacaattatttgttatattgtcagtatgaattggtgtatatctaattacaaaaaagtattattgtaccagtttgtaaatgtttgatttgaccttatttgcaataaaagtaaatcaaacattaagtagtaaatataagctattgttagaaatgcttgttccctggtgctgtaaaggatagcacttgaacataaatttaatttcctcagcaaggccatttttactttctgcagaaagggtacacttgccagcagttttgccacaagagtacaccgaacaaaggagacagggtcatttataatctgatgcgtccaccctactgctgtgtccggtttccattggctggaatgggacctcacattctgtatttgtcctgattggctagcaacttagaactttttaaaagaggcaaaggcagaggagaacaaaggaaggaggaagtaacttgtggaatgctgagaaaggtaaaaacaccttcaaataaggaagaggaacaggctatgacctaatgcttgcttggaccagtgtaagtatgccagggcaaatatttaggctaaattgtgggagctaagaacataaagtacattgatttctttattacggctggcagatatttaagaatgttagcacgggtctttgaatcaattttgcttctaagagaagttactatttattcttaattagatggggaggaaagtctttgaaaaggaacctctactttactttttacacgattaatgggtttctaattttcatgtaaaaatattttaaaatcttatttagcttccgaagaactgaccattgctggcatgacgtttacaacttttgatctgggtggacatgttcaagctcgaagagtgtggaaaaactaccttcctgctatcaatggcattgtatttctggtggattgtgcagaccacgaaaggctgttagagtcaaaagaagaacttgattcactaatgacagatgaaaccattgctaatgtgcctatactgattcttgggaataagatcgacagacctgaagccatcagtgaagagaggttgcgagagatgtttggtttatatggtcagacaacaggaaaggggagtatatctctgaaagaactgaatgcccgacccttagaagttttcatgtgtagtgtgctcaaaagacaaggttacggagaaggcttccgctggatggcacagtacattgattaacacaaactcacattggttccaggtctcaacgttcaggcttactcagagatttgattgctcaacatgcataacttgaattcaatagacttttgctggttataaaacagatgttttttagattattaatattaaatcaacttaatttgaatgagaattgaaaactgattcaagtaagtttgagtatcacaatgttagctttctaattccataaaagtacttggtttttacagtttataatctgacatcaccccagcgccatttgtaaagagcaactttccagcagtacatttgaagcactttttaacaacatgaaactataaaccatatttaaaagctcatcatgttaaattttttatgtacttttctggaactagtttttaaattttagattatatgtccacctatcttaagtgtacagttaataattagcttattcaatgattgcatgatgccttacagttttcaataactttttttcttatgcaaacgtcatgcaataaaacaaactctaatgtttggcatcctt

SEQ ID NO: 11711 - protein, 130 aa, Homo sapiens; identical to SEQ ID NO: 11699

SEQ ID NO: 11712 - DNA, 993 bp, Homo sapiens
tgctaaaagatgacagacttggacaacatgtcccaacattacatcccacttccgaagaactgaccattgctggcatgacgtttacaacttttgatctgggtggacatgttcaagctcgaagagtgtggaaaaactaccttcctgctatcaatggcattgtatttctggtggattgtgcagaccacgaaaggctgttagagtcaaaagaagaacttgattcactaatgacagatgaaaccattgctaatgtgcctatactgattcttgggaataagatcgacagacctgaagccatcagtgaagagaggttgcgagagatgtttggtttatatggtcagacaacaggaaaggggagtatatctctgaaagaactgaatgcccgacccttagaagttttcatgtgtagtgtgctcaaaagacaaggttacggagaaggcttccgctggatggcacagtacattgattaacacaaactcacattggttccaggtctcaacgttcaggcttactcagagatttgattgctcaacatgcataacttgaattcaatagacttttgctggttataaaacagatgttttttagattattaatattaaatcaacttaatttgaatgagaattgaaaactgattcaagtaagtttgagtatcacaatgttagctttctaattccataaaagtacttggtttttacagtttataatctgacatcaccccagcgccatttgtaaagagcaactttccagcagtacatttgaagcactttttaacaacatgaaactataaaccatatttaaaagctcatcatgttaaattttttatgtacttttctggaactagtttttaaattttagattatatgtccacctatcttaagtgtacagttaataattagcttattcaatgattgcatgatgccttacagttttcaataactttttttcttatgcaaacgtcatgcaataaaacaaactctaatgtttggcatcctt

SEQ ID NO: 11713 - protein, 130 aa, Homo sapiens; identical to SEQ ID NO: 11699

SEQ ID NO: 11714 - DNA, 1358 bp, Homo sapiens
gatgcgaactggggccacggcagccatcgcgctttgcagttcggtctcctggtgtacggccaacgccaagtaggggattgcgttccctccagtcgcagagtttccctcttgtcgcccaggctggagtgaagtggcacgatctcggcttactgcaagctccgcctcccgggttcacgccattctcctgcctcagcctcccgagtagctgggactacagaccctatcagatttggatatgtccttcatatttgattggatttacagtggtttcagcagtgtgctacagtttttaggattatataagaaaactggtaaactggtatttcttggattggataatgcaggaaaaacaacattgctacacatgctaaaagatgacagacttggacaacatgtcccaacattacatcccacttccgaagaactgaccattgctggcatgacgtttacaacttttgatctgggtggacatgttcaagctcgaagagtgtggaaaaactaccttcctgctatcaatggcattgtatttctggtggattgtgcagaccacgaaaggctgttagagtcaaaagaagaacttgattcactaatgacagatgaaaccattgctaatgtgcctatactgattcttgggaataagatcgacagacctgaagccatcagtgaagagaggttgcgagagatgtttggtttatatggtcagacaacaggaaaggggagtatatctctgaaagaactgaatgcccgacccttagaagttttcatgtgtagtgtgctcaaaagacaaggttacggagaaggcttccgctggatggcacagtacattgattaacacaaactcacattggttccaggtctcaacgttcaggcttactcagagatttgattgctcaacatgcataacttgaattcaatagacttttgctggttataaaacagatgttttttagattattaatattaaatcaacttaatttgaatgagaattgaaaactgattcaagtaagtttgagtatcacaatgttagctttctaattccataaaagtacttggtttttacagtttataatctgacatcaccccagcgccatttgtaaagagcaactttccagcagtacatttgaagcactttttaacaacatgaaactataaaccatatttaaaagctcatcatgttaaattttttatgtacttttctggaactagtttttaaattttagattatatgtccacctatcttaagtgtacagttaataattagcttattcaatgattgcatgatgccttacagttttcaataactttttttcttatgcaaacgtcatgcaataaaacaaactctaatgtttggcatcctt

SEQ ID NO: 11715 - protein, 198 aa, Homo sapiens; identical to SEQ ID NO: 1114

SEQ ID NO: 11716 - DNA, 1336 bp, Homo sapiens
gagaccaggcggctgggagacccaggcggtgttaggggttgcgagcagcctcgctcaactggggaattggcggcaagactgccaggaggcggaacctagggcgctcggcgacgcggtcctgcggactgtcgctagtgaggcacccgccggcccggaaggggctgatgcgaactggggccacggcagccatcgcgctttgcagttcggtctcctggtgtacggccaacgccaagtaggggattgcgttccctccagtcgcagaccctatcagatttggatatgtccttcatatttgattggatttacagtggtttcagcagtgtgctacagtttttaggattatataagaaaactggtaaactggtatttcttggattggataatgcaggaaaaacaacattgctacacatgctaaaagatgacagacttggacaacatgtcccaacattacatcccactcgaagagtgtggaaaaactaccttcctgctatcaatggcattgtatttctggtggattgtgcagaccacgaaaggctgttagagtcaaaagaagaacttgattcactaatgacagatgaaaccattgctaatgtgcctatactgattcttgggaataagatcgacagacctgaagccatcagtgaagagaggttgcgagagatgtttggtttatatggtcagacaacaggaaaggggagtatatctctgaaagaactgaatgcccgacccttagaagttttcatgtgtagtgtgctcaaaagacaaggttacggagaaggcttccgctggatggcacagtacattgattaacacaaactcacattggttccaggtctcaacgttcaggcttactcagagatttgattgctcaacatgcataacttgaattcaatagacttttgctggttataaaacagatgttttttagattattaatattaaatcaacttaatttgaatgagaattgaaaactgattcaagtaagtttgagtatcacaatgttagctttctaattccataaaagtacttggtttttacagtttataatctgacatcaccccagcgccatttgtaaagagcaactttccagcagtacatttgaagcactttttaacaacatgaaactataaaccatatttaaaagctcatcatgttaaattttttatgtacttttctggaactagtttttaaattttagattatatgtccacctatcttaagtgtacagttaataattagcttattcaatgattgcatgatgccttacagttttcaataactttttttcttatgcaaacgtcatgcaataaaacaaactctaatgtttggcatcctt

SEQ ID NO: 11717 - protein, 176 aa, Homo sapiens; identical to SEQ ID NO: 11705

SEQ ID NO: 11718 - DNA, 1402 bp, Homo sapiens
gagaccaggcggctgggagacccaggcggtgttaggggttgcgagcagcctcgctcaactggggaattggcggcaagactgccaggaggcggaacctagggcgctcggcgacgcggtcctgcggactgtcgctagtgaggcacccgccggcccggaaggggctgatgcgaactggggccacggcagccatcgcgctttgcagttcggtctcctggtgtacggccaacgccaagtaggggattgcgttccctccagtcgcagaccctatcagatttggatatgtccttcatatttgattggatttacagtggtttcagcagtgtgctacagtttttaggattatataagaaaactggtaaactggtatttcttggattggataatgcaggaaaaacaacattgctacacatgctaaaagatgacagacttggacaacatgtcccaacattacatcccacttccgaagaactgaccattgctggcatgacgtttacaacttttgatctgggtggacatgttcaagctcgaagagtgtggaaaaactaccttcctgctatcaatggcattgtatttctggtggattgtgcagaccacgaaaggctgttagagtcaaaagaagaacttgattcactaatgacagatgaaaccattgctaatgtgcctatactgattcttgggaataagatcgacagacctgaagccatcagtgaagagaggttgcgagagatgtttggtttatatggtcagacaacaggaaaggggagtatatctctgaaagaactgaatgcccgacccttagaagttttcatgtgtagtgtgctcaaaagacaaggttacggagaaggcttccgctggatggcacagtacattgattaacacaaactcacattggttccaggtctcaacgttcaggcttactcagagatttgattgctcaacatgcataacttgaattcaatagacttttgctggttataaaacagatgttttttagattattaatattaaatcaacttaatttgaatgagaattgaaaactgattcaagtaagtttgagtatcacaatgttagctttctaattccataaaagtacttggtttttacagtttataatctgacatcaccccagcgccatttgtaaagagcaactttccagcagtacatttgaagcactttttaacaacatgaaactataaaccatatttaaaagctcatcatgttaaattttttatgtacttttctggaactagtttttaaattttagattatatgtccacctatcttaagtgtacagttaataattagcttattcaatgattgcatgatgccttacagttttcaataactttttttcttatgcaaacgtcatgcaataaaacaaactctaatgtttggcatcctt

SEQ ID NO: 11719 - protein, 198 aa, Homo sapiens; identical to SEQ ID NO: 1114

SEQ ID NO: 11720 - DNA, 2292 bp, Homo sapiens
gaggtcactctctctatctatgtcgcctcaagcagcagtggcacgcaaaggtcagtcagccctggccaggctgcgccctccccccggacagcactcaccgttggtgtagggagaccccgaggccaaggcggctccgttctgggcctggaggctggctggggcgccgccggaggccggtattcccggctgggacatgatgactgggttggaaggggctggtcggggtcgacaacagcgcacaagaagagagctgaaagaccactgctgaaagcggagggaggaggctaacgacttaagactgaagactgggagaagaggggggggcgcattaagcccgaggcatggcgccgcactctccccaggccaccggcggccacagcctagcctgggagctgaggcttgagagtcgggccggcggggccgcgaacgcccggctagaaggcggcagccaaacctagagagaaggagggaggccctggccggaagtgcctgtcagccgccggccgcgcagccgcaatcaggacacgtggcacttccggctccgggctcgcagcagccgccgccgcgccggcgaactcttctctgccagccgggctgccccgaggccacctgacagctcctggtgccccgaccccgacgaccgtgcccggcctcgccgccacgtcaccgactctcacggccggccggaagtgccgtgtgtcaccgctacggaaattcccgccgttgtgaacgtgacctcgctcgcagagccaggatcgtggggcaatctgagattcagtagccgctttcgtggggtgggactgacagttcctctcctcgggttttgtgaagattacctgagaccatagaagtcatcgtcctctgttgagaccgtaccaccactgggagctggggcggttaatgttcatcgcagtatttcattcacatttcgtcttcgtgtttcagatgtaaattataaggggttttaaaaagaggtggttaaatatgtgtacatgttaatagtgtgatcaagccaagaaggaggcctttgtctttgactggaggactcagaggaattttaattttgaaactcgctgattcacagcatagtcacgctcaagttcattagcacatttaaatggcagttttgtttcctcttctaagagtttacagtaaggaaaaacaacattgctacacatgctaaaagatgacagacttggacaacatgtcccaacattacatcccaatggagtctcgctctgtcacccaggctggagtgcagtggcacgatctcgactcactgcaacctccgcctcccaagttcacaccattctcctgcctcagcttcccgagtagctggaactacagcttccgaagaactgaccattgctggcatgacgtttacaacttttgatctgggtggacatgttcaagctcgaagagtgtggaaaaactaccttcctgctatcaatggcattgtatttctggtggattgtgcagaccacgaaaggctgttagagtcaaaagaagaacttgattcactaatgacagatgaaaccattgctaatgtgcctatactgattcttgggaataagatcgacagacctgaagccatcagtgaagagaggttgcgagagatgtttggtttatatggtcagacaacaggaaaggggagtatatctctgaaagaactgaatgcccgacccttagaagttttcatgtgtagtgtgctcaaaagacaaggttacggagaaggcttccgctggatggcacagtacattgattaacacaaactcacattggttccaggtctcaacgttcaggcttactcagagatttgattgctcaacatgcataacttgaattcaatagacttttgctggttataaaacagatgttttttagattattaatattaaatcaacttaatttgaatgagaattgaaaactgattcaagtaagtttgagtatcacaatgttagctttctaattccataaaagtacttggtttttacagtttataatctgacatcaccccagcgccatttgtaaagagcaactttccagcagtacatttgaagcactttttaacaacatgaaactataaaccatatttaaaagctcatcatgttaaattttttatgtacttttctggaactagtttttaaattttagattatatgtccacctatcttaagtgtacagttaataattagcttattcaatgattgcatgatgccttacagttttcaataactttttttcttatgcaaacgtcatgcaataaaacaaactctaatgtttggcatcctt

SEQ ID NO: 11721 - protein, 130 aa, Homo sapiens; identical to SEQ ID NO: 11699

SEQ ID NO: 11722 - DNA, 984 bp, Homo sapiens
gatgcgaactggggccacggcagccatcgcgctttgcagttcggtctcctggtgtacggccaacgccaagtaggggattgcgttccctccagtcgcagagtttccctcttgtcgcccaggctggagtgaagtggcacgatctcggcttactgcaagctccgcctcccgggttcacgccattctcctgcctcagcctcccgagtagctgggactacagaccctatcagatttggatatgtccttcatatttgattggatttacagtggtttcagcagtgtgctacagtttttaggattatataagaaaactggtaaactggtatttcttggattggataatgcaggaaaaacaacattgctacacatgctaaaagatgacagacttggacaacatgtcccaacattacatcccacttccgaagaactgaccattgctggcatgacgtttacaacttttgatctgggtggacatgttcaagctcgaagagtgtggaaaaactaccttcctgctatcaatggcattgtatttctggtggattgtgcagaccacgaaaggctgttagagtcaaaagaagaacttgattcactaatgacagatgaaaccattgctaatgtgcctatactgattcttgggaataagatcgacagacctgaagccatcagtgaagagaggttgcgagagatgtttggtttatatggtcagacaacaggaaaggggagtatatctctgaaagaactgaatgcccgacccttagaagttttcatgtgtagtgtgctcaaaagacaaggttacggagaaggcttccgctggatggcacagtacattgattaacacaaactcacattggttccaggtctcaacgttcaggcttactcagagatttgattgctcaacatgcataacttgaattcaatagacttttgctggttataaaacagatgttttttagattattaatattaaatcaacttaatttgaatgag

SEQ ID NO: 11723 - protein, 198 aa, Homo sapiens; identical to SEQ ID NO: 1114

SEQ ID NO: 11724 - DNA, 962 bp, Homo sapiens
gagaccaggcggctgggagacccaggcggtgttaggggttgcgagcagcctcgctcaactggggaattggcggcaagactgccaggaggcggaacctagggcgctcggcgacgcggtcctgcggactgtcgctagtgaggcacccgccggcccggaaggggctgatgcgaactggggccacggcagccatcgcgctttgcagttcggtctcctggtgtacggccaacgccaagtaggggattgcgttccctccagtcgcagaccctatcagatttggatatgtccttcatatttgattggatttacagtggtttcagcagtgtgctacagtttttaggattatataagaaaactggtaaactggtatttcttggattggataatgcaggaaaaacaacattgctacacatgctaaaagatgacagacttggacaacatgtcccaacattacatcccactcgaagagtgtggaaaaactaccttcctgctatcaatggcattgtatttctggtggattgtgcagaccacgaaaggctgttagagtcaaaagaagaacttgattcactaatgacagatgaaaccattgctaatgtgcctatactgattcttgggaataagatcgacagacctgaagccatcagtgaagagaggttgcgagagatgtttggtttatatggtcagacaacaggaaaggggagtatatctctgaaagaactgaatgcccgacccttagaagttttcatgtgtagtgtgctcaaaagacaaggttacggagaaggcttccgctggatggcacagtacattgattaacacaaactcacattggttccaggtctcaacgttcaggcttactcagagatttgattgctcaacatgcataacttgaattcaatagacttttgctggttataaaacagatgttttttagattattaatattaaatcaacttaatttgaatgag

SEQ ID NO: 11725 - protein, 176 aa, Homo sapiens; identical to SEQ ID NO: 11705

SEQ ID NO: 11726 - DNA, 1028 bp, Homo sapiens
gagaccaggcggctgggagacccaggcggtgttaggggttgcgagcagcctcgctcaactggggaattggcggcaagactgccaggaggcggaacctagggcgctcggcgacgcggtcctgcggactgtcgctagtgaggcacccgccggcccggaaggggctgatgcgaactggggccacggcagccatcgcgctttgcagttcggtctcctggtgtacggccaacgccaagtaggggattgcgttccctccagtcgcagaccctatcagatttggatatgtccttcatatttgattggatttacagtggtttcagcagtgtgctacagtttttaggattatataagaaaactggtaaactggtatttcttggattggataatgcaggaaaaacaacattgctacacatgctaaaagatgacagacttggacaacatgtcccaacattacatcccacttccgaagaactgaccattgctggcatgacgtttacaacttttgatctgggtggacatgttcaagctcgaagagtgtggaaaaactaccttcctgctatcaatggcattgtatttctggtggattgtgcagaccacgaaaggctgttagagtcaaaagaagaacttgattcactaatgacagatgaaaccattgctaatgtgcctatactgattcttgggaataagatcgacagacctgaagccatcagtgaagagaggttgcgagagatgtttggtttatatggtcagacaacaggaaaggggagtatatctctgaaagaactgaatgcccgacccttagaagttttcatgtgtagtgtgctcaaaagacaaggttacggagaaggcttccgctggatggcacagtacattgattaacacaaactcacattggttccaggtctcaacgttcaggcttactcagagatttgattgctcaacatgcataacttgaattcaatagacttttgctggttataaaacagatgttttttagattattaatattaaatcaacttaatttgaatgag

SEQ ID NO: 11727 - protein, 198 aa, Homo sapiens; identical to SEQ ID NO: 1114

SEQ ID NO: 11728 - DNA, 693 bp, Homo sapiens
acggcagccatcgcgctttgcagttcggtctcctggtgtacggccaacgccaagtaggggattgcgttccctccagtcgcagagtttccctcttgtcgcccaggctggagtgaagtggcacgatctcggcttactgcaagctccgcctcccgggttcacgccattctcctgcctcagcctcccgagtagctgggactacaggtgcccgccaccacgcaccgctaatttttttgtattttttagtagagatggggtttcaccgtgttagccaggatggtctcttatctcctgacctcgtgatccgcctgcctcggcctcccaaagtgctgggattataggcgtgagccaccgcatccggtctaacttttctatttttagtagagatgggatttctctatgttggccagtctggtctccaactcctgacctcaggtgatctgctcgcctcggcctcccaaagtgctgggattaaaggcatgagccacctcagtgggccactgtactgatttttaaggtgttgaagcttttccaagaagatttgttttaaaacagctaaaactttgacattgttagctgaaagaaccaaattcgtcagcaatttaaggtgtttggtacagtggacaaaatgaggtgaagaagtccttttaacttgaaaaattaaacatagtattatttatttgtgtgttcttacat

SEQ ID NO: 11729 - protein, 40 aa, Homo sapiens
MGFLYVGQSGLQLLTSGDLLASASQSAGIKGMSHLSGPLY

SEQ ID NO: 11730 - DNA, 3396 bp, Homo sapiens
atgtgggatggattagaggcaatccagaaggcgattcattcccaacagttcaagtgcaagatgatgaaaagtaaccagaatgggcaggaagaatggtcctgtccaaaatgcattgctgtcttcacaagagtcagtgagccaaggatacaatttccagcttccaggatcctaccctcatccaataccagcaaagactttgaatccagtctctggacagtctaactatggtggttctcagggatctgggcagactcttaatagaccacctgtggcctctaatccagtgacaccttcgcttcatagtggtcctgctccccgaatgccattacctgcttctcagaacccagctactacaccaatgccttctagtagctttcttcctgaagccaacctgccaccacctttgaattggcaatataactatccatccacagcctcacaaacaaaccattgtcctcgtgcatcatcccaaccaactgtatctggaaatacaagtttaaccacaaatcatcaatatgtttcttctggatatccttcacttcaaaatagcttcataaagtcaggagctcctcatgggccccctccagctggaggcccacccccagtgagggccctcacgcccctgacatcatcatatagagatgtaccccagcccttatttaattcagctgtcaaccaagaaggtattacatcaaataccaataacggatctatggtggtccacagtagttacgacgagattgaaggaggtggcttattggcaacaccacagcttactaacaagaatcccaaaatgagccgaagtgttggatattcatatccctccttaccacctggttatcagaacacaacaccacctggtgcaactggagtaccaccctcttccttgaattacccaagtgggccacaagcctttactcagactcccttaggtgctaatcatttaaccacaagcatgagtggattaagtctacaaccagagggtctaagagttgtcaatcttcttcaagaaagaaacatgcttccgtcaacacctttgaagcctccagttccaaatttgcatgaagacatccagaaactcaactgtaacccagagttatttcgatgcacgctgactagcattcctcagacgcaggccttattgaataaagccaaacttcctttggggctgctgcttcatcctttcaaagacttagtgcaattgcctgtggttacctccagtacaattgtgagatgccgttcatgcaggacgtacatcaatcctttcgtcagctttcttgatcaaaggagatggaagtgtaacttatgttatcgagtcaatgatgttcctgaagaattcttgtacaaccctttgaccagagtttatggagaacctcacagaagaccagaagttcaaaatgctactattgagtttatggctccttcagaatacatgttacgaccacctcagcctccagtgtatctctttgtatttgatgtgtctcacaatgcagtcgaaactggatacttgaattcagtttgccagagtttgttagacaatctggatttgcttcctggcaacactagaacaaaaattggcttcataacatttgacagtacaatccatttctacggtcttcaggaaagtctctctcaacctcagatgctaatagtttcagatattgaagatgtttttatacctatgccagagaacttattagtaaacttaaatgaaagtaaagagctcgtgcaagatttactgaaaactttgccacaaatgtttaccaagactctggagacccagagtgccttgggtcctgcactgcaggctgcctttaagctgatgtctccaactggtggtcgaatgtctgtctttcaaacacaactcccaactcttggagtgggagccctgaaaccacgagaggaaccaaaccacaggtcatctgctaaggatatacacatgacaccatccactgacttctataagaaattagccttggactgttctggtcagcaagttgctgttgacttattccttctcagtggacagtattctgatttggcttctctgggttgtatttctcggtattcagcaggtagtgtctattactatccctcttaccatcatcagcacaacccagtccaagtacagaaattacagaaggaactacagagataccttactcggaagattggctttgaggcagtcatgaggattcggtgcaccaaaggtctttccattcatactttccatggaaacttctttgttaggtcaaccgacttactgtctttgcctaacgtcaacccagacgctgggtatgcagtacagatgtcagtggaagagagtcttactgacactcagttggtttcttttcagtcagcactcttgtatacatccagcaaaggcgaaagaagaattcgtgttcatactttgtgtttgccagtagtttcgactctgaatgatgtctttcttggagctgatgttcaagcaatttcagggttattggccaatatggctgttgacagatctatgactgccagtctgagtgacgctcgggatgctctagtgaatgcagtcattgactccctttcagcttaccgttcttcagtcttaagtaaccagcagcctggactcatggttcctttttctttgcggcttttcccactttttgtgttggctctccttaaacagaaatcattccagactgggacaaatgcacgtctagatgaacgcatttttgctatgtgtcaagtgaaaaaccagcccttggtttaccttatgctcacaactcatcccagtttgtatagagttgacaatctctcagatgagggagcactcaacatcagtgatagaaccatacctcagccccccattcttcagctttcagtggagaagctgagcagagatggagctttcctcatggatgcaggctctgtactgatgctttgggttggaaaaaattgtacacagaattttctcagccaagttctaggagttcaaaactatgcatcaattccacagcctatgacagaccttccagaacttgatacaccagaatctgccagaataatagctttcatctcttggcttagagagcagagaccatttttcccaatactttatgtaataagggatgagagtccaatgaaagcaaacttccttcaaaacatgatagaagacagaacagaatctgcattatcatattatgaattcctgttgcatatacagcaacaagtgaataaatgaatgaatgaagaaatttgacttatttttaaggaatgtcacgatagtgcagaatacctggaaatgtgtaataccttctttttctattatgtttgtggactaatgtgatgattgagatgttctcactgtgatttcaacaacctatagcaaataaaagaccacagcagagaatc

SEQ ID NO: 11731 - protein, 1048 aa, Homo sapiens
MGRKNGPVQNALLSSQESVSQGYNFQLPGSYPHPIPAKTLNPVSGQSNYGGSQGSGQTLNRPPVASNPVTPSLHSGPAPRMPLPASQNPATTPMPSSSFLPEANLPPPLNWQYNYPSTASQTNHCPRASSQPTVSGNTSLTTNHQYVSSGYPSLQNSFIKSGAPHGPPPAGGPPPVRALTPLTSSYRDVPQPLFNSAVNQEGITSNTNNGSMVVHSSYDEIEGGGLLATPQLTNKNPKMSRSVGYSYPSLPPGYQNTTPPGATGVPPSSLNYPSGPQAFTQTPLGANHLTTSMSGLSLQPEGLRVVNLLQERNMLPSTPLKPPVPNLHEDIQKLNCNPELFRCTLTSIPQTQALLNKAKLPLGLLLHPFKDLVQLPVVTSSTIVRCRSCRTYINPFVSFLDQRRWKCNLCYRVNDVPEEFLYNPLTRVYGEPHRRPEVQNATIEFMAPSEYMLRPPQPPVYLFVFDVSHNAVETGYLNSVCQSLLDNLDLLPGNTRTKIGFITFDSTIHFYGLQESLSQPQMLIVSDIEDVFIPMPENLLVNLNESKELVQDLLKTLPQMFTKTLETQSALGPALQAAFKLMSPTGGRMSVFQTQLPTLGVGALKPREEPNHRSSAKDIHMTPSTDFYKKLALDCSGQQVAVDLFLLSGQYSDLASLGCISRYSAGSVYYYPSYHHQHNPVQVQKLQKELQRYLTRKIGFEAVMRIRCTKGLSIHTFHGNFFVRSTDLLSLPNVNPDAGYAVQMSVEESLTDTQLVSFQSALLYTSSKGERRIRVHTLCLPVVSTLNDVFLGADVQAISGLLANMAVDRSMTASLSDARDALVNAVIDSLSAYRSSVLSNQQPGLMVPFSLRLFPLFVLALLKQKSFQTGTNARLDERIFAMCQVKNQPLVYLMLTTHPSLYRVDNLSDEGALNISDRTIPQPPILQLSVEKLSRDGAFLMDAGSVLMLWVGKNCTQNFLSQVLGVQNYASIPQPMTDLPELDTPESARIIAFISWLREQRPFFPILYVIRDESPMKANFLQNMIEDRTESALSYYEFLLHIQQQVNK

SEQ ID NO: 11732 - DNA, 3560 bp, Homo sapiens
atgtgggatggattagaggcaatccagaaggcgattcattcccaacagttcaagtgcaagatgatgaaaagtaaccagaatgggcaggaagaatggtcctgtccaaaatgcattgctgtcttcacaagagtcagtgagccaaggatacaatttccagcttccaggatcctaccctcatccaataccagcaaagactttgaatccagtctctggacagtctaactatggtggttctcagggatctgggcagactcttaatagaccacctgtggcctctaatccagtgacaccttcgcttcatagtggtcctgctccccgaatgccattacctgcttctcagaacccagctactacaccaatgccttctagtagctttcttcctgaagccaacctgccaccacctttgaattggcaatataactatccatccacagcctcacaaacaaaccattgtcctcgtgcatcatcccaaccaactgtatctggaaatacaagtttaaccacaaatcatcaatatgtttcttctggatatccttcacttcaaaatagcttcataaagtcaggagctcctcatgggccccctccagctggaggcccacccccagtgagggccctcacgcccctgacatcatcatatagagatgtaccccagcccttatttaattcagctgtcaaccaagaaggtattacatcaaataccaataacggatctatggtggtccacagtagttacgacgagattgaaggaggtggcttattggcaacaccacagcttactaacaagaatcccaaaatgagccgaagtgttggatattcatatccctccttaccacctggttatcagaacacaacaccacctggtgcaactggagtaccaccctcttccttgaattacccaagtgggccacaagcctttactcagactcccttaggtgctaatcatttaaccacaagcatgagtggattaagtctacaaccagagggtctaagagttgtcaatcttcttcaagaaagaaacatgcttccgtcaacacctttgaagcctccagttccaaatttgcatgaagacatccagaaactcaactgtaacccagagttatttcgatgcacgctgactagcattcctcagacgcaggccttattgaataaagccaaacttcctttggggctgctgcttcatcctttcaaagacttagtgcaattgcctgtggttacctccagtacaattgtgagatgccgttcatgcaggacgtacatcaatcctttcgtcagctttcttgatcaaaggagatggaagtgtaacttatgttatcgagtcaatgatgttcctgaagaattcttgtacaaccctttgaccagagtttatggagaacctcacagaagaccagaagttcaaaatgctactattgagtttatggctccttcagaatacatgttacgaccacctcagcctccagtgtatctctttgtatttgatgtgtctcacaatgcagtcgaaactggatacttgaattcagtttgccagagtttgttagacaatctggatttgcttcctggcaacactagaacaaaaattggcttcataacatttgacagtacaatccatttctacggtcttcaggaaagtctctctcaacctcagatgctaatagtttcagatattgaagatgtttttatacctatgccagagaacttattagtaaacttaaatgaaagtaaagagctcgtgcaagatttactgaaaactttgccacaaatgtttaccaagactctggagacccagagtgccttgggtcctgcactgcaggctgcctttaagctgatgtctccaactggtggtcgaatgtctgtctttcaaacacaactcccaactcttggagtgggagccctgaaaccacgagaggaaccaaaccacaggtcatctgctaaggatatacacatgacaccatccactgacttctataagaaattagccttggactgttctggtcagcaagttgctgttgacttattccttctcagtggacagtattctgatttggcttctctgggttgtatttctcggtattcagcaggtagtgtctattactatccctcttaccatcatcagcacaacccagtccaagtacagaaattacagaaggaactacagagataccttactcggaagattggctttgaggcagtcatgaggattcggtgcaccaaaggtctttccattcatactttccatggaaacttctttgttaggtcaaccgacttactgtctttgcctaacgtcaacccagacgctgggtatgcagtacagatgtcagtggaagagagtcttactgacactcagttggtttcttttcagtcagcactcttgtatacatccagcaaaggcgaaagaagaattcgtgttcatactttgtgtttgccagtagtttcgactctgaatgatgtctttcttggagctgatgttcaagcaatttcagggttattggccaatatggctgttgacagatctatgactgccagtctgagtgacgctcgggatgctctagtgaatgcagtcattgactccctttcagcttaccgttcttcagtcttaagtaaccagcagcctggactcatggttcctttttctttgcggcttttcccactttttgtgttggctctccttaaacagaaatcattccagactgggacaaatgcacgtctagatgaacgcatttttgctatgtgtcaagtgaaaaaccagcccttggtttaccttatgctcacaactcatcccagtttgtatagagttgacaatctctcagatgagggagcactcaacatcagtgatagaaccatacctcagccccccattcttcagctttcagtggagaagctgagcagagatggagctttcctcatggatgcaggctctgtactgatgctttgggttggaaaaaattgtacacagaattttctcagccaagttctaggagttcaaaactatgcatcaattccacagcctatgacagaccttccagaacttgatacaccagaatctgccagaataatagctttcatctcttggcttagagagcagagaccatttttcccaatactttatgtaataagggatgagagtccaatgaaagcaaacttccttcaaaacatgatagaagacagaacagaatctgcattatcatattatgaattcctgttgcatatacagcaacaagtgaataaatgaatgaatgaagaaatttgacttatttttaaggaatgtcacgatagtgcagaatacctggaaatgtgtaataccttctttttctattatgtttgtggactaatgtgatgattgagatgttctcactgtgatttcaacaacctatagcaaataaaagaccacagcagagaatcaaacatgcaactctgaaatactgtatttttcaaatcagaatatagctacgtatgattggatacttttttcttgccaattatgtttgagttgttatggattaaaataagaatattgcagaggcaaagtacattttgtaaaataaagatttctgtgttctacatgt

SEQ ID NO: 11733 - protein, 1048 aa, Homo sapiens; identical to SEQ ID NO: 11731

SEQ ID NO: 11734 - DNA, 6043 bp, Homo sapiens
atgtgggatggattagaggcaatccagaaggcgattcattcccaacagttcaagtgcaagatgatgaaaagtaaccagaatgggcaggaagaatggtcctgtccaaaatgcattgctgtcttcacaagagtcagtgagccaaggatacaatttccagcttccaggatcctaccctcatccaataccagcaaagactttgaatccagtctctggacagtctaactatggtggttctcagggatctgggcagactcttaatagaccacctgtggcctctaatccagtgacaccttcgcttcatagtggtcctgctccccgaatgccattacctgcttctcagaacccagctactacaccaatgccttctagtagctttcttcctgaagccaacctgccaccacctttgaattggcaatataactatccatccacagcctcacaaacaaaccattgtcctcgtgcatcatcccaaccaactgtatctggaaatacaagtttaaccacaaatcatcaatatgtttcttctggatatccttcacttcaaaatagcttcataaagtcaggagctcctcatgggccccctccagctggaggcccacccccagtgagggccctcacgcccctgacatcatcatatagagatgtaccccagcccttatttaattcagctgtcaaccaagaaggtattacatcaaataccaataacggatctatggtggtccacagtagttacgacgagattgaaggaggtggcttattggcaacaccacagcttactaacaagaatcccaaaatgagccgaagtgttggatattcatatccctccttaccacctggttatcagaacacaacaccacctggtgcaactggagtaccaccctcttccttgaattacccaagtgggccacaagcctttactcagactcccttaggtgctaatcatttaaccacaagcatgagtggattaagtctacaaccagagggtctaagagttgtcaatcttcttcaagaaagaaacatgcttccgtcaacacctttgaagcctccagttccaaatttgcatgaagacatccagaaactcaactgtaacccagagttatttcgatgcacgctgactagcattcctcagacgcaggccttattgaataaagccaaacttcctttggggctgctgcttcatcctttcaaagacttagtgcaattgcctgtggttacctccagtacaattgtgagatgccgttcatgcaggacgtacatcaatcctttcgtcagctttcttgatcaaaggagatggaagtgtaacttatgttatcgagtcaatgatgttcctgaagaattcttgtacaaccctttgaccagagtttatggagaacctcacagaagaccagaagttcaaaatgctactattgagtttatggctccttcagaatacatgttacgaccacctcagcctccagtgtatctctttgtatttgatgtgtctcacaatgcagtcgaaactggatacttgaattcagtttgccagagtttgttagacaatctggatttgcttcctggcaacactagaacaaaaattggcttcataacatttgacagtacaatccatttctacggtcttcaggaaagtctctctcaacctcagatgctaatagtttcagatattgaagatgtttttatacctatgccagagaacttattagtaaacttaaatgaaagtaaagagctcgtgcaagatttactgaaaactttgccacaaatgtttaccaagactctggagacccagagtgccttgggtcctgcactgcaggctgcctttaagctgatgtctccaactggtggtcgaatgtctgtctttcaaacacaactcccaactcttggagtgggagccctgaaaccacgagaggaaccaaaccacaggtcatctgctaaggatatacacatgacaccatccactgacttctataagaaattagccttggactgttctggtcagcaagttgctgttgacttattccttctcagtggacagtattctgatttggcttctctgggttgtatttctcggtattcagcaggtagtgtctattactatccctcttaccatcatcagcacaacccagtccaagtacagaaattacagaaggaactacagagataccttactcggaagattggctttgaggcagtcatgaggattcggtgcaccaaaggtctttccattcatactttccatggaaacttctttgttaggtcaaccgacttactgtctttgcctaacgtcaacccagacgctgggtatgcagtacagatgtcagtggaagagagtcttactgacactcagttggtttcttttcagtcagcactcttgtatacatccagcaaaggcgaaagaagaattcgtgttcatactttgtgtttgccagtagtttcgactctgaatgatgtctttcttggagctgatgttcaagcaatttcagggttattggccaatatggctgttgacagatctatgactgccagtctgagtgacgctcgggatgctctagtgaatgcagtcattgactccctttcagcttaccgttcttcagtcttaagtaaccagcagcctggactcatggttcctttttctttgcggcttttcccactttttgtgttggctctccttaaacagaaatcattccagactgggacaaatgcacgtctagatgaacgcatttttgctatgtgtcaagtgaaaaaccagcccttggtttaccttatgctcacaactcatcccagtttgtatagagttgacaatctctcagatgagggagcactcaacatcagtgatagaaccatacctcagccccccattcttcagctttcagtggagaagctgagcagagatggagctttcctcatggatgcaggctctgtactgatgctttgggttggaaaaaattgtacacagaattttctcagccaagttctaggagttcaaaactatgcatcaattccacagcctatgacagaccttccagaacttgatacaccagaatctgccagaataatagctttcatctcttggcttagagagcagagaccatttttcccaatactttatgtaataagggatgagagtccaatgaaagcaaacttccttcaaaacatgatagaagacagaacagaatctgcattatcatattatgaattcctgttgcatatacagcaacaagtgaataaatgaatgaatgaagaaatttgacttatttttaaggaatgtcacgatagtgcagaatacctggaaatgtgtaataccttctttttctattatgtttgtggactaatgtgatgattgagatgttctcactgtgatttcaacaacctatagcaaataaaagaccacagcagagaatcaaacatgcaactctgaaatactgtatttttcaaatcagaatatagctacgtatgattggatacttttttcttgccaattatgtttgagttgttatggattaaaataagaatattgcagaggcaaagtacattttgtaaaataaagatttctgtgttctacatgtatatttctcatttttaatttttctgaatctttggctgctacatttaaaacctcacaaacctaagtgttgcagggaagttacaaattgattggtagtgatgtttttaaaataaaaacaatggaaagtaaatataatgtaggaaaactagaattcattccccacacgtgtcttttttttttctttgttaagggaaaggatcatgttgactaaaactaaactaattctagtatagcttgagaaaaatatgaagaaacacattcaagctttaaaatctgtcagtattctttatgcttgaagaacaaagtcactttgatttgaagtgagaactatcattaggtggttttctgatttcctgatgaagagttggacatactgtcttaatctatagtgaaaagaatttgagctgtcttcataaacactgggactagcaatgataatagggagataagaaactttaattatcttgatcctttaagtggattttatttggtgcatttctgctctgggtatataataaaagtgggggtttttggtgaaatgagtgaagaaatgaaaggtttctaaagtgctatccaaatacatcagtaacatttttctaaggagtttaattgttaaattggaagtcattcataagaaatatttatgcttgaatatgaaaatctatgaaagcataaatgctgctgtttgatttggtggatattaagattatacacatccaacatattaaagttatgaaagaaacttgacttctgaaaatccttaagagactgctttcttgattcagctagagaaatattatagtcaaaactattgagtgaattttgtttacaaataggtaaattatacatttgtatatttaaagtgctgtgacatagtatctttaagagtttggctcagttttcacagattcattttgtcttaagaatttcttaaatatgttcatgtataatacttgatcaaaatatttttgggttttttgttttgttttaatgggttagaaaatgtttacaatcttggtcttatatgatcaccaatggaatagtaacttccaggtttatatcaatatgagctgactttaactgagttgtttgggatagggaagaagcagtccctctacagtatacaactactgcttgccagctggatcaaaataatcatgttttatgaaaatatctcccttaagcagtgttaaggttggtttgcagtgtgtaagtggcacattgaactggaagttttcttgaaagctgcttcatctattaagaagcaattttcaaattgtagcgaattatattatcccctcttttaaagaaacagtcgttatatgctgatgtttcttaaaataactaaaatgttcctcttaatgtgattttaaatggagttatttgtaggtcctttcttagtagtaaagaatcttctagagggaaacatttgtgcttttagggataatcttccttgtgcctcactacatccctaagtgggtatgactcttgttattaccacatgcttttttagtatatttcacaaatttacttttaaatattattttagatacggtgtaacatgtgcaattcagaataattttataacaggtcatgaaaaacataactttagttaggattcacaatatttgttctccacataatgagagaatgaatgagcctttggagatactgatataaggcaattattttttgcaatgttgaatgtgttttttagtttgattctttttttttcccccaatagggcactacctgccatatcatcttgtattactttttgatgtaaagcgactaatatttacactatgccatattttttttaattatagttgtaaattatgaaagatccttgaattttctacagatctacaactactaatgtaacagacaagggcaatcttggtatttaaatctgagcatggcagttctaccataaaaagtactctatttttctaatttctaggatttttaaaataacatttctgtaagtctgacatactaatagtcactcaagcagtaccatttattttagtttgcatatattttcactgtttttaatttaatgtattgagtctaatagactgttttgcaataattagaataaagatttatttcttctaatcaaagatgcataacagctattatctaggggaccaccaaatgtgatttcaaaattttgttaactattacaaatgtaatccttatatagaaattttaattttgtaaagtagtgtataatattgtaatattaaattcttgttcttaaattcaaatatgtattgatcttcaatgtgctgtgttaaatcttgcttctctgaaaagttggagacaagatttgtcttcctttttacagtttgtaattttcactgttttattcctgttaaaaaaaaaaaaaagtcatttgtaacccatgcagaccattgtttgatctatgctaacttatcaacttggctattcaataaagttaattgaaaagagcttata

SEQ ID NO: 11735 - protein, 1048 aa, Homo sapiens; identical to SEQ ID NO: 11731

SEQ ID NO: 11736 - DNA, 2735 bp, Homo sapiens
ccggccagggcctccctccttctctctaggtttggctgccgccttctagccgggcgttcgcggccccgccggcccgactctcaagcctcagctcccaggctaggctgtggccgccggtggcctggggagagtgcggcgccatgcctcgggcttaatgcgcccccccctcttctcccagtcttcagtcttaagtcgttagcctcctccctccgctttcagcagtggtctttcagctctcttcttgtgcgctgttgtcgaccccgaccagccccttccaacccagtcatcatgtcccagccgggaataccggcctccggcggcgccccagccagcctccaggcccagaacggagccgccttggcctcggggtctccctacaccaacggtcctgtccaaaatgcattgctgtcttcacaagagtcagtgagccaaggatacaatttccagcttccaggatcctaccctcatccaataccagcaaagactttgaatccagtctctggacagtctaactatggtggttctcagggatctgggcagactcttaatagaccacctgtggcctctaatccagtgacaccttcgcttcatagtggtcctgctccccgaatgccattacctgcttctcagaacccagctactacaccaatgccttctagtagctttcttcctgaagccaacctgccaccacctttgaattggcaatataactatccatccacagcctcacaaacaaaccattgtcctcgtgcatcatcccaaccaactgtatctggaaatacaagtttaaccacaaatcatcaatatgtttcttctggatatccttcacttcaaaatagcttcataaagtcaggtccttctgtacctcccttagtgaatccacctctgcctacaacttttcaaccaggagctcctcatgggccccctccagctggaggcccacccccagtgagggccctcacgcccctgacatcatcatatagagatgtaccccagcccttatttaattcagctgtcaaccaagaaggtattacatcaaataccaataacggatctatggtggtccacagtagttacgacgagattgaaggaggtggcttattggcaacaccacagcttactaacaagaatcccaaaatgagccgaagtgttggatattcatatccctccttaccacctggttatcagaacacaacaccacctggtgcaactggagtaccaccctcttccttgaattacccaagtgggccacaagcctttactcagactcccttaggtgctaatcatttaaccacaagcatgagtggattaagtctacaaccagagggtctaagagttgtcaatcttcttcaagaaagaaacatgcttccgtcaacacctttgaagcctccagttccaaatttgcatgaagacatccagaaactcaactgtaacccagagttatttcgatgcacgctgactagcattcctcagacgcaggccttattgaataaagccaaacttcctttggggctgctgcttcatcctttcaaagacttagtgcaattgcctgtggttacctccagtacaattgtgagatgccgttcatgcaggacgtacatcaatcctttcgtcagctttcttgatcaaaggagatggaagtgtaacttatgttatcgagtcaatgatgttcctgaagaattcttgtacaaccctttgaccagagtttatggagaacctcacagaagaccagaagttcaaaatgctactattgagtttatggctccttcagaatacatgttacgaccacctcagcctccagtgtatctctttgtatttgatgtgtctcacaatgcagtcgaaactggatacttgaattcagtttgccagagtttgttagacaatctggatttgcttcctggcaacactagaacaaaaattggcttcataacatttgacagtacaatccatttctacggtcttcaggaaagtctctctcaacctcagatgctaatagtttcagatattgaagatgtttttatacctatgccagagaacttattagtaaacttaaatgaaagtaaagagagtgtcattggggtcagttcagaagaaactcttattacctgcctggaaattgccatgagataatacagtgagaggtgaacagaatgtgtctgaaggggggatgttgtctaccctgtacatgcatatatgccgtaggggtaacattttaactagcaagtctatggtctctgctgttggcaatggtgactgtgccatagtgcgaagtatttttttccccattaactctatttgtacaacctaacctgtaaaggtagttgtttttcttttgtagtgatattactagttggcaaagttactggatatcttagatttgcaacagggaagagctaaactcgctttggaacttacaagaataaagtatgtagaggtgatggagaaggccatatttcatggcattaaaatacatcaaatctctaaactgtgatggttcttttggatacattttggacttatagtcttgctggactactgcatgtgcaagaactgtaaggcccaactttgatttgtcttgcttgccaatttataatgttgacttaaaatggctttcttgtcatttgaccaacttcattgtttagtgtctgtagattctctgaccatcatcatgactcaatgtcttgtctattgtatgagatactgacttaatgtgaaataaaattttaattatgaca

SEQ ID NO: 11737 - protein, 613 aa, Homo sapiens
MSQPGIPASGGAPASLQAQNGAALASGSPYTNGPVQNALLSSQESVSQGYNFQLPGSYPHPIPAKTLNPVSGQSNYGGSQGSGQTLNRPPVASNPVTPSLHSGPAPRMPLPASQNPATTPMPSSSFLPEANLPPPLNWQYNYPSTASQTNHCPRASSQPTVSGNTSLTTNHQYVSSGYPSLQNSFIKSGPSVPPLVNPPLPTTFQPGAPHGPPPAGGPPPVRALTPLTSSYRDVPQPLFNSAVNQEGITSNTNNGSMVVHSSYDEIEGGGLLATPQLTNKNPKMSRSVGYSYPSLPPGYQNTTPPGATGVPPSSLNYPSGPQAFTQTPLGANHLTTSMSGLSLQPEGLRVVNLLQERNMLPSTPLKPPVPNLHEDIQKLNCNPELFRCTLTSIPQTQALLNKAKLPLGLLLHPFKDLVQLPVVTSSTIVRCRSCRTYINPFVSFLDQRRWKCNLCYRVNDVPEEFLYNPLTRVYGEPHRRPEVQNATIEFMAPSEYMLRPPQPPVYLFVFDVSHNAVETGYLNSVCQSLLDNLDLLPGNTRTKIGFITFDSTIHFYGLQESLSQPQMLIVSDIEDVFIPMPENLLVNLNESKESVIGVSSEETLITCLEIAMR

SEQ ID NO: 11738 - DNA, 6387 bp, Homo sapiens
ccggccagggcctccctccttctctctaggtttggctgccgccttctagccgggcgttcgcggccccgccggcccgactctcaagcctcagctcccaggctaggctgtggccgccggtggcctggggagagtgcggcgccatgcctcgggcttaatgcgcccccccctcttctcccagtcttcagtcttaagtcgttagcctcctccctccgctttcagcagtggtctttcagctctcttcttgtgcgctgttgtcgaccccgaccagccccttccaacccagtcatcatgtcccagccgggaataccggcctccggcggcgccccagccagcctccaggcccagaacggagccgccttggcctcggggtctccctacaccaacggtcctgtccaaaatgcattgctgtcttcacaagagtcagtgagccaaggatacaatttccagcttccaggatcctaccctcatccaataccagcaaagactttgaatccagtctctggacagtctaactatggtggttctcagggatctgggcagactcttaatagaccacctgtggcctctaatccagtgacaccttcgcttcatagtggtcctgctccccgaatgccattacctgcttctcagaacccagctactacaccaatgccttctagtagctttcttcctgaagccaacctgccaccacctttgaattggcaatataactatccatccacagcctcacaaacaaaccattgtcctcgtgcatcatcccaaccaactgtatctggaaatacaagtttaaccacaaatcatcaatatgtttcttctggatatccttcacttcaaaatagcttcataaagtcaggtccttctgtacctcccttagtgaatccacctctgcctacaacttttcaaccaggagctcctcatgggccccctccagctggaggcccacccccagtgagggccctcacgcccctgacatcatcatatagagatgtaccccagcccttatttaattcagctgtcaaccaagaaggtattacatcaaataccaataacggatctatggtggtccacagtagttacgacgagattgaaggaggtggcttattggcaacaccacagcttactaacaagaatcccaaaatgagccgaagtgttggatattcatatccctccttaccacctggttatcagaacacaacaccacctggtgcaactggagtaccaccctcttccttgaattacccaagtgggccacaagcctttactcagactcccttaggtgctaatcatttaaccacaagcatgagtggattaagtctacaaccagagggtctaagagttgtcaatcttcttcaagaaagaaacatgcttccgtcaacacctttgaagcctccagttccaaatttgcatgaagacatccagaaactcaactgtaacccagagttatttcgatgcacgctgactagcattcctcagacgcaggccttattgaataaagccaaacttcctttggggctgctgcttcatcctttcaaagacttagtgcaattgcctgtggttacctccagtacaattgtgagatgccgttcatgcaggacgtacatcaatcctttcgtcagctttcttgatcaaaggagatggaagtgtaacttatgttatcgagtcaatgatgttcctgaagaattcttgtacaaccctttgaccagagtttatggagaacctcacagaagaccagaagttcaaaatgctactattgagtttatggctccttcagaatacatgttacgaccacctcagcctccagtgtatctctttgtatttgatgtgtctcacaatgcagtcgaaactggatacttgaattcagtttgccagagtttgttagacaatctggatttgcttcctggcaacactagaacaaaaattggcttcataacatttgacagtacaatccatttctacggtcttcaggaaagtctctctcaacctcagatgctaatagtttcagatattgaagatgtttttatacctatgccagagaacttattagtaaacttaaatgaaagtaaagagctcgtgcaagatttactgaaaactttgccacaaatgtttaccaagactctggagacccagagtgccttgggtcctgcactgcaggctgcctttaagctgatgtctccaactggtggtcgaatgtctgtctttcaaacacaactcccaactcttggagtgggagccctgaaaccacgagaggaaccaaaccacaggtcatctgctaaggatatacacatgacaccatccactgacttctataagaaattagccttggactgttctggtcagcaagttgctgttgacttattccttctcagtggacagtattctgatttggcttctctgggttgtatttctcggtattcagcaggtagtgtctattactatccctcttaccatcatcagcacaacccagtccaagtacagaaattacagaaggaactacagagataccttactcggaagattggctttgaggcagtcatgaggattcggtgcaccaaaggtctttccattcatactttccatggaaacttctttgttaggtcaaccgacttactgtctttgcctaacgtcaacccagacgctgggtatgcagtacagatgtcagtggaagagagtcttactgacactcagttggtttcttttcagtcagcactcttgtatacatccagcaaaggcgaaagaagaattcgtgttcatactttgtgtttgccagtagtttcgactctgaatgatgtctttcttggagctgatgttcaagcaatttcagggttattggccaatatggctgttgacagatctatgactgccagtctgagtgacgctcgggatgctctagtgaatgcagtcattgactccctttcagcttaccgttcttcagtcttaagtaaccagcagcctggactcatggttcctttttctttgcggcttttcccactttttgtgttggctctccttaaacagaaatcattccagactgggacaaatgcacgtctagatgaacgcatttttgctatgtgtcaagtgaaaaaccagcccttggtttaccttatgctcacaactcatcccagtttgtatagagttgacaatctctcagatgagggagcactcaacatcagtgatagaaccatacctcagccccccattcttcagctttcagtggagaagctgagcagagatggagctttcctcatggatgcaggctctgtactgatgctttgggttggaaaaaattgtacacagaattttctcagccaagttctaggagttcaaaactatgcatcaattccacagcctatgacagaccttccagaacttgatacaccagaatctgccagaataatagctttcatctcttggcttagagagcagagaccatttttcccaatactttatgtaataagggatgagagtccaatgaaagcaaacttccttcaaaacatgatagaagacagaacagaatctgcattatcatattatgaattcctgttgcatatacagcaacaagtgaataaatgaatgaatgaagaaatttgacttatttttaaggaatgtcacgatagtgcagaatacctggaaatgtgtaataccttctttttctattatgtttgtggactaatgtgatgattgagatgttctcactgtgatttcaacaacctatagcaaataaaagaccacagcagagaatcaaacatgcaactctgaaatactgtatttttcaaatcagaatatagctacgtatgattggatacttttttcttgccaattatgtttgagttgttatggattaaaataagaatattgcagaggcaaagtacattttgtaaaataaagatttctgtgttctacatgtatatttctcatttttaatttttctgaatctttggctgctacatttaaaacctcacaaacctaagtgttgcagggaagttacaaattgattggtagtgatgtttttaaaataaaaacaatggaaagtaaatataatgtaggaaaactagaattcattccccacacgtgtcttttttttttctttgttaagggaaaggatcatgttgactaaaactaaactaattctagtatagcttgagaaaaatatgaagaaacacattcaagctttaaaatctgtcagtattctttatgcttgaagaacaaagtcactttgatttgaagtgagaactatcattaggtggttttctgatttcctgatgaagagttggacatactgtcttaatctatagtgaaaagaatttgagctgtcttcataaacactgggactagcaatgataatagggagataagaaactttaattatcttgatcctttaagtggattttatttggtgcatttctgctctgggtatataataaaagtgggggtttttggtgaaatgagtgaagaaatgaaaggtttctaaagtgctatccaaatacatcagtaacatttttctaaggagtttaattgttaaattggaagtcattcataagaaatatttatgcttgaatatgaaaatctatgaaagcataaatgctgctgtttgatttggtggatattaagattatacacatccaacatattaaagttatgaaagaaacttgacttctgaaaatccttaagagactgctttcttgattcagctagagaaatattatagtcaaaactattgagtgaattttgtttacaaataggtaaattatacatttgtatatttaaagtgctgtgacatagtatctttaagagtttggctcagttttcacagattcattttgtcttaagaatttcttaaatatgttcatgtataatacttgatcaaaatatttttgggttttttgttttgttttaatgggttagaaaatgtttacaatcttggtcttatatgatcaccaatggaatagtaacttccaggtttatatcaatatgagctgactttaactgagttgtttgggatagggaagaagcagtccctctacagtatacaactactgcttgccagctggatcaaaataatcatgttttatgaaaatatctcccttaagcagtgttaaggttggtttgcagtgtgtaagtggcacattgaactggaagttttcttgaaagctgcttcatctattaagaagcaattttcaaattgtagcgaattatattatcccctcttttaaagaaacagtcgttatatgctgatgtttcttaaaataactaaaatgttcctcttaatgtgattttaaatggagttatttgtaggtcctttcttagtagtaaagaatcttctagagggaaacatttgtgcttttagggataatcttccttgtgcctcactacatccctaagtgggtatgactcttgttattaccacatgcttttttagtatatttcacaaatttacttttaaatattattttagatacggtgtaacatgtgcaattcagaataattttataacaggtcatgaaaaacataactttagttaggattcacaatatttgttctccacataatgagagaatgaatgagcctttggagatactgatataaggcaattattttttgcaatgttgaatgtgttttttagtttgattctttttttttcccccaatagggcactacctgccatatcatcttgtattactttttgatgtaaagcgactaatatttacactatgccatattttttttaattatagttgtaaattatgaaagatccttgaattttctacagatctacaactactaatgtaacagacaagggcaatcttggtatttaaatctgagcatggcagttctaccataaaaagtactctatttttctaatttctaggatttttaaaataacatttctgtaagtctgacatactaatagtcactcaagcagtaccatttattttagtttgcatatattttcactgtttttaatttaatgtattgagtctaatagactgttttgcaataattagaataaagatttatttcttctaatcaaagatgcataacagctattatctaggggaccaccaaatgtgatttcaaaattttgttaactattacaaatgtaatccttatatagaaattttaattttgtaaagtagtgtataatattgtaatattaaattcttgttcttaaattcaaatatgtattgatcttcaatgtgctgtgttaaatcttgcttctctgaaaagttggagacaagatttgtcttcctttttacagtttgtaattttcactgttttattcctgttaaaaaaaaaaaaaagtcatttgtaacccatgcagaccattgtttgatctatgctaacttatcaacttggctattcaataaagttaattgaaaagagcttata

SEQ ID NO: 11739 - protein, 1093 aa, Homo sapiens
MSQPGIPASGGAPASLQAQNGAALASGSPYTNGPVQNALLSSQESVSQGYNFQLPGSYPHPIPAKTLNPVSGQSNYGGSQGSGQTLNRPPVASNPVTPSLHSGPAPRMPLPASQNPATTPMPSSSFLPEANLPPPLNWQYNYPSTASQTNHCPRASSQPTVSGNTSLTTNHQYVSSGYPSLQNSFIKSGPSVPPLVNPPLPTTFQPGAPHGPPPAGGPPPVRALTPLTSSYRDVPQPLFNSAVNQEGITSNTNNGSMVVHSSYDEIEGGGLLATPQLTNKNPKMSRSVGYSYPSLPPGYQNTTPPGATGVPPSSLNYPSGPQAFTQTPLGANHLTTSMSGLSLQPEGLRVVNLLQERNMLPSTPLKPPVPNLHEDIQKLNCNPELFRCTLTSIPQTQALLNKAKLPLGLLLHPFKDLVQLPVVTSSTIVRCRSCRTYINPFVSFLDQRRWKCNLCYRVNDVPEEFLYNPLTRVYGEPHRRPEVQNATIEFMAPSEYMLRPPQPPVYLFVFDVSHNAVETGYLNSVCQSLLDNLDLLPGNTRTKIGFITFDSTIHFYGLQESLSQPQMLIVSDIEDVFIPMPENLLVNLNESKELVQDLLKTLPQMFTKTLETQSALGPALQAAFKLMSPTGGRMSVFQTQLPTLGVGALKPREEPNHRSSAKDIHMTPSTDFYKKLALDCSGQQVAVDLFLLSGQYSDLASLGCISRYSAGSVYYYPSYHHQHNPVQVQKLQKELQRYLTRKIGFEAVMRIRCTKGLSIHTFHGNFFVRSTDLLSLPNVNPDAGYAVQMSVEESLTDTQLVSFQSALLYTSSKGERRIRVHTLCLPVVSTLNDVFLGADVQAISGLLANMAVDRSMTASLSDARDALVNAVIDSLSAYRSSVLSNQQPGLMVPFSLRLFPLFVLALLKQKSFQTGTNARLDERIFAMCQVKNQPLVYLMLTTHPSLYRVDNLSDEGALNISDRTIPQPPILQLSVEKLSRDGAFLMDAGSVLMLWVGKNCTQNFLSQVLGVQNYASIPQPMTDLPELDTPESARIIAFISWLREQRPFFPILYVIRDESPMKANFLQNMIEDRTESALSYYEFLLHIQQQVNK

SEQ ID NO: 11740 - DNA, 1971 bp, Homo sapiens
ccactcccggttttcttttctttctttttttttttctcgagacagagtctcgctctgtagcccaggctggagaacagtggcgcgatctcggctcactgcaacctccgcctcctgggtccaagagattctcctgcctcagcctcccgagtagctgggattacaggcgcgcgccaccccgcccggctaagtttttgtatttttagtagagacgggtggggggaggggggagggggtcaccatgttggccaggctactctcgaaatcgtgacctcgtgatccgcccgcctcggccttccaaagtgctaggattacaggcgtgagccaccactcccggccctgggtgctggttttcttcacctccgagtgaacagcagagggggctgttgggtgagggccagaagagttggggaggcacgagggcgtccagcgctgccctcactcaagatggcggccagagcctcgcgcttggtcgcgtggggcggtgcgtgagtgcttagctcacaggctccgggaccgcgctcgggggcgggtctatagtgggaaggggacgcgcgccctgcggcccggcctctagtcatcgccctcgcagcggcggccaacatcaccgccactgccacccctcccagactgtggacgggaggatggagtcgatggccgtcgctaccgacggcggggagaggccgggggtcccagcgggctcaggtctgtcggcttcccagcgtcgggcggagctgcgtcggagaaagctgctcatgaactcggaacagcgcatcaaccggatcatgggctttcacaggcccgggagcggcgcggaagaagaaagtcaaacaaaatcaaagcagcaggacagtgataaactgaactccctcagcgttccttccgtttcaaagcgagtagtgctgggtgattcagtcagtacaggaacaactgaccagcagggtggtgtggccgaggtaaaggggacccaactgggagacaaattggactcgttcattaaaccacctgagtgcagtagtgatgtcaaccttgagctccggcagcggaacagaggggacctgacagcggactcggtccagaggggttcccgccatggcctagagcagtacctttccagattcgaagaagcaatgaagctaaggaaacagctgattagtgaaaaacccagtcaagaggatggaaatacaacagaagaatttgactcttttcgaatatttagattggtgggatgtgctcttcttgctcttggagtcagagcttttgtttgcaaatacttgtccatatttgctccatttcttactttacaacttgcgtacatgggattatacaaatattttcccaagagtgaaaagaagataaagacaacagtactaacagctgcacttctattgtcgggaattcctgccgaagtgataaatcgatcaatggatacctatagcaaaatgggcgaagtcttcacagatctctgtgtctactttttcacttttatcttttgtcatgaactgcttgattattggggctctgaagtaccatgaagcctgtagaactgagaaggagaagcttacaaaaaaaaaaaaatcctcttctatattgcagtgtctctaaaggaggcaaattggtttacaccttcatgtaattcttttactttaggggttgtaaagctactttattagatatagaatggcagattctctgatttaaaagggctgagtttgtattattactgatatgaagaatagagtaccaatgtcattaattgatttttcttgttaatcagaattcctattctgtacctttcctctaacttctcagatttgtaattcttcttttgggagctgagctagtgcttttaggagaacagataaatgtggtctcagccagccctagagactgcttcttgtgtttgtgtcattctgtcctgagaaatgaagtcatctgaaaaataaaatgaaagaaactgaattgtctaatgtt

SEQ ID NO: 11741 - protein, 296 aa, Homo sapiens; identical to SEQ ID NO: 1118

SEQ ID NO: 11742 - DNA, 1510 bp, Homo sapiens
ccactcccggttttcttttctttctttttttttttctcgagacagagtctcgctctgtagcccaggctggagaacagtggcgcgatctcggctcactgcaacctccgcctcctgggtccaagagattctcctgcctcagcctcccgagtagctgggattacaggcgcgcgccaccccgcccggctaagtttttgtatttttagtagagacgggtggggggaggggggagggggtcaccatgttggccaggctactctcgaaatcgtgacctcgtgatccgcccgcctcggccttccaaagtgctaggattacaggcgtgagccaccactcccggccctgggtgctggttttcttcacctccgagtgaacagcagagggggctgttgggtgagggccagaagagttggggaggcacgagggcgtccagcgctgccctcactcaagatggcggccagagcctcgcgcttggtcgcgtggggcggtgcgtgagtgcttagctcacaggctccgggaccgcgctcgggggcgggtctatagtgggaaggggacgcgcgccctgcggcccggcctctagtcatcgccctcgcagcggcggccaacatcaccgccactgccacccctcccagactgtggacgggaggatggagtcgatggccgtcgctaccgacggcggggagaggccgggggtcccagcgggctcaggtctgtcggcttcccagcgtcgggcggagctgcgtcggagaaagctgctcatgaactcggaacagcgcatcaaccggatcatgggctttcacaggcccgggagcggcgcggtccatatttgctccatttcttactttacaacttgcgtacatgggattatacaaatattttcccaagagtgaaaagaagataaagacaacagtactaacagctgcacttctattgtcgggaattcctgccgaagtgataaatcgatcaatggatacctatagcaaaatgggcgaagtcttcacagatctctgtgtctactttttcacttttatcttttgtcatgaactgcttgattattggggctctgaagtaccatgaagcctgtagaactgagaaggagaagcttacaaaaaaaaaaaaatcctcttctatattgcagtgtctctaaaggaggcaaattggtttacaccttcatgtaattcttttactttaggggttgtaaagctactttattagatatagaatggcagattctctgatttaaaagggctgagtttgtattattactgatatgaagaatagagtaccaatgtcattaattgatttttcttgttaatcagaattcctattctgtacctttcctctaacttctcagatttgtaattcttcttttgggagctgagctagtgcttttaggagaacagataaatgtggtctcagccagccctagagactgcttcttgtgtttgtgtcattctgtcctgagaaatgaagtcatctgaaaaataaaatgaaagaaactgaattgtctaatgtt

SEQ ID NO: 11743 - protein, 80 aa, Homo sapiens
MESMAVATDGGERPGVPAGSGLSASQRRAELRRRKLLMNSEQRINRIMGFHRPGSGAVHICSISYFTTCVHGIIQIFSQE

SEQ ID NO: 11744 - DNA, 2741 bp, Homo sapiens
ccactcccggttttcttttctttctttttttttttctcgagacagagtctcgctctgtagcccaggctggagaacagtggcgcgatctcggctcactgcaacctccgcctcctgggtccaagagattctcctgcctcagcctcccgagtagctgggattacaggcgcgcgccaccccgcccggctaagtttttgtatttttagtagagacgggtggggggaggggggagggggtcaccatgttggccaggctactctcgaaatcgtgacctcgtgatccgcccgcctcggccttccaaagtgctaggattacaggcgtgagccaccactcccggccctgggtgctggttttcttcacctccgagtgaacagcagagggggctgttgggtgagggccagaagagttggggaggcacgagggcgtccagcgctgccctcactcaagatggcggccagagcctcgcgcttggtcgcgtggggcggtgcgtgagtgcttagctcacaggctccgggaccgcgctcgggggcgggtctatagtgggaaggggacgcgcgccctgcggcccggcctctagtcatcgccctcgcagcggcggccaacatcaccgccactgccacccctcccagactgtggacgggaggatggagtcgatggccgtcgctaccgacggcggggagaggccgggggtcccagcgggctcaggtctgtcggcttcccagcgtcgggcggagctgcgtcggagaaagctgctcatgaactcggaacagcgcatcaaccggatcatgggctttcacaggcccgggagcggcgcggaagaagaaagtcaaacaaaatcaaagcagcaggacagtgataaactgaactccctcagcgttccttccgtttcaaagcgagtagtgctgggtgattcagtcagtacaggaacaactgaccagcagggtggtgtggccgaggtaaaggggacccaactgggagacaaattggactcgttcattaaaccacctgagtgcagtagtgatgtcaaccttgagctccggcagcggaacagaggggacctgacagcggactcggtccagaggggttcccgccatggcctagagcagtacctttccagattcgaagaagcaatgaagctaaggaaacagctgattagtgaaaaacccagtcaagaggatggaaatacaacagaagaatttgactcttttcgaatatttagattggtgggatgtgctcttcttgctcttggagtcagagcttttgtttgcaaatacttgtccatatttgctccatttcttactttacaacttgcgtacatgggattatacaaatattttcccaagagtgaaaagaagataaagacaacagtactaacagctgcacttctattgtcgggaattcctgccgaagtgataaatcgatcaatggatacctatagcaaaatgggcgaagtcttcacagatctctgtgtctactttttcacttttatcttttgtcatgaactgcttgattattggggctctgaagtaccatgaagcctgtagaactgagaaggagaagcttacaaaaaaaaaaaaatcctcttctatattgcagtgtctctaaaggaggcaaattggtttacaccttcatgtaattcttttactttaggggttgtaaagctactttattagatatagaatggcagattctctgatttaaaagggctgagtttgtattattactgatatgaagaatagagtaccaatgtcattaattgatttttcttgttaatcagaattcctattctgtacctttcctctaacttctcagatttgtaattcttcttttgggagctgagctagtgcttttaggagaacagataaatgtggtctcagccagccctagagactgcttcttgtgtttgtgtcattctgtcctgagaaatgaagtcatctgaaaaataaaatgaaagaaactgaattgtctaatgttaactctgcacattgtaacttttcttgttgagttagtatcttaatttttactccagcacaagtatttaatcaaagaaaagattcatacatgtgaaattggaaggtatttataaaatttttattgctgtataccaaactcagaattggaactttttacatttgagtttcactttttagaagtatgttttaagcaagcaaaaacaaaatgggatgtgaagaattgaggcatgcaacccaatagcataaatgtcctttttccccccaaatatggtctagatgagttattataaacattgtttttatttttttgagacagagtttcgctcttgttgcccaggctagagtgcaatggcgccatctcggctcaccgcaacctccaccttcctggttcaagggattctcctgcctcagcctcccaagtagctgggattacaggcatgcaccaccacgcccagctaatttttatattctttagtaaagacagggtttctccatgttggtcaggctggtctcgaacttctgacctcaggtgatctgcccacctcggcctcccaaagtgctgggattacaggcgtgagccactgcacctggccttataaatatccttttaactaactcagtaactgccatattttgttgggttgtcttcttaaaagaatataagactaaagtgttaatgtcacttggtgttacatttccttacagatttttgtatagtctaatttggttaatccttgtgacattaaaaacacatacactttttaaaaaatt

SEQ ID NO: 11745 - protein, 296 aa, Homo sapiens; identical to SEQ ID NO: 1118

SEQ ID NO: 11746 - DNA, 2280 bp, Homo sapiens
ccactcccggttttcttttctttctttttttttttctcgagacagagtctcgctctgtagcccaggctggagaacagtggcgcgatctcggctcactgcaacctccgcctcctgggtccaagagattctcctgcctcagcctcccgagtagctgggattacaggcgcgcgccaccccgcccggctaagtttttgtatttttagtagagacgggtggggggaggggggagggggtcaccatgttggccaggctactctcgaaatcgtgacctcgtgatccgcccgcctcggccttccaaagtgctaggattacaggcgtgagccaccactcccggccctgggtgctggttttcttcacctccgagtgaacagcagagggggctgttgggtgagggccagaagagttggggaggcacgagggcgtccagcgctgccctcactcaagatggcggccagagcctcgcgcttggtcgcgtggggcggtgcgtgagtgcttagctcacaggctccgggaccgcgctcgggggcgggtctatagtgggaaggggacgcgcgccctgcggcccggcctctagtcatcgccctcgcagcggcggccaacatcaccgccactgccacccctcccagactgtggacgggaggatggagtcgatggccgtcgctaccgacggcggggagaggccgggggtcccagcgggctcaggtctgtcggcttcccagcgtcgggcggagctgcgtcggagaaagctgctcatgaactcggaacagcgcatcaaccggatcatgggctttcacaggcccgggagcggcgcggtccatatttgctccatttcttactttacaacttgcgtacatgggattatacaaatattttcccaagagtgaaaagaagataaagacaacagtactaacagctgcacttctattgtcgggaattcctgccgaagtgataaatcgatcaatggatacctatagcaaaatgggcgaagtcttcacagatctctgtgtctactttttcacttttatcttttgtcatgaactgcttgattattggggctctgaagtaccatgaagcctgtagaactgagaaggagaagcttacaaaaaaaaaaaaatcctcttctatattgcagtgtctctaaaggaggcaaattggtttacaccttcatgtaattcttttactttaggggttgtaaagctactttattagatatagaatggcagattctctgatttaaaagggctgagtttgtattattactgatatgaagaatagagtaccaatgtcattaattgatttttcttgttaatcagaattcctattctgtacctttcctctaacttctcagatttgtaattcttcttttgggagctgagctagtgcttttaggagaacagataaatgtggtctcagccagccctagagactgcttcttgtgtttgtgtcattctgtcctgagaaatgaagtcatctgaaaaataaaatgaaagaaactgaattgtctaatgttaactctgcacattgtaacttttcttgttgagttagtatcttaatttttactccagcacaagtatttaatcaaagaaaagattcatacatgtgaaattggaaggtatttataaaatttttattgctgtataccaaactcagaattggaactttttacatttgagtttcactttttagaagtatgttttaagcaagcaaaaacaaaatgggatgtgaagaattgaggcatgcaacccaatagcataaatgtcctttttccccccaaatatggtctagatgagttattataaacattgtttttatttttttgagacagagtttcgctcttgttgcccaggctagagtgcaatggcgccatctcggctcaccgcaacctccaccttcctggttcaagggattctcctgcctcagcctcccaagtagctgggattacaggcatgcaccaccacgcccagctaatttttatattctttagtaaagacagggtttctccatgttggtcaggctggtctcgaacttctgacctcaggtgatctgcccacctcggcctcccaaagtgctgggattacaggcgtgagccactgcacctggccttataaatatccttttaactaactcagtaactgccatattttgttgggttgtcttcttaaaagaatataagactaaagtgttaatgtcacttggtgttacatttccttacagatttttgtatagtctaatttggttaatccttgtgacattaaaaacacatacactttttaaaaaatt

SEQ ID NO: 11747 - protein, 80 aa, Homo sapiens; identical to SEQ ID NO: 11743

SEQ ID NO: 11748 - DNA, 901 bp, Homo sapiens
ggggacgcgcgccctgcggcccggcctctagtcatcgccctcgcagcggcggccaacatcaccgccactgccacccctcccagactgtggacgggaggatggagtcgatggccgtcgctaccgacggcggggagaggccgggggtcccagcgggctcaggtctgtcggcttcccagcgtcgggcggagctgcgtcggagaaagctgctcatgaactcggaacagcgcatcaaccggatcatgggctttcacaggcccgggagcggcgcggagtgaaaagaagataaagacaacagtactaacagctgcacttctattgtcgggaattcctgccgaagtgataaatcgatcaatggatacctatagcaaaatgggcgaagtcttcacagatctctgtgtctactttttcacttttatcttttgtcatgaactgcttgattattggggctctgaagtaccatgaagcctgtagaactgagaaggagaagcttacaaaaaaaaaaaaatcctcttctatattgcagtgtctctaaaggaggcaaattggtttacaccttcatgtaattcttttactttaggggttgtaaagctactttattagatatagaatggcagattctctgatttaaaagggctgagtttgtattattactgatatgaagaatagagtaccaatgtcattaattgatttttcttgttaatcagaattcctattctgtacctttcctctaacttctcagatttgtaattcttcttttgggagctgagctagtgcttttaggagaacagataaatgtggtctcagccagccctagagactgcttcttgtgtttgtgtcattctgtcctgagaaatgaagtcatctgaaaaataaaatgaaagaaactgaattgtctaatgtt

SEQ ID NO: 11749 - protein, 58 aa, Homo sapiens
MESMAVATDGGERPGVPAGSGLSASQRRAELRRRKLLMNSEQRINRIMGFHRPGSGAE

SEQ ID NO: 11750 - DNA, 1671 bp, Homo sapiens
ggggacgcgcgccctgcggcccggcctctagtcatcgccctcgcagcggcggccaacatcaccgccactgccacccctcccagactgtggacgggaggatggagtcgatggccgtcgctaccgacggcggggagaggccgggggtcccagcgggctcaggtctgtcggcttcccagcgtcgggcggagctgcgtcggagaaagctgctcatgaactcggaacagcgcatcaaccggatcatgggctttcacaggcccgggagcggcgcggagtgaaaagaagataaagacaacagtactaacagctgcacttctattgtcgggaattcctgccgaagtgataaatcgatcaatggatacctatagcaaaatgggcgaagtcttcacagatctctgtgtctactttttcacttttatcttttgtcatgaactgcttgattattggggctctgaagtaccatgaagcctgtagaactgagaaggagaagcttacaaaaaaaaaaaaatcctcttctatattgcagtgtctctaaaggaggcaaattggtttacaccttcatgtaattcttttactttaggggttgtaaagctactttattagatatagaatggcagattctctgatttaaaagggctgagtttgtattattactgatatgaagaatagagtaccaatgtcattaattgatttttcttgttaatcagaattcctattctgtacctttcctctaacttctcagatttgtaattcttcttttgggagctgagctagtgcttttaggagaacagataaatgtggtctcagccagccctagagactgcttcttgtgtttgtgtcattctgtcctgagaaatgaagtcatctgaaaaataaaatgaaagaaactgaattgtctaatgttaactctgcacattgtaacttttcttgttgagttagtatcttaatttttactccagcacaagtatttaatcaaagaaaagattcatacatgtgaaattggaaggtatttataaaatttttattgctgtataccaaactcagaattggaactttttacatttgagtttcactttttagaagtatgttttaagcaagcaaaaacaaaatgggatgtgaagaattgaggcatgcaacccaatagcataaatgtcctttttccccccaaatatggtctagatgagttattataaacattgtttttatttttttgagacagagtttcgctcttgttgcccaggctagagtgcaatggcgccatctcggctcaccgcaacctccaccttcctggttcaagggattctcctgcctcagcctcccaagtagctgggattacaggcatgcaccaccacgcccagctaatttttatattctttagtaaagacagggtttctccatgttggtcaggctggtctcgaacttctgacctcaggtgatctgcccacctcggcctcccaaagtgctgggattacaggcgtgagccactgcacctggccttataaatatccttttaactaactcagtaactgccatattttgttgggttgtcttcttaaaagaatataagactaaagtgttaatgtcacttggtgttacatttccttacagatttttgtatagtctaatttggttaatccttgtgacattaaaaacacatacactttttaaaaaatt

SEQ ID NO: 11751 - protein, 58 aa, Homo sapiens; identical to SEQ ID NO: 11749

SEQ ID NO: 11752 - DNA, 1897 bp, Homo sapiens
cggcggccaacatcaccgccactgccacccctcccagactgtggacgggaggatggagtcgatggccgtcgctaccgacggcggggagaggccgggggtcccagcgggctcaggtctgtcggcttcccagcgtcgggcggagctgcgtcggagaaagctgctcatgaactcggaacagcgcatcaaccggatcatgggctttcacaggcccgggagcggcgcggaagaagaaagtcaaacaaaatcaaagcagcaggacagtgataaactgaactccctcagcgttccttccgtttcaaagcgagtagtgctgggtgattcagtcagtacaggaacaactgaccagcagggtggtgtggccgaggtaaaggggacccaactgggagacaaattggactcgttcattaaaccacctgagtgcagtagtgatgtcaaccttgagctccggcagcggaacagaggggacctgacagcggactcggtccagaggggttcccgccatggcctagagcagtacctttccagattcgaagaagcaatgaagctaaggaaacagctgattagtgaaaaacccagtcaagaggatggaaatacaacagaagaatttgactcttttcgaatatttagattggtgggatgtgctcttcttgctcttggagtcagagcttttgtttgcaaatacttggtaagaaaagatctgtaaattattaactaacttaatggaaaatgcaaaatgttaataattatgagtgcttttgatcatagaagtcattgccagtattaatatctaccagatccatgtggctgtttgaagatatattattaactttgctattcatctcatagaatgaagtgttctggttaaatacagagcctaataattactgttggccctccatatcagttggttctgcaccctatgtggattcaaccaattgtggattgaaaatatttggatttagccgggcgtggtggtgcacgcctgtaatcccagttacttgggaggctgaggcaggagaatcgcttgaacccgggaggtggaggttgcagtgagccaggataacggcactgcactccagcctgggtgacagagtgagaccccgtctcaaaaatatatgtatgtgtatatatttgggggaaaaataacaatacaacaataacaaatagtaaataatacaaataaaaacagtataacaactatttacattgcattaggcataaaaaatctagaaatgatttaaagtatatgggaggaagtgagtaggttatatttactgtgccgttttacataagggacttgagcatctatggattttggtatcaggaggaacctggtaccagtcctctgctgatactgagggatgactgtactaaaacccatttttcattctacggacctttctcattgttttgcatacattaattcatctaatcctcattcttatgaacttggtattatgtgaatccattgggaaatgaagactcagagaggttaaaccatttgcccaaggtcacacagctactaagcggtgctaggattaaaccctggcagtttcagtccttaaccaaagggttaagtgctttacatatatatactgtatattatcaattttcaaataatttgaaatagtaaaatgcagttcctctggtcctgaatatgaggtaatcttcctatggttcagaagacatttcagcatttcctaatatatcataatgagtccattttggttgtaccatgatgtagtcattttgttttatagtatattaaagaatgcagaaaagcatagctcatagttcagtgtcttgctctgaggtttttccattcagtagacattttaagtatatgtaccaggcacataaatatccagataattaaagtttatatcattaagcaaaa

SEQ ID NO: 11753 - protein, 216 aa, Homo sapiens
MESMAVATDGGERPGVPAGSGLSASQRRAELRRRKLLMNSEQRINRIMGFHRPGSGAEEESQTKSKQQDSDKLNSLSVPSVSKRVVLGDSVSTGTTDQQGGVAEVKGTQLGDKLDSFIKPPECSSDVNLELRQRNRGDLTADSVQRGSRHGLEQYLSRFEEAMKLRKQLISEKPSQEDGNTTEEFDSFRIFRLVGCALLALGVRAFVCKYLVRKDL

SEQ ID NO: 11754 - DNA, 1014 bp, Homo sapiens
catctaatcctcattcttatgaacttggtattatgtgaatccattgggaaatgaagactcagagaggttaaaccatttgcccaaggtcacacagctactaagcggtgctaggattaaaccctggcagtttcagtccttaaccaaagggttaagtgctttacatatatatactgtatattatcaattttcaaataatttgaaatagtaaaatgcagttcctctggtcctgaatatgaggtaatcttcctatggttcagaagacatttcagcatttcctaatatatcataatgagtccattttggttgtaccatgatgtagtcattttgttttatagtatattaaagaatgcagaaaagcatagctcatagttcagtgtcttgctctgaggtttttccattcagtagacattttaagtatatgtaccaggcacataaatatccagataattaaagtttatatcattaagcaaaacagtttttgtaaatctttttttttttgaggtggagtttctttcgccaggctggagttgcagtgagccaagattgcgccactgcactgctccagtctgggtgacagagtgagactctgtctccaaaaaaaaaaaaaaaaaaagagtaattagaaacttttatagcaatttgacattgccataacattgttattctgttttacaaaaatactgtggattgaggtccttcatgaaaaagtgtgaatagtacttgtttaagcaaagtattaaatttaattagtaaatttagtaattcattttgtctataataaaggaaattaattaaaaaatggatttgattatctcattgtacttcatattggacacttaatagcagtgcactttatcttcagtgttgagggcctgatatttgcaataaatatttggccaatattacagaacagaatgatgttgagagtcaatgtttacctggcctacttgactacagatatatacagttttatgaggcttggcttgcctgacatagacgatagcctaactagtg

SEQ ID NO: 11755 - protein, 34 aa, Homo sapiens
MQKSIAHSSVSCSEVFPFSRHFKYMYQAHKYPDN

SEQ ID NO: 11756 - DNA, 648 bp, Homo sapiens
tccggtcggcttttctcttccttcggctgccggcgccagcacgtcctgttttcgttggccgcgctgggatggccgccacagctgtaggtgctgctagtgtttagcgctggtctttgccgggcgttgagggcagctcagcctccttgtttgtccggttcgcctgtgcgtggtactcaagggcaccagtattcccgcggtcggcagcatgggtcgggagtcacgccactatcgaaaacgatcggcatcccggggtcgctctggaagtcggtctagaagtcgctcaccctcagacaaaagaagtaaacgtggagatgacagacggtctagaagtagagatagagataggaggagagagaggtctcgtagcagggataaaagaagatctcggtcaagggacaggaagcgtctgagacgttccagaagtagagagagagacagaagccgagagcgaagaagatctcgaagtagagacaggagacgctcaaggagtagaagccggggccggcgatcccgatcctccagtcctggaaataaaagcaagaaaactgagaatagccaaagtctcgttctgttgccctggctggaatgcagtggtgcaatctcggctcactgcaaccttcgcctcccgggttcaagtaattctcttgc

SEQ ID NO: 11757 - protein, 146 aa, Homo sapiens
MGRESRHYRKRSASRGRSGSRSRSRSPSDKRSKRGDDRRSRSRDRDRRRERSRSRDKRRSRSRDRKRLRRSRSRERDRSRERRRSRSRDRRRSRSRSRGRRSRSSSPGNKSKKTENSQSLVLLPWLECSGAISAHCNLRLPGSSNS

SEQ ID NO: 11758 - DNA, 3799 bp, Homo sapiens
tccggtcggcttttctcttccttcggctgccggcgccagcacgtcctgttttcgttggccgcgctgggatggccgccacagctgtaggtgctgctagtgtttagcgctggtctttgccgggcgttgagggcagctcagcctccttgtttgtccggttcgcctgtgcgtggtactcaagggcaccagtattcccgcggtcggcagcatgggtcgggagtcacgccactatcgaaaacgatcggcatcccggggtcgctctggaagtcggtctagaagtcgctcaccctcagacaaaagaagtaaacgtggagatgacagacggtctagaagtagagatagagataggaggagagagaggtctcgtagcagggataaaagaagatctcggtcaagggacaggaagcgtctgagacgttccagaagtagagagagagacagaagccgagagcgaagaagatctcgaagtagagacaggagacgctcaaggagtagaagccggggccggcgatcccgatcctccagtcctggaaataaaagcaagaaaactgagaatagatctaggtccaaagagaaaactgatggtggggaaagttctaaagagaagaaaaaagacaaagatgacaaggaggatgaaaaagaaaaagatgctggcaactttgaccagaataagctggaagaagaaatgagaaagcgaaaagaaagagtagaaaaatggcgagaagagcaacgtaaaaaggctatggaaaacataggagaactgaaaaaggaaatcgaagagatgaaacaagggaaaaagtggagtttagaggacgatgatgatgacgaagatgatcctgcagaagctgaaaaggagggaaatgaaatggagggtgaggagttagatccattagatgcttacatggaagaagtgaaagaggaagtaaaaaaatttaacatgagaagtgtaaaaggtggtgggggaaatgaaaagaagtctgggccaacggtcacaaaagttgtcactgttgtgacaaccaaaaaagcagttgtggattctgataagaagaaaggtgagctgatggagaatgaccaggatgccatggagtattcttcagaggaggaagaagttgatcttcagacagcccttacagggtatcaaacaaaacagcgaaagcttctagaaccagttgatcatggaaaaattgagtatgagccatttaggaaaaacttctatgttgaagttccagaactagcaaaaatgtctcaagaagaggtaaatgtgtttcgattggaaatggagggcattacagttaaaggaaaaggttgccccaaaccaattaaatcctgggtccagtgtggaatttccatgaagatcttaaattccctcaagaagcatggctatgaaaagcccacgcccatccaaacccaagctattcctgctataatgtctggacgagatttgattggcattgccaaaacaggaagtggaaagaccattgcttttctgttgcccatgtttagacacatcatggatcagaggtcattagaggaaggagaggggccaatagctgtcatcatgactccaactcgagaactggctttacagattactaaagagtgtaagaagttttccaagactttgggacttagagtggtctgtgtttacggaggaacaggaatcagtgagcagattgctgagctgaaaagaggtgctgaaattattgtttgcacacctggtcgaatgattgacatgttagccgctaacagtggtcgggtcacaaatcttcgaagagtgacatatgttgttttagatgaagcagacagaatgtttgacatgggttttgaaccccaggtcatgcgcatcgtggataatgttcgtcctgatcgacagacggttatgttttcagctactttccccagagctatggaggctttggctcgcaggatcctcagtaaacctattgaagtacaagttggaggcaggagtgtggtttgctcagatgtggagcaacaagtgattgtgattgaagaagaaaagaaattcttgaagttacttgagcttctaggccattatcaagagtcaggatctgtcattatatttgtggataagcaggaacatgctgatggtcttcttaaggatttaatgagagcatcttatccttgcatgtctcttcatggaggcattgatcaatatgacagagatagcatcataaatgactttaagaatgggacctgcaaacttcttgtggctacctctgttgctgcccgaggtctagatgtgaaacatctgattcttgtagtaaattatagctgccccaaccattatgaggattatgtacacagagcagggcggactggaagagcaggaaacaagggttatgcttatacttttatcacagaggatcaagctcgctatgctggtgacataattaaagctcttgaattgtcagggactgcagtacctcctgatttagagaaactgtggagtgatttcaaagatcagcagaaagctgaggggaaaataattaaaaagagtagtgggttctctggtaagggattcaagtttgatgaaacagaacaagctttggctaatgagaggaagaagttacaaaaagcagctcttggtctacaagattcagatgatgaggatgctgcagttgatattgatgagcaaattgaaagcatgtttaattcaaagaagagagtaaaggatatggctgctcctggaacatcaagtgttcctgctccaactgcaggaaatgctgagaaattagaaattgctaagagattggctcttagaatcaatgcccagaagaatttgggcatcgagtctcaggatgtgatgcagcaggccaccaatgcaattcttaggggtggcaccattctggctcccactgtttctgcaaaaaccattgcagaacaacttgctgaaaagatcaatgccaagctcaattatgtgccgttagagaaacaagaagaagagagacaggatggtggacagaatgaatcttttaagagatatgaagaagaattagagatcaatgacttcccacagactgctaggtggaaagttacctctaaggaagctctgcagagaatcagtgaatactctgaagccgcaattacaatcagaggaacctacttccctcctggcaaagaacccaaggaaggcgagcggaagatttacttggcaattgaaagtgccaatgaactggctgtgcagaaagcaaaggcagaaatcaccaggctcataaaagaagagctgatccggctgcaaaattcataccaaccaacaaataaaggaagatacaaagtcttatagacatccggaaaaaagatttttacctgtgctggtctatgatgtatgtggcagttgctgtctgcagtttacaatgtattgtaaatgaagattttttaaattctatcttgctgattttttttaaatataagaaactggtacttggtaaagaaatctgtccgtaagtacccccacaatcagtcaaactatatttaaagccagcctgttttcagagtatgatgtcctttaatgtaaactcaaatatcaatattttaaatgtccggataatattctagaggtttaaaaaatggaaatatttgaactttctattgaagacaataaagtacacaagtcgttaaggggctattcactttatcctgtactttcaatgaaattgtgatcatttcctaagaaaaggtaaaattcactatcatattttgtgtccccaccttgatgttacatgactctggaacaatatgaactggatttaagaatgttataatagaagtcttacaaaatggg

SEQ ID NO: 11759 - protein, 1031 aa, Homo sapiens; identical to SEQ ID NO: 1120

SEQ ID NO: 11760 - DNA, 3713 bp, Homo sapiens
tccggtcggcttttctcttccttcggctgccggcgccagcacgtcctgttttcgttggccgcgctgggatggccgccacagctgtaggtgctgctagtgtttagcgctggtctttgccgggcgttgagggcagctcagcctccttgtttgtccggttcgcctgtgcgtggtactcaagggcaccagtattcccgcggtcggcagcatgggtcgggagtcacgccactatcgaaaacgatcggcatcccggggtcgctctggaagtcggtctagaagtcgctcaccctcagacaaaagaagtaaacgtggagatgacagacggtctagaagtagagatagagataggaggagagagaggtctcgtagcagggataaaagaagatctcggtcaagggacaggaagcgtctgagacgttccagaagtagagagagagacagaagccgagagcgaagaagatctcgaagtagagacaggagacgctcaaggagtagaagccggggccggcgatcccgatcctccagtcctggaaataaaagcaagaaaactgagaatagatctaggtccaaagagaaaactgatggtggggaaagttctaaagagaagaaaaaagacaaagatgacaaggaggatgaaaaagaaaaagatgctggcaactttgaccagaataagctggaagaagaaatgagaaagcgaaaagaaagagtagaaaaatggcgagaagagcaacgtaaaaaggctatggaaaacataggaggctgagaaggagggaaatgaaatggagggtgaggagttagatccattagatgcttacatggaagaagtgaaagaggaagtaaaaaaatttaacatgagaagtgtaaaaggtggtgggggaaatgaaaagaagtctgggccaacggtcacaaaagttgtcactgttgtgacaaccaaaaaagcagttgtggattctgataagaagaaaggtgagctgatggagaatgaccaggatgccatggagtattcttcagaggaggaagaagttgatcttcagacagcccttacagggtatcaaacaaaacagcgaaagcttctagaaccagttgatcatggaaaaattgagtatgagccatttaggaaaaacttctatgttgaagttccagaactagcaaaaatgtctcaagaagaggtaaatgtgtttcgattggaaatggagggcattacagttaaaggaaaaggttgccccaaaccaattaaatcctgggtccagtgtggaatttccatgaagatcttaaattccctcaagaagcatggctatgaaaagcccacgcccatccaaacccaagctattcctgctataatgtctggacgagatttgattggcattgccaaaacaggaagtggaaagaccattgcttttctgttgcccatgtttagacacatcatggatcagaggtcattagaggaaggagaggggccaatagctgtcatcatgactccaactcgagaactggctttacagattactaaagagtgtaagaagttttccaagactttgggacttagagtggtctgtgtttacggaggaacaggaatcagtgagcagattgctgagctgaaaagaggtgctgaaattattgtttgcacacctggtcgaatgattgacatgttagccgctaacagtggtcgggtcacaaatcttcgaagagtgacatatgttgttttagatgaagcagacagaatgtttgacatgggttttgaaccccaggtcatgcgcatcgtggataatgttcgtcctgatcgacagacggttatgttttcagctactttccccagagctatggaggctttggctcgcaggatcctcagtaaacctattgaagtacaagttggaggcaggagtgtggtttgctcagatgtggagcaacaagtgattgtgattgaagaagaaaagaaattcttgaagttacttgagcttctaggccattatcaagagtcaggatctgtcattatatttgtggataagcaggaacatgctgatggtcttcttaaggatttaatgagagcatcttatccttgcatgtctcttcatggaggcattgatcaatatgacagagatagcatcataaatgactttaagaatgggacctgcaaacttcttgtggctacctctgttgctgcccgaggtctagatgtgaaacatctgattcttgtagtaaattatagctgccccaaccattatgaggattatgtacacagagcagggcggactggaagagcaggaaacaagggttatgcttatacttttatcacagaggatcaagctcgctatgctggtgacataattaaagctcttgaattgtcagggactgcagtacctcctgatttagagaaactgtggagtgatttcaaagatcagcagaaagctgaggggaaaataattaaaaagagtagtgggttctctggtaagggattcaagtttgatgaaacagaacaagctttggctaatgagaggaagaagttacaaaaagcagctcttggtctacaagattcagatgatgaggatgctgcagttgatattgatgagcaaattgaaagcatgtttaattcaaagaagagagtaaaggatatggctgctcctggaacatcaagtgttcctgctccaactgcaggaaatgctgagaaattagaaattgctaagagattggctcttagaatcaatgcccagaagaatttgggcatcgagtctcaggatgtgatgcagcaggccaccaatgcaattcttaggggtggcaccattctggctcccactgtttctgcaaaaaccattgcagaacaacttgctgaaaagatcaatgccaagctcaattatgtgccgttagagaaacaagaagaagagagacaggatggtggacagaatgaatcttttaagagatatgaagaagaattagagatcaatgacttcccacagactgctaggtggaaagttacctctaaggaagctctgcagagaatcagtgaatactctgaagccgcaattacaatcagaggaacctacttccctcctggcaaagaacccaaggaaggcgagcggaagatttacttggcaattgaaagtgccaatgaactggctgtgcagaaagcaaaggcagaaatcaccaggctcataaaagaagagctgatccggctgcaaaattcataccaaccaacaaataaaggaagatacaaagtcttatagacatccggaaaaaagatttttacctgtgctggtctatgatgtatgtggcagttgctgtctgcagtttacaatgtattgtaaatgaagattttttaaattctatcttgctgattttttttaaatataagaaactggtacttggtaaagaaatctgtccgtaagtacccccacaatcagtcaaactatatttaaagccagcctgttttcagagtatgatgtcctttaatgtaaactcaaatatcaatattttaaatgtccggataatattctagaggtttaaaaaatggaaatatttgaactttctattgaagacaataaagtacacaagtcgttaaggggctattcactttatcctgtactttcaatgaaattgtgatcatttcctaagaaaaggtaaaattcactatcatattttgtgtccccaccttgatgttacatgactctggaacaatatgaactggatttaagaatgttataatagaagtcttacaaaatggg

SEQ ID NO: 11761 - protein, 812 aa, Homo sapiens
MEGEELDPLDAYMEEVKEEVKKFNMRSVKGGGGNEKKSGPTVTKVVTVVTTKKAVVDSDKKKGELMENDQDAMEYSSEEEEVDLQTALTGYQTKQRKLLEPVDHGKIEYEPFRKNFYVEVPELAKMSQEEVNVFRLEMEGITVKGKGCPKPIKSWVQCGISMKILNSLKKHGYEKPTPIQTQAIPAIMSGRDLIGIAKTGSGKTIAFLLPMFRHIMDQRSLEEGEGPIAVIMTPTRELALQITKECKKFSKTLGLRVVCVYGGTGISEQIAELKRGAEIIVCTPGRMIDMLAANSGRVTNLRRVTYVVLDEADRMFDMGFEPQVMRIVDNVRPDRQTVMFSATFPRAMEALARRILSKPIEVQVGGRSVVCSDVEQQVIVIEEEKKFLKLLELLGHYQESGSVIIFVDKQEHADGLLKDLMRASYPCMSLHGGIDQYDRDSIINDFKNGTCKLLVATSVAARGLDVKHLILVVNYSCPNHYEDYVHRAGRTGRAGNKGYAYTFITEDQARYAGDIIKALELSGTAVPPDLEKLWSDFKDQQKAEGKIIKKSSGFSGKGFKFDETEQALANERKKLQKAALGLQDSDDEDAAVDIDEQIESMFNSKKRVKDMAAPGTSSVPAPTAGNAEKLEIAKRLALRINAQKNLGIESQDVMQQATNAILRGGTILAPTVSAKTIAEQLAEKINAKLNYVPLEKQEEERQDGGQNESFKRYEEELEINDFPQTARWKVTSKEALQRISEYSEAAITIRGTYFPPGKEPKEGERKIYLAIESANELAVQKAKAEITRLIKEELIRLQNSYQPTNKGRYKVL

SEQ ID NO: 11762 - DNA, 3896 bp, Homo sapiens
tccggtcggcttttctcttccttcggctgccggcgccagcacgtcctgttttcgttggccgcgctgggatggccgccacagctgtaggtgctgctagtgtttagcgctggtctttgccgggcgttgagggcagctcagcctccttgtttgtccggttcgcctgtgcgtggtactcaagggcaccagtattcccgcggtcggcagcatgggtcgggagtcacgccactatcgaaaacgatcggcatcccggggtcgctctggaagtcggtctagaagtcgctcaccctcagacaaaagaagtaaacgtggagatgacagacggtctagaagtagagatagagataggaggagagagaggtctcgtagcagggataaaagaagatctcggtcaagggacaggaagcgtctgagacgttccagaagtagagagagagacagaagccgagagcgaagaagatctcgaagtagagacaggagacgctcaaggagtagaagccggggccggcgatcccgatcctccagtcctggaaataaaagcaagaaaactgagaatagatctaggtccaaagagaaaactgatggtggggaaagttctaaagagaagaaaaaagacaaagatgacaaggaggatgaaaaagaaaaagatgctggcaactttgaccagaataagctggaagaagaaatgagaaagcgaaaagaaagagtagaaaaatggcgagaagagcaacgtaaaaaggctatggaaaacataggagaactgaaaaaggaaatcgaagagatgaaacaagggaaaaagtggagtttagaggacgatgatgatgacgaagatgatcctgcagaagctgaaaaggagggaaatgaaatggagggtgaggagttagatccattagatgcttacatggaagaagtgaaagaggaagtaaaaaaatttaacatgagaagtgtaaaaggtggtgggggaaatgaaaagaagtctgggccaacggtcacaaaagttgtcactgttgtgacaaccaaaaaagcagttgtggattctgataagaagaaaggtgagctgatggagaatgaccaggatgccatggagtattcttcagaggaggaagaagttgatcttcagacagcccttacagggtatcaaacaaaacagcgaaagcttctagaaccagttgatcatggaaaaattgagtatgagccatttaggaaaaacttctatgttgaagttccagaactagcaaaaatgtctcaagaagaggtaaatgtgtttcgattggaaatggagggcattacagttaaaggaaaaggttgccccaaaccaattaaatcctgggtccagtgtggaatttccatgaagatcttaaattccctcaagaagcatggctatgaaaagcccacgcccatccaaacccaagctattcctgctataatgtctggacgagatttgattggcattgccaaaacaggaagtggaaagaccattgcttttctgttgcccatgtttagacacatcatggatcagaggtcattagaggaaggagaggggccaatagctgtcatcatgactccaactcgagaactggctttacagattactaaagagtgtaagaagttttccaagactttgggacttagagtggtctgtgtttacggaggaacaggaatcagtgagcagattgctgagctgaaaagaggtgctgaaattattgtttgcacacctggtcgaatgattgacatgttagccgctaacagtggtcgggtcacaaatcttcgaagagtgacatatgttgttttagatgaagcagacagaatgtttgacatgggttttgaaccccaggtcatgcgcatcgtggataatgttcgtcctgatcgacagacggttatgttttcagctactttccccagagctatggaggctttggctcgcaggatcctcagtaaacctattgaagtacaagttggaggcaggagtgtggtttgctcagatgtggagcaacaagtgattgtgattgaagaagaaaagaaattcttgaagttacttgagcttctaggccattatcaagagtcaggatctgtcattatatttgtggataagcaggaacatgctgatggtcttcttaaggatttaatgagagcatcttatccttgcatgtctcttcatggaggcattgatcaatatgacagagatagcatcataaatgactttaagaatgggacctgcaaacttcttgtggctacctctgttgctgcccgaggtctagatgtgaaacatctgattcttgtagtaaattatagctgccccaaccattatgaggattatgtacacagagcagggcggactggaagagcaggaaacaagggttatgcttatacttttatcacagaggatcaagctcgctatgctggtgacataattaaagctcttgaattgtcagggactgcagtacctcctgatttagagaaactgtggagtgatttcaaagatcagcagaaagctgaggggaaaataattaaaaagagtagtgggttctctggtaagggattcaagtttgatgaaacagaacaagctttggctaatgagaggaagaagttacaaaaagcagctcttggtctacaagattcagatgatgaggatgctgcagttgatattgatgagcaaattgaaagcatgtttaattcaaagaagagagtaaaggatatggctgctcctggaacatcaagtgttcctgctccaactgcaggaaatgctgagaaattagaaattgctaagagattggctcttagaatcaatgcccagaagaatttgggcatcgagtctcaggatgtgatgcagcaggccaccaatgcaattcttaggggtggcaccattctggctcccactgtttctgcaaaaaccattgcagaacaacttgctgaaaagatcaatgccaagctcaattatgtgccgttagagaaacaagaagaagagagacaggatggtggacagaatgaatcttttaagagatatgaagaagaattagagatcaatgacttcccacagactgctaggtggaaagttacctctaaggaagctctgcagagaatcagtgaatactctgaagccgcaattacaatcagaggaacctacttccctcctggcaaagaacccaaggaaggcgagcggaagatttacttggcaattgaaagtgccaatgaactggctgtgcagaaagcaaaggcagaaatcaccaggctcataaaagaagagctgatccggctgcaaaattcataccaaccaacaaataaaggaagatacaaagtcttatagacatccggaaaaaagatttttacctgtgctggtctatgatgtatgtggcagttgctgtctgcagtttacaatgtattgtaaatgaagattttttaaattctatcttgctgattttttttaaatataagaaactggtacttggtaaagaaatctgtccgtaagtacccccacaatcagtcaaactatatttaaagccagcctgttttcagagtatgatgtcctttaatgtaaactcaaatatcaatattttaaatgtccggataatattctagaggtttaaaaaatggaaatatttgaactttctattgaagacaataaagtacacaagtcgttaaggggctattcactttatcctgtactttcaatgaaattgtgatcatttcctaagaaaaggtaaaattcactatcatattttgtgtccccaccttgatgttacatgactctggaacaatatgaactggatttaagaatgttataatagaagtcttacaaaatgggttgagagtttttgtttcaatttttatcatcataaatgggcaaaaagtagttggactaatttcggtttttatacaagtaaagatttaatagtataagg

SEQ ID NO: 11763 - protein, 1031 aa, Homo sapiens; identical to SEQ ID NO: 1120

SEQ ID NO: 11764 - DNA, 3810 bp, Homo sapiens
tccggtcggcttttctcttccttcggctgccggcgccagcacgtcctgttttcgttggccgcgctgggatggccgccacagctgtaggtgctgctagtgtttagcgctggtctttgccgggcgttgagggcagctcagcctccttgtttgtccggttcgcctgtgcgtggtactcaagggcaccagtattcccgcggtcggcagcatgggtcgggagtcacgccactatcgaaaacgatcggcatcccggggtcgctctggaagtcggtctagaagtcgctcaccctcagacaaaagaagtaaacgtggagatgacagacggtctagaagtagagatagagataggaggagagagaggtctcgtagcagggataaaagaagatctcggtcaagggacaggaagcgtctgagacgttccagaagtagagagagagacagaagccgagagcgaagaagatctcgaagtagagacaggagacgctcaaggagtagaagccggggccggcgatcccgatcctccagtcctggaaataaaagcaagaaaactgagaatagatctaggtccaaagagaaaactgatggtggggaaagttctaaagagaagaaaaaagacaaagatgacaaggaggatgaaaaagaaaaagatgctggcaactttgaccagaataagctggaagaagaaatgagaaagcgaaaagaaagagtagaaaaatggcgagaagagcaacgtaaaaaggctatggaaaacataggaggctgagaaggagggaaatgaaatggagggtgaggagttagatccattagatgcttacatggaagaagtgaaagaggaagtaaaaaaatttaacatgagaagtgtaaaaggtggtgggggaaatgaaaagaagtctgggccaacggtcacaaaagttgtcactgttgtgacaaccaaaaaagcagttgtggattctgataagaagaaaggtgagctgatggagaatgaccaggatgccatggagtattcttcagaggaggaagaagttgatcttcagacagcccttacagggtatcaaacaaaacagcgaaagcttctagaaccagttgatcatggaaaaattgagtatgagccatttaggaaaaacttctatgttgaagttccagaactagcaaaaatgtctcaagaagaggtaaatgtgtttcgattggaaatggagggcattacagttaaaggaaaaggttgccccaaaccaattaaatcctgggtccagtgtggaatttccatgaagatcttaaattccctcaagaagcatggctatgaaaagcccacgcccatccaaacccaagctattcctgctataatgtctggacgagatttgattggcattgccaaaacaggaagtggaaagaccattgcttttctgttgcccatgtttagacacatcatggatcagaggtcattagaggaaggagaggggccaatagctgtcatcatgactccaactcgagaactggctttacagattactaaagagtgtaagaagttttccaagactttgggacttagagtggtctgtgtttacggaggaacaggaatcagtgagcagattgctgagctgaaaagaggtgctgaaattattgtttgcacacctggtcgaatgattgacatgttagccgctaacagtggtcgggtcacaaatcttcgaagagtgacatatgttgttttagatgaagcagacagaatgtttgacatgggttttgaaccccaggtcatgcgcatcgtggataatgttcgtcctgatcgacagacggttatgttttcagctactttccccagagctatggaggctttggctcgcaggatcctcagtaaacctattgaagtacaagttggaggcaggagtgtggtttgctcagatgtggagcaacaagtgattgtgattgaagaagaaaagaaattcttgaagttacttgagcttctaggccattatcaagagtcaggatctgtcattatatttgtggataagcaggaacatgctgatggtcttcttaaggatttaatgagagcatcttatccttgcatgtctcttcatggaggcattgatcaatatgacagagatagcatcataaatgactttaagaatgggacctgcaaacttcttgtggctacctctgttgctgcccgaggtctagatgtgaaacatctgattcttgtagtaaattatagctgccccaaccattatgaggattatgtacacagagcagggcggactggaagagcaggaaacaagggttatgcttatacttttatcacagaggatcaagctcgctatgctggtgacataattaaagctcttgaattgtcagggactgcagtacctcctgatttagagaaactgtggagtgatttcaaagatcagcagaaagctgaggggaaaataattaaaaagagtagtgggttctctggtaagggattcaagtttgatgaaacagaacaagctttggctaatgagaggaagaagttacaaaaagcagctcttggtctacaagattcagatgatgaggatgctgcagttgatattgatgagcaaattgaaagcatgtttaattcaaagaagagagtaaaggatatggctgctcctggaacatcaagtgttcctgctccaactgcaggaaatgctgagaaattagaaattgctaagagattggctcttagaatcaatgcccagaagaatttgggcatcgagtctcaggatgtgatgcagcaggccaccaatgcaattcttaggggtggcaccattctggctcccactgtttctgcaaaaaccattgcagaacaacttgctgaaaagatcaatgccaagctcaattatgtgccgttagagaaacaagaagaagagagacaggatggtggacagaatgaatcttttaagagatatgaagaagaattagagatcaatgacttcccacagactgctaggtggaaagttacctctaaggaagctctgcagagaatcagtgaatactctgaagccgcaattacaatcagaggaacctacttccctcctggcaaagaacccaaggaaggcgagcggaagatttacttggcaattgaaagtgccaatgaactggctgtgcagaaagcaaaggcagaaatcaccaggctcataaaagaagagctgatccggctgcaaaattcataccaaccaacaaataaaggaagatacaaagtcttatagacatccggaaaaaagatttttacctgtgctggtctatgatgtatgtggcagttgctgtctgcagtttacaatgtattgtaaatgaagattttttaaattctatcttgctgattttttttaaatataagaaactggtacttggtaaagaaatctgtccgtaagtacccccacaatcagtcaaactatatttaaagccagcctgttttcagagtatgatgtcctttaatgtaaactcaaatatcaatattttaaatgtccggataatattctagaggtttaaaaaatggaaatatttgaactttctattgaagacaataaagtacacaagtcgttaaggggctattcactttatcctgtactttcaatgaaattgtgatcatttcctaagaaaaggtaaaattcactatcatattttgtgtccccaccttgatgttacatgactctggaacaatatgaactggatttaagaatgttataatagaagtcttacaaaatgggttgagagtttttgtttcaatttttatcatcataaatgggcaaaaagtagttggactaatttcggtttttatacaagtaaagatttaatagtataagg

SEQ ID NO: 11765 - protein, 812 aa, Homo sapiens; identical to SEQ ID NO: 11761

SEQ ID NO: 11766 - DNA, 5729 bp, Homo sapiens
tccggtcggcttttctcttccttcggctgccggcgccagcacgtcctgttttcgttggccgcgctgggatggccgccacagctgtaggtgctgctagtgtttagcgctggtctttgccgggcgttgagggcagctcagcctccttgtttgtccggttcgcctgtgcgtggtactcaagggcaccagtattcccgcggtcggcagcatgggtcgggagtcacgccactatcgaaaacgatcggcatcccggggtcgctctggaagtcggtctagaagtcgctcaccctcagacaaaagaagtaaacgtggagatgacagacggtctagaagtagagatagagataggaggagagagaggtctcgtagcagggataaaagaagatctcggtcaagggacaggaagcgtctgagacgttccagaagtagagagagagacagaagccgagagcgaagaagatctcgaagtagagacaggagacgctcaaggagtagaagccggggccggcgatcccgatcctccagtcctggaaataaaagcaagaaaactgagaatagatctaggtccaaagagaaaactgatggtggggaaagttctaaagagaagaaaaaagacaaagatgacaaggaggatgaaaaagaaaaagatgctggcaactttgaccagaataagctggaagaagaaatgagaaagcgaaaagaaagagtagaaaaatggcgagaagagcaacgtaaaaaggctatggaaaacataggagaactgaaaaaggaaatcgaagagatgaaacaagggaaaaagtggagtttagaggacgatgatgatgacgaagatgatcctgcagaagctgaaaaggagggaaatgaaatggagggtgaggagttagatccattagatgcttacatggaagaagtgaaagaggaagtaaaaaaatttaacatgagaagtgtaaaaggtggtgggggaaatgaaaagaagtctgggccaacggtcacaaaagttgtcactgttgtgacaaccaaaaaagcagttgtggattctgataagaagaaaggtgagctgatggagaatgaccaggatgccatggagtattcttcagaggaggaagaagttgatcttcagacagcccttacagggtatcaaacaaaacagcgaaagcttctagaaccagttgatcatggaaaaattgagtatgagccatttaggaaaaacttctatgttgaagttccagaactagcaaaaatgtctcaagaagaggtaaatgtgtttcgattggaaatggagggcattacagttaaaggaaaaggttgccccaaaccaattaaatcctgggtccagtgtggaatttccatgaagatcttaaattccctcaagaagcatggctatgaaaagcccacgcccatccaaacccaagctattcctgctataatgtctggacgagatttgattggcattgccaaaacaggaagtggaaagaccattgcttttctgttgcccatgtttagacacatcatggatcagaggtcattagaggaaggagaggggccaatagctgtcatcatgactccaactcgagaactggctttacagattactaaagagtgtaagaagttttccaagactttgggacttagagtggtctgtgtttacggaggaacaggaatcagtgagcagattgctgagctgaaaagaggtgctgaaattattgtttgcacacctggtcgaatgattgacatgttagccgctaacagtggtcgggtcacaaatcttcgaagagtgacatatgttgttttagatgaagcagacagaatgtttgacatgggttttgaaccccaggtcatgcgcatcgtggataatgttcgtcctgatcgacagacggttatgttttcagctactttccccagagctatggaggctttggctcgcaggatcctcagtaaacctattgaagtacaagttggaggcaggagtgtggtttgctcagatgtggagcaacaagtgattgtgattgaagaagaaaagaaattcttgaagttacttgagcttctaggccattatcaagagtcaggatctgtcattatatttgtggataagcaggaacatgctgatggtcttcttaaggatttaatgagagcatcttatccttgcatgtctcttcatggaggcattgatcaatatgacagagatagcatcataaatgactttaagaatgggacctgcaaacttcttgtggctacctctgttgctgcccgaggtctagatgtgaaacatctgattcttgtagtaaattatagctgccccaaccattatgaggattatgtacacagagcagggcggactggaagagcaggaaacaagggttatgcttatacttttatcacagaggatcaagctcgctatgctggtgacataattaaagctcttgaattgtcagggactgcagtacctcctgatttagagaaactgtggagtgatttcaaagatcagcagaaagctgaggggaaaataattaaaaagagtagtgggttctctggtaagggattcaagtttgatgaaacagaacaagctttggctaatgagaggaagaagttacaaaaagcagctcttggtctacaagattcagatgatgaggatgctgcagttgatattgatgagcaaattgaaagcatgtttaattcaaagaagagagtaaaggatatggctgctcctggaacatcaagtgttcctgctccaactgcaggaaatgctgagaaattagaaattgctaagagattggctcttagaatcaatgcccagaagaatttgggcatcgagtctcaggatgtgatgcagcaggccaccaatgcaattcttaggggtggcaccattctggctcccactgtttctgcaaaaaccattgcagaacaacttgctgaaaagatcaatgccaagctcaattatgtgccgttagagaaacaagaagaagagagacaggatggtggacagaatgaatcttttaagagatatgaagaagaattagagatcaatgacttcccacagactgctaggtggaaagttacctctaaggaagctctgcagagaatcagtgaatactctgaagccgcaattacaatcagaggaacctacttccctcctggcaaagaacccaaggaaggcgagcggaagatttacttggcaattgaaagtgccaatgaactggctgtgcagaaagcaaaggcagaaatcaccaggctcataaaagaagagctgatccggctgcaaaattcataccaaccaacaaataaaggaagatacaaagtcttatagacatccggaaaaaagatttttacctgtgctggtctatgatgtatgtggcagttgctgtctgcagtttacaatgtattgtaaatgaagattttttaaattctatcttgctgattttttttaaatataagaaactggtacttggtaaagaaatctgtccgtaagtacccccacaatcagtcaaactatatttaaagccagcctgttttcagagtatgatgtcctttaatgtaaactcaaatatcaatattttaaatgtccggataatattctagaggtttaaaaaatggaaatatttgaactttctattgaagacaataaagtacacaagtcgttaaggggctattcactttatcctgtactttcaatgaaattgtgatcatttcctaagaaaaggtaaaattcactatcatattttgtgtccccaccttgatgttacatgactctggaacaatatgaactggatttaagaatgttataatagaagtcttacaaaatgggttgagagtttttgtttcaatttttatcatcataaatgggcaaaaagtagttggactaatttcggtttttatacaagtaaagatttaatagtataaggatttttttgcatttctttacactgagtgtaaaactctacaaagagttatagtatttactactttgaggtttccctcacaacttctggctccatacctagcccctcttttataatcttccttaaaagaaagagtgtagcctataaatactaaatatgataccttttccttctagaaagtgtttatttatatatctatacatgttgtatgtacaaatatcctactacttttaatctgatttttcttcaggattattgagtaggttgtgaattttctttcttaaaaattgtaaaacataatggtacccaagttttaaacttagatgtgcttcatcttagtgaaatttaattcacaaggaatcataaattgtgtttttgaggctgggcgcagtgactcacacctgtatcccagcaatttgggaggccgaggtgggcagatcacttgaggtcaggagttcaagactagcctggtcaacatggtgaaaccctgtctctactaaaaatacaaaaattagtcggcatggtggtgggtggctgtaatcccagctactcaggaggctgaggcagaagaatctgagccaagataacaccattgcactccagcctgggcgacagagtgagactatctcaaaaataaataaataaataaataaatagtatttttgagccttcaagatacagttcctgaatattctaatttaaattgttataattggattacctaatattcttttcaagactcctgatgtattaacttcatgttattgtcacttttcaaaaaaggaatttttttcaggagttaaataaagtcagtcttttatatccaagggtttcaaacccacagattaaaccaaccacagatcaaaaatagaaaaaaaaaaaaaaagaaaaaaagaatgtaaaattttaaaaatacagtttaacagctgtaaaagttttactataacatttacattgtgttaggtattttaagtaatttaaaggttacagtatacaggcggttaaagtatacaggaggatgtgcatcggttatatgcatatagcaagccatttcatataagaggcttgaacatccatggattttggtatagaggaggggtttaaggggtgtcctgcaatcagtccccctctcataccaaaggatgactgtatatttcttaaatgaagagactttcattctttaaatattattgacttacagtttaaaaataaataaataaaagcatactatagttgtaaaaacaaataattttaatagtatattcagtggctgaagtgatagggagtattaatcattatttcttcagtataaagttattcttcctgaaaaagtaagatatacctgggaaatattcttggatccttcacacatccacttaatttcttgaaggaagaaaacagacaaaagacatgtaacaacagaaacaaataaaccacttactgtaaaatttcagaaattgtgggctcattccctccctctagtttatttatttgctcatctttatcacctaatggtagtttgttttctttggtagagtatatggcagtcccacatcgatgataattggtgctcccttcatccaactggatcactttgagattcagttttacatcattttagcattttgtttgtatatcagttgtgatgagccactgataaaattttgttctaaaatgaaacatattactttgttagtacattttttagtgtcacactgacttttaaaatttgaatgatatatagactttgtttttttaatgcaatatgaatatttgctcatgttttctaaattccttataaaataaaattaattcgaattcaatctgcactttctt

SEQ ID NO: 11767 - protein, 1031 aa, Homo sapiens; identical to SEQ ID NO: 1120

SEQ ID NO: 11768 - DNA, 5643 bp, Homo sapiens
tccggtcggcttttctcttccttcggctgccggcgccagcacgtcctgttttcgttggccgcgctgggatggccgccacagctgtaggtgctgctagtgtttagcgctggtctttgccgggcgttgagggcagctcagcctccttgtttgtccggttcgcctgtgcgtggtactcaagggcaccagtattcccgcggtcggcagcatgggtcgggagtcacgccactatcgaaaacgatcggcatcccggggtcgctctggaagtcggtctagaagtcgctcaccctcagacaaaagaagtaaacgtggagatgacagacggtctagaagtagagatagagataggaggagagagaggtctcgtagcagggataaaagaagatctcggtcaagggacaggaagcgtctgagacgttccagaagtagagagagagacagaagccgagagcgaagaagatctcgaagtagagacaggagacgctcaaggagtagaagccggggccggcgatcccgatcctccagtcctggaaataaaagcaagaaaactgagaatagatctaggtccaaagagaaaactgatggtggggaaagttctaaagagaagaaaaaagacaaagatgacaaggaggatgaaaaagaaaaagatgctggcaactttgaccagaataagctggaagaagaaatgagaaagcgaaaagaaagagtagaaaaatggcgagaagagcaacgtaaaaaggctatggaaaacataggaggctgagaaggagggaaatgaaatggagggtgaggagttagatccattagatgcttacatggaagaagtgaaagaggaagtaaaaaaatttaacatgagaagtgtaaaaggtggtgggggaaatgaaaagaagtctgggccaacggtcacaaaagttgtcactgttgtgacaaccaaaaaagcagttgtggattctgataagaagaaaggtgagctgatggagaatgaccaggatgccatggagtattcttcagaggaggaagaagttgatcttcagacagcccttacagggtatcaaacaaaacagcgaaagcttctagaaccagttgatcatggaaaaattgagtatgagccatttaggaaaaacttctatgttgaagttccagaactagcaaaaatgtctcaagaagaggtaaatgtgtttcgattggaaatggagggcattacagttaaaggaaaaggttgccccaaaccaattaaatcctgggtccagtgtggaatttccatgaagatcttaaattccctcaagaagcatggctatgaaaagcccacgcccatccaaacccaagctattcctgctataatgtctggacgagatttgattggcattgccaaaacaggaagtggaaagaccattgcttttctgttgcccatgtttagacacatcatggatcagaggtcattagaggaaggagaggggccaatagctgtcatcatgactccaactcgagaactggctttacagattactaaagagtgtaagaagttttccaagactttgggacttagagtggtctgtgtttacggaggaacaggaatcagtgagcagattgctgagctgaaaagaggtgctgaaattattgtttgcacacctggtcgaatgattgacatgttagccgctaacagtggtcgggtcacaaatcttcgaagagtgacatatgttgttttagatgaagcagacagaatgtttgacatgggttttgaaccccaggtcatgcgcatcgtggataatgttcgtcctgatcgacagacggttatgttttcagctactttccccagagctatggaggctttggctcgcaggatcctcagtaaacctattgaagtacaagttggaggcaggagtgtggtttgctcagatgtggagcaacaagtgattgtgattgaagaagaaaagaaattcttgaagttacttgagcttctaggccattatcaagagtcaggatctgtcattatatttgtggataagcaggaacatgctgatggtcttcttaaggatttaatgagagcatcttatccttgcatgtctcttcatggaggcattgatcaatatgacagagatagcatcataaatgactttaagaatgggacctgcaaacttcttgtggctacctctgttgctgcccgaggtctagatgtgaaacatctgattcttgtagtaaattatagctgccccaaccattatgaggattatgtacacagagcagggcggactggaagagcaggaaacaagggttatgcttatacttttatcacagaggatcaagctcgctatgctggtgacataattaaagctcttgaattgtcagggactgcagtacctcctgatttagagaaactgtggagtgatttcaaagatcagcagaaagctgaggggaaaataattaaaaagagtagtgggttctctggtaagggattcaagtttgatgaaacagaacaagctttggctaatgagaggaagaagttacaaaaagcagctcttggtctacaagattcagatgatgaggatgctgcagttgatattgatgagcaaattgaaagcatgtttaattcaaagaagagagtaaaggatatggctgctcctggaacatcaagtgttcctgctccaactgcaggaaatgctgagaaattagaaattgctaagagattggctcttagaatcaatgcccagaagaatttgggcatcgagtctcaggatgtgatgcagcaggccaccaatgcaattcttaggggtggcaccattctggctcccactgtttctgcaaaaaccattgcagaacaacttgctgaaaagatcaatgccaagctcaattatgtgccgttagagaaacaagaagaagagagacaggatggtggacagaatgaatcttttaagagatatgaagaagaattagagatcaatgacttcccacagactgctaggtggaaagttacctctaaggaagctctgcagagaatcagtgaatactctgaagccgcaattacaatcagaggaacctacttccctcctggcaaagaacccaaggaaggcgagcggaagatttacttggcaattgaaagtgccaatgaactggctgtgcagaaagcaaaggcagaaatcaccaggctcataaaagaagagctgatccggctgcaaaattcataccaaccaacaaataaaggaagatacaaagtcttatagacatccggaaaaaagatttttacctgtgctggtctatgatgtatgtggcagttgctgtctgcagtttacaatgtattgtaaatgaagattttttaaattctatcttgctgattttttttaaatataagaaactggtacttggtaaagaaatctgtccgtaagtacccccacaatcagtcaaactatatttaaagccagcctgttttcagagtatgatgtcctttaatgtaaactcaaatatcaatattttaaatgtccggataatattctagaggtttaaaaaatggaaatatttgaactttctattgaagacaataaagtacacaagtcgttaaggggctattcactttatcctgtactttcaatgaaattgtgatcatttcctaagaaaaggtaaaattcactatcatattttgtgtccccaccttgatgttacatgactctggaacaatatgaactggatttaagaatgttataatagaagtcttacaaaatgggttgagagtttttgtttcaatttttatcatcataaatgggcaaaaagtagttggactaatttcggtttttatacaagtaaagatttaatagtataaggatttttttgcatttctttacactgagtgtaaaactctacaaagagttatagtatttactactttgaggtttccctcacaacttctggctccatacctagcccctcttttataatcttccttaaaagaaagagtgtagcctataaatactaaatatgataccttttccttctagaaagtgtttatttatatatctatacatgttgtatgtacaaatatcctactacttttaatctgatttttcttcaggattattgagtaggttgtgaattttctttcttaaaaattgtaaaacataatggtacccaagttttaaacttagatgtgcttcatcttagtgaaatttaattcacaaggaatcataaattgtgtttttgaggctgggcgcagtgactcacacctgtatcccagcaatttgggaggccgaggtgggcagatcacttgaggtcaggagttcaagactagcctggtcaacatggtgaaaccctgtctctactaaaaatacaaaaattagtcggcatggtggtgggtggctgtaatcccagctactcaggaggctgaggcagaagaatctgagccaagataacaccattgcactccagcctgggcgacagagtgagactatctcaaaaataaataaataaataaataaatagtatttttgagccttcaagatacagttcctgaatattctaatttaaattgttataattggattacctaatattcttttcaagactcctgatgtattaacttcatgttattgtcacttttcaaaaaaggaatttttttcaggagttaaataaagtcagtcttttatatccaagggtttcaaacccacagattaaaccaaccacagatcaaaaatagaaaaaaaaaaaaaaagaaaaaaagaatgtaaaattttaaaaatacagtttaacagctgtaaaagttttactataacatttacattgtgttaggtattttaagtaatttaaaggttacagtatacaggcggttaaagtatacaggaggatgtgcatcggttatatgcatatagcaagccatttcatataagaggcttgaacatccatggattttggtatagaggaggggtttaaggggtgtcctgcaatcagtccccctctcataccaaaggatgactgtatatttcttaaatgaagagactttcattctttaaatattattgacttacagtttaaaaataaataaataaaagcatactatagttgtaaaaacaaataattttaatagtatattcagtggctgaagtgatagggagtattaatcattatttcttcagtataaagttattcttcctgaaaaagtaagatatacctgggaaatattcttggatccttcacacatccacttaatttcttgaaggaagaaaacagacaaaagacatgtaacaacagaaacaaataaaccacttactgtaaaatttcagaaattgtgggctcattccctccctctagtttatttatttgctcatctttatcacctaatggtagtttgttttctttggtagagtatatggcagtcccacatcgatgataattggtgctcccttcatccaactggatcactttgagattcagttttacatcattttagcattttgtttgtatatcagttgtgatgagccactgataaaattttgttctaaaatgaaacatattactttgttagtacattttttagtgtcacactgacttttaaaatttgaatgatatatagactttgtttttttaatgcaatatgaatatttgctcatgttttctaaattccttataaaataaaattaattcgaattcaatctgcactttctt

SEQ ID NO: 11769 - protein, 812 aa, Homo sapiens; identical to SEQ ID NO: 11761

SEQ ID NO: 11770 - DNA, 5973 bp, Homo sapiens
tccggtcggcttttctcttccttcggctgccggcgccagcacgtcctgttttcgttggccgcgctgggatggccgccacagctgtaggtgctgctagtgtttagcgctggtctttgccgggcgttgagggcagctcagcctccttgtttgtccggttcgcctgtgcgtggtactcaagggcaccagtattcccgcggtcggcagcatgggtcgggagtcacgccactatcgaaaacgatcggcatcccggggtcgctctggaagtcggtctagaagtcgctcaccctcagacaaaagaagtaaacgtggagatgacagacggtctagaagtagagatagagataggaggagagagaggtctcgtagcagggataaaagaagatctcggtcaagggacaggaagcgtctgagacgttccagaagtagagagagagacagaagccgagagcgaagaagatctcgaagtagagacaggagacgctcaaggagtagaagccggggccggcgatcccgatcctccagtcctggaaataaaagcaagaaaactgagaatagatctaggtccaaagagaaaactgatggtggggaaagttctaaagagaagaaaaaagacaaagatgacaaggaggatgaaaaagaaaaagatgctggcaactttgaccagaataagctggaagaagaaatgagaaagcgaaaagaaagagtagaaaaatggcgagaagagcaacgtaaaaaggctatggaaaacataggagaactgaaaaaggaaatcgaagagatgaaacaagggaaaaagtggagtttagaggacgatgatgatgacgaagatgatcctgcagaagctgaaaaggagggaaatgaaatggagggtgaggagttagatccattagatgcttacatggaagaagtgaaagaggaagtaaaaaaatttaacatgagaagtgtaaaaggtggtgggggaaatgaaaagaagtctgggccaacggtcacaaaagttgtcactgttgtgacaaccaaaaaagcagttgtggattctgataagaagaaaggtgagctgatggagaatgaccaggatgccatggagtattcttcagaggaggaagaagttgatcttcagacagcccttacagggtatcaaacaaaacagcgaaagcttctagaaccagttgatcatggaaaaattgagtatgagccatttaggaaaaacttctatgttgaagttccagaactagcaaaaatgtctcaagaagaggtaaatgtgtttcgattggaaatggagggcattacagttaaaggaaaaggttgccccaaaccaattaaatcctgggtccagtgtggaatttccatgaagatcttaaattccctcaagaagcatggctatgaaaagcccacgcccatccaaacccaagctattcctgctataatgtctggacgagatttgattggcattgccaaaacaggaagtggaaagaccattgcttttctgttgcccatgtttagacacatcatggatcagaggtcattagaggaaggagaggggccaatagctgtcatcatgactccaactcgagaactggctttacagattactaaagagtgtaagaagttttccaagactttgggacttagagtggtctgtgtttacggaggaacaggaatcagtgagcagattgctgagctgaaaagaggtgctgaaattattgtttgcacacctggtcgaatgattgacatgttagccgctaacagtggtcgggtcacaaatcttcgaagagtgacatatgttgttttagatgaagcagacagaatgtttgacatgggttttgaaccccaggtcatgcgcatcgtggataatgttcgtcctgatcgacagacggttatgttttcagctactttccccagagctatggaggctttggctcgcaggatcctcagtaaacctattgaagtacaagttggaggcaggagtgtggtttgctcagatgtggagcaacaagtgattgtgattgaagaagaaaagaaattcttgaagttacttgagcttctaggccattatcaagagtcaggatctgtcattatatttgtggataagcaggaacatgctgatggtcttcttaaggatttaatgagagcatcttatccttgcatgtctcttcatggaggcattgatcaatatgacagagatagcatcataaatgactttaagaatgggacctgcaaacttcttgtggctacctctgttgctgcccgaggtctagatgtgaaacatctgattcttgtagtaaattatagctgccccaaccattatgaggattatgtacacagagcagggcggactggaagagcaggaaacaagggttatgcttatacttttatcacagaggatcaagctcgctatgctggtgacataattaaagctcttgaattgtcagggactgcagtacctcctgatttagagaaactgtggagtgatttcaaagatcagcagaaagctgaggggaaaataattaaaaagagtagtgggttctctggtaagggattcaagtttgatgaaacagaacaagctttggctaatgagaggaagaagttacaaaaagcagctcttggtctacaagattcagatgatgaggatgctgcagttgatattgatgagcaaattgaaagcatgtttaattcaaagaagagagtaaaggatatggctgctcctggaacatcaagtgttcctgctccaactgcaggaaatgctgagaaattagaaattgctaagagattggctcttagaatcaatgcccagaagaatttgggcatcgagtctcaggatgtgatgcagcaggccaccaatgcaattcttaggggtggcaccattctggctcccactgtttctgcaaaaaccattgcagaacaacttgctgaaaagatcaatgccaagctcaattatgtgccgttagagaaacaagaagaagagagacaggatggtggacagaatgaatcttttaagagatatgaagaagaattagagatcaatgacttcccacagactgctaggtggaaagttacctctaaggaagctctgcagagaatcagtgaatactctgaagccgcaattacaatcagaggaacctacttccctcctggcaaagaacccaaggaaggcgagcggaagatttacttggcaattgaaagtgccaatgaactggctgtgcagaaagcaaaggcagaaatcaccaggctcataaaagaagagctgatccggctgcaaaattcataccaaccaacaaataaaggaagatacaaagtcttatagacatccggaaaaaagatttttacctgtgctggtctatgatgtatgtggcagttgctgtctgcagtttacaatgtattgtaaatgaagattttttaaattctatcttgctgattttttttaaatataagaaactggtacttggtaaagaaatctgtccgtaagtacccccacaatcagtcaaactatatttaaagccagcctgttttcagagtatgatgtcctttaatgtaaactcaaatatcaatattttaaatgtccggataatattctagaggtttaaaaaatggaaatatttgaactttctattgaagacaataaagtacacaagtcgttaaggggctattcactttatcctgtactttcaatgaaattgtgatcatttcctaagaaaaggtaaaattcactatcatattttgtgtccccaccttgatgttacatgactctggaacaatatgaactggatttaagaatgttataatagaagtcttacaaaatgggttgagagtttttgtttcaatttttatcatcataaatgggcaaaaagtagttggactaatttcggtttttatacaagtaaagatttaatagtataaggatttttttgcatttctttacactgagtgtaaaactctacaaagagttatagtatttactactttgaggtttccctcacaacttctggctccatacctagcccctcttttataatcttccttaaaagaaagagtgtagcctataaatactaaatatgataccttttccttctagaaagtgtttatttatatatctatacatgttgtatgtacaaatatcctactacttttaatctgatttttcttcaggattattgagtaggttgtgaattttctttcttaaaaattgtaaaacataatggtacccaagttttaaacttagatgtgcttcatcttagtgaaatttaattcacaaggaatcataaattgtgtttttgaggctgggcgcagtgactcacacctgtatcccagcaatttgggaggccgaggtgggcagatcacttgaggtcaggagttcaagactagcctggtcaacatggtgaaaccctgtctctactaaaaatacaaaaattagtcggcatggtggtgggtggctgtaatcccagctactcaggaggctgaggcagaagaatctgagccaagataacaccattgcactccagcctgggcgacagagtgagactatctcaaaaataaataaataaataaataaatagtatttttgagccttcaagatacagttcctgaatattctaatttaaattgttataattggattacctaatattcttttcaagactcctgatgtattaacttcatgttattgtcacttttcaaaaaaggaatttttttcaggagttaaataaagtcagtcttttatatccaagggtttcaaacccacagattaaaccaaccacagatcaaaaatagaaaaaaaaaaaaaaagaaaaaaagaatgtaaaattttaaaaatacagtttaacagctgtaaaagttttactataacatttacattgtgttaggtattttaagtaatttaaaggttacagtatacaggcggttaaagtatacaggaggatgtgcatcggttatatgcatatagcaagccatttcatataagaggcttgaacatccatggattttggtatagaggaggggtttaaggggtgtcctgcaatcagtccccctctcataccaaaggatgactgtatatttcttaaatgaagagactttcattctttaaatattattgacttacagtttaaaaataaataaataaaagcatactatagttgtaaaaacaaataattttaatagtatattcagtggctgaagtgatagggagtattaatcattatttcttcagtataaagttattcttcctgaaaaagtaagatatacctgggaaatattcttggatccttcacacatccacttaatttcttgaaggaagaaaacagacaaaagacatgtaacaacagaaacaaataaaccacttactgtaaaatttcagaaattgtgggctcattccctccctctagtttatttatttgctcatctttatcacctaatggtagtttgttttctttggtagagtatatggcagtcccacatcgatgataattggtgctcccttcatccaactggatcactttgagattcagttttacatcattttagcattttgtttgtatatcagttgtgatgagccactgataaaattttgttctaaaatgaaacatattactttgttagtacattttttagtgtcacactgacttttaaaatttgaatgatatatagactttgtttttttaatgcaatatgaatatttgctcatgttttctaaattccttataaaataaaattaattcgaattcaatctgcactttcttaaaattatctttcctcaatgctttttctttcttctgtttctctaattttgtttatgttggtgagagaagtattatactctctatttttatttaaaaaattctagcaacttattacccaaaatatttataattctgttccaaaaatgtcttcctgaagaaggctcttaagtcttttatgttcattgtatttagcataagagaaacataggtgaaataataggttcatttaccagttggggttttg

SEQ ID NO: 11771 - protein, 1031 aa, Homo sapiens; identical to SEQ ID NO: 1120

SEQ ID NO: 11772 - DNA, 5887 bp, Homo sapiens
tccggtcggcttttctcttccttcggctgccggcgccagcacgtcctgttttcgttggccgcgctgggatggccgccacagctgtaggtgctgctagtgtttagcgctggtctttgccgggcgttgagggcagctcagcctccttgtttgtccggttcgcctgtgcgtggtactcaagggcaccagtattcccgcggtcggcagcatgggtcgggagtcacgccactatcgaaaacgatcggcatcccggggtcgctctggaagtcggtctagaagtcgctcaccctcagacaaaagaagtaaacgtggagatgacagacggtctagaagtagagatagagataggaggagagagaggtctcgtagcagggataaaagaagatctcggtcaagggacaggaagcgtctgagacgttccagaagtagagagagagacagaagccgagagcgaagaagatctcgaagtagagacaggagacgctcaaggagtagaagccggggccggcgatcccgatcctccagtcctggaaataaaagcaagaaaactgagaatagatctaggtccaaagagaaaactgatggtggggaaagttctaaagagaagaaaaaagacaaagatgacaaggaggatgaaaaagaaaaagatgctggcaactttgaccagaataagctggaagaagaaatgagaaagcgaaaagaaagagtagaaaaatggcgagaagagcaacgtaaaaaggctatggaaaacataggaggctgagaaggagggaaatgaaatggagggtgaggagttagatccattagatgcttacatggaagaagtgaaagaggaagtaaaaaaatttaacatgagaagtgtaaaaggtggtgggggaaatgaaaagaagtctgggccaacggtcacaaaagttgtcactgttgtgacaaccaaaaaagcagttgtggattctgataagaagaaaggtgagctgatggagaatgaccaggatgccatggagtattcttcagaggaggaagaagttgatcttcagacagcccttacagggtatcaaacaaaacagcgaaagcttctagaaccagttgatcatggaaaaattgagtatgagccatttaggaaaaacttctatgttgaagttccagaactagcaaaaatgtctcaagaagaggtaaatgtgtttcgattggaaatggagggcattacagttaaaggaaaaggttgccccaaaccaattaaatcctgggtccagtgtggaatttccatgaagatcttaaattccctcaagaagcatggctatgaaaagcccacgcccatccaaacccaagctattcctgctataatgtctggacgagatttgattggcattgccaaaacaggaagtggaaagaccattgcttttctgttgcccatgtttagacacatcatggatcagaggtcattagaggaaggagaggggccaatagctgtcatcatgactccaactcgagaactggctttacagattactaaagagtgtaagaagttttccaagactttgggacttagagtggtctgtgtttacggaggaacaggaatcagtgagcagattgctgagctgaaaagaggtgctgaaattattgtttgcacacctggtcgaatgattgacatgttagccgctaacagtggtcgggtcacaaatcttcgaagagtgacatatgttgttttagatgaagcagacagaatgtttgacatgggttttgaaccccaggtcatgcgcatcgtggataatgttcgtcctgatcgacagacggttatgttttcagctactttccccagagctatggaggctttggctcgcaggatcctcagtaaacctattgaagtacaagttggaggcaggagtgtggtttgctcagatgtggagcaacaagtgattgtgattgaagaagaaaagaaattcttgaagttacttgagcttctaggccattatcaagagtcaggatctgtcattatatttgtggataagcaggaacatgctgatggtcttcttaaggatttaatgagagcatcttatccttgcatgtctcttcatggaggcattgatcaatatgacagagatagcatcataaatgactttaagaatgggacctgcaaacttcttgtggctacctctgttgctgcccgaggtctagatgtgaaacatctgattcttgtagtaaattatagctgccccaaccattatgaggattatgtacacagagcagggcggactggaagagcaggaaacaagggttatgcttatacttttatcacagaggatcaagctcgctatgctggtgacataattaaagctcttgaattgtcagggactgcagtacctcctgatttagagaaactgtggagtgatttcaaagatcagcagaaagctgaggggaaaataattaaaaagagtagtgggttctctggtaagggattcaagtttgatgaaacagaacaagctttggctaatgagaggaagaagttacaaaaagcagctcttggtctacaagattcagatgatgaggatgctgcagttgatattgatgagcaaattgaaagcatgtttaattcaaagaagagagtaaaggatatggctgctcctggaacatcaagtgttcctgctccaactgcaggaaatgctgagaaattagaaattgctaagagattggctcttagaatcaatgcccagaagaatttgggcatcgagtctcaggatgtgatgcagcaggccaccaatgcaattcttaggggtggcaccattctggctcccactgtttctgcaaaaaccattgcagaacaacttgctgaaaagatcaatgccaagctcaattatgtgccgttagagaaacaagaagaagagagacaggatggtggacagaatgaatcttttaagagatatgaagaagaattagagatcaatgacttcccacagactgctaggtggaaagttacctctaaggaagctctgcagagaatcagtgaatactctgaagccgcaattacaatcagaggaacctacttccctcctggcaaagaacccaaggaaggcgagcggaagatttacttggcaattgaaagtgccaatgaactggctgtgcagaaagcaaaggcagaaatcaccaggctcataaaagaagagctgatccggctgcaaaattcataccaaccaacaaataaaggaagatacaaagtcttatagacatccggaaaaaagatttttacctgtgctggtctatgatgtatgtggcagttgctgtctgcagtttacaatgtattgtaaatgaagattttttaaattctatcttgctgattttttttaaatataagaaactggtacttggtaaagaaatctgtccgtaagtacccccacaatcagtcaaactatatttaaagccagcctgttttcagagtatgatgtcctttaatgtaaactcaaatatcaatattttaaatgtccggataatattctagaggtttaaaaaatggaaatatttgaactttctattgaagacaataaagtacacaagtcgttaaggggctattcactttatcctgtactttcaatgaaattgtgatcatttcctaagaaaaggtaaaattcactatcatattttgtgtccccaccttgatgttacatgactctggaacaatatgaactggatttaagaatgttataatagaagtcttacaaaatgggttgagagtttttgtttcaatttttatcatcataaatgggcaaaaagtagttggactaatttcggtttttatacaagtaaagatttaatagtataaggatttttttgcatttctttacactgagtgtaaaactctacaaagagttatagtatttactactttgaggtttccctcacaacttctggctccatacctagcccctcttttataatcttccttaaaagaaagagtgtagcctataaatactaaatatgataccttttccttctagaaagtgtttatttatatatctatacatgttgtatgtacaaatatcctactacttttaatctgatttttcttcaggattattgagtaggttgtgaattttctttcttaaaaattgtaaaacataatggtacccaagttttaaacttagatgtgcttcatcttagtgaaatttaattcacaaggaatcataaattgtgtttttgaggctgggcgcagtgactcacacctgtatcccagcaatttgggaggccgaggtgggcagatcacttgaggtcaggagttcaagactagcctggtcaacatggtgaaaccctgtctctactaaaaatacaaaaattagtcggcatggtggtgggtggctgtaatcccagctactcaggaggctgaggcagaagaatctgagccaagataacaccattgcactccagcctgggcgacagagtgagactatctcaaaaataaataaataaataaataaatagtatttttgagccttcaagatacagttcctgaatattctaatttaaattgttataattggattacctaatattcttttcaagactcctgatgtattaacttcatgttattgtcacttttcaaaaaaggaatttttttcaggagttaaataaagtcagtcttttatatccaagggtttcaaacccacagattaaaccaaccacagatcaaaaatagaaaaaaaaaaaaaaagaaaaaaagaatgtaaaattttaaaaatacagtttaacagctgtaaaagttttactataacatttacattgtgttaggtattttaagtaatttaaaggttacagtatacaggcggttaaagtatacaggaggatgtgcatcggttatatgcatatagcaagccatttcatataagaggcttgaacatccatggattttggtatagaggaggggtttaaggggtgtcctgcaatcagtccccctctcataccaaaggatgactgtatatttcttaaatgaagagactttcattctttaaatattattgacttacagtttaaaaataaataaataaaagcatactatagttgtaaaaacaaataattttaatagtatattcagtggctgaagtgatagggagtattaatcattatttcttcagtataaagttattcttcctgaaaaagtaagatatacctgggaaatattcttggatccttcacacatccacttaatttcttgaaggaagaaaacagacaaaagacatgtaacaacagaaacaaataaaccacttactgtaaaatttcagaaattgtgggctcattccctccctctagtttatttatttgctcatctttatcacctaatggtagtttgttttctttggtagagtatatggcagtcccacatcgatgataattggtgctcccttcatccaactggatcactttgagattcagttttacatcattttagcattttgtttgtatatcagttgtgatgagccactgataaaattttgttctaaaatgaaacatattactttgttagtacattttttagtgtcacactgacttttaaaatttgaatgatatatagactttgtttttttaatgcaatatgaatatttgctcatgttttctaaattccttataaaataaaattaattcgaattcaatctgcactttcttaaaattatctttcctcaatgctttttctttcttctgtttctctaattttgtttatgttggtgagagaagtattatactctctatttttatttaaaaaattctagcaacttattacccaaaatatttataattctgttccaaaaatgtcttcctgaagaaggctcttaagtcttttatgttcattgtatttagcataagagaaacataggtgaaataataggttcatttaccagttggggttttg

SEQ ID NO: 11773 - protein, 812 aa, Homo sapiens; identical to SEQ ID NO: 11761

SEQ ID NO: 11774 - DNA, 3587 bp, Homo sapiens
agcacgtcctgttttcgttggccgcgctgggatggccgccacagctgtaggtgctgctagtgtttagcgctggtctttgccgggcgttgagggcagctcagcctccttgtttgtccggttcgcctgtgcgtggtactcaagggcaccagtattcccgcggtcggcagcatgggtcgggagtcacgccactatcgaaaacgatcggcatcccggggtcgctctggaagtcggtctagaagtcgctcaccctcagacaaaagaagtaaacgtggagatgacagacggtctagaagtagagatagagataggaggagagagaggtctcgtagcagggataaaagaagatctcggtcaagggacaggaagcgtctgagatctaggtccaaagagaaaactgatggtggggaaagttctaaagagaagaaaaaagacaaagatgacaaggaggatgaaaaagaaaaagatgctggcaactttgaccagaataagctggaagaagaaatgagaaagcgaaaagaaagagtagaaaaatggcgagaagagcaacgtaaaaaggctatggaaaacataggagaactgaaaaaggaaatcgaagagatgaaacaagggaaaaagtggagtttagaggacgatgatgatgacgaagatgatcctgcagaagctgaaaaggagggaaatgaaatggagggtgaggagttagatccattagatgcttacatggaagaagtgaaagaggaagtaaaaaaatttaacatgagaagtgtaaaaggtggtgggggaaatgaaaagaagtctgggccaacggtcacaaaagttgtcactgttgtgacaaccaaaaaagcagttgtggattctgataagaagaaaggtgagctgatggagaatgaccaggatgccatggagtattcttcagaggaggaagaagttgatcttcagacagcccttacagggtatcaaacaaaacagcgaaagcttctagaaccagttgatcatggaaaaattgagtatgagccatttaggaaaaacttctatgttgaagttccagaactagcaaaaatgtctcaagaagaggtaaatgtgtttcgattggaaatggagggcattacagttaaaggaaaaggttgccccaaaccaattaaatcctgggtccagtgtggaatttccatgaagatcttaaattccctcaagaagcatggctatgaaaagcccacgcccatccaaacccaagctattcctgctataatgtctggacgagatttgattggcattgccaaaacaggaagtggaaagaccattgcttttctgttgcccatgtttagacacatcatggatcagaggtcattagaggaaggagaggggccaatagctgtcatcatgactccaactcgagaactggctttacagattactaaagagtgtaagaagttttccaagactttgggacttagagtggtctgtgtttacggaggaacaggaatcagtgagcagattgctgagctgaaaagaggtgctgaaattattgtttgcacacctggtcgaatgattgacatgttagccgctaacagtggtgatgctgtcagataatggctgatgtggctcgatgcttcatctcagtcttagttttatgatgtgttttggagagggctgttttctgaattttacaggttcttcaggccctatgatggtcgggtcacaaatcttcgaagagtgacatatgttgttttagatgaagcagacagaatgtttgacatgggttttgaaccccaggtcatgcgcatcgtggataatgttcgtcctgatcgacagacggttatgttttcagctactttccccagagctatggaggctttggctcgcaggatcctcagtaaacctattgaagtacaagttggaggcaggagtgtggtttgctcagatgtggagcaacaagtgattgtgattgaagaagaaaagaaattcttgaagttacttgagcttctaggccattatcaagagtcaggatctgtcattatatttgtggataagcaggaacatgctgatggtcttcttaaggatttaatgagagcatcttatccttgcatgtctcttcatggaggcattgatcaatatgacagagatagcatcataaatgactttaagaatgggacctgcaaacttcttgtggctacctctgttgctgcccgaggtctagatgtgaaacatctgattcttgtagtaaattatagctgccccaaccattatgaggattatgtacacagagcagggcggactggaagagcaggaaacaagggttatgcttatacttttatcacagaggatcaagctcgctatgctggtgacataattaaagctcttgaattgtcagggactgcagtacctcctgatttagagaaactgtggagtgatttcaaagatcagcagaaagctgaggggaaaataattaaaaagagtagtgggttctctggtaagggattcaagtttgatgaaacagaacaagctttggctaatgagaggaagaagttacaaaaagcagctcttggtctacaagattcagatgatgaggatgctgcagttgatattgatgagcaaattgaaagcatgtttaattcaaagaagagagtaaaggatatggctgctcctggaacatcaagtgttcctgctccaactgcaggaaatgctgagaaattagaaattgctaagagattggctcttagaatcaatgcccagaagaatttgggcatcgagtctcaggatgtgatgcagcaggccaccaatgcaattcttaggggtggcaccattctggctcccactgtttctgcaaaaaccattgcagaacaacttgctgaaaagatcaatgccaagctcaattatgtgccgttagagaaacaagaagaagagagacaggatggtggacagaatgaatcttttaagagatatgaagaagaattagagatcaatgacttcccacagactgctaggtggaaagttacctctaaggaagctctgcagagaatcagtgaatactctgaagccgcaattacaatcagaggaacctacttccctcctggcaaagaacccaaggaaggcgagcggaagatttacttggcaattgaaagtgccaatgaactggctgtgcagaaagcaaaggcagaaatcaccaggctcataaaagaagagctgatccggctgcaaaattcataccaaccaacaaataaaggaagatacaaagtcttatagacatccggaaaaaagatttttacctgtgctggtctatgatgtatgtggcagttgctgtctgcagtttacaatgtattgtaaatgaagattttttaaattctatcttgctgattttttttaaatataagaaactggtacttggtaaagaaatctgtccgtaagtacccccacaatcagtcaaactatatttaaagccagcctgttttcagagtatgatgtcctttaatgtaaactcaaatatcaatattttaaatgtccggataatattctagaggtttaaaaaatggaaatatttgaactttctattgaagacaataaagtacacaagtcgttaaggggctattcacttt

SEQ ID NO: 11775 - protein, 498 aa, Homo sapiens [sequence omitted]

SEQ ID NO: 11776 - DNA, 3735 bp, Homo sapiens
agcacgtcctgttttcgttggccgcgctgggatggccgccacagctgtaggtgctgctagtgtttagcgctggtctttgccgggcgttgagggcagctcagcctccttgtttgtccggttcgcctgtgcgtggtactcaagggcaccagtattcccgcggtcggcagcatgggtcgggagtcacgccactatcgaaaacgatcggcatcccggggtcgctctggaagtcggtctagaagtcgctcaccctcagacaaaagaagtaaacgtggagatgacagacggtctagaagtagagatagagataggaggagagagaggtctcgtagcagggataaaagaagatctcggtcaagggacaggaagcgtctgagatctaggtccaaagagaaaactgatggtggggaaagttctaaagagaagaaaaaagacaaagatgacaaggaggatgaaaaagaaaaagatgctggcaactttgaccagaataagctggaagaagaaatgagaaagcgaaaagaaagagtagaaaaatggcgagaagagcaacgtaaaaaggctatggaaaacataggagaactgaaaaaggaaatcgaagagatgaaacaagggaaaaagtggagtttagaggacgatgatgatgacgaagatgatcctgcagaagctgaaaaggagggaaatgaaatggagggtgaggagttagatccattagatgcttacatggaagaagtgaaagaggaagtaaaaaaatttaacatgagaagtgtaaaaggtggtgggggaaatgaaaagaagtctgggccaacggtcacaaaagttgtcactgttgtgacaaccaaaaaagcagttgtggattctgataagaagaaaggtgagctgatggagaatgaccaggatgccatggagtattcttcagaggaggaagaagttgatcttcagacagcccttacagggtatcaaacaaaacagcgaaagcttctagaaccagttgatcatggaaaaattgagtatgagccatttaggaaaaacttctatgttgaagttccagaactagcaaaaatgtctcaagaagaggtaaatgtgtttcgattggaaatggagggcattacagttaaaggaaaaggttgccccaaaccaattaaatcctgggtccagtgtggaatttccatgaagatcttaaattccctcaagaagcatggctatgaaaagcccacgcccatccaaacccaagctattcctgctataatgtctggacgagatttgattggcattgccaaaacaggaagtggaaagaccattgcttttctgttgcccatgtttagacacatcatggatcagaggtcattagaggaaggagaggggccaatagctgtcatcatgactccaactcgagaactggctttacagattactaaagagtgtaagaagttttccaagactttgggacttagagtggtctgtgtttacggaggaacaggaatcagtgagcagattgctgagctgaaaagaggtgctgaaattattgtttgcacacctggtcgaatgattgacatgttagccgctaacagtggtgatgctgtcagataatggctgatgtggctcgatgcttcatctcagtcttagttttatgatgtgttttggagagggctgttttctgaattttacaggttcttcaggccctatgatggtcgggtcacaaatcttcgaagagtgacatatgttgttttagatgaagcagacagaatgtttgacatgggttttgaaccccaggtcatgcgcatcgtggataatgttcgtcctgatcgacagacggttatgttttcagctactttccccagagctatggaggctttggctcgcaggatcctcagtaaacctattgaagtacaagttggaggcaggagtgtggtttgctcagatgtggagcaacaagtgattgtgattgaagaagaaaagaaattcttgaagttacttgagcttctaggccattatcaagagtcaggatctgtcattatatttgtggataagcaggaacatgctgatggtcttcttaaggatttaatgagagcatcttatccttgcatgtctcttcatggaggcattgatcaatatgacagagatagcatcataaatgactttaagaatgggacctgcaaacttcttgtggctacctctgttgctgcccgaggtctagatgtgaaacatctgattcttgtagtaaattatagctgccccaaccattatgaggattatgtacacagagcagggcggactggaagagcaggaaacaagggttatgcttatacttttatcacagaggatcaagctcgctatgctggtgacataattaaagctcttgaattgtcagggactgcagtacctcctgatttagagaaactgtggagtgatttcaaagatcagcagaaagctgaggggaaaataattaaaaagagtagtgggttctctggtaagggattcaagtttgatgaaacagaacaagctttggctaatgagaggaagaagttacaaaaagcagctcttggtctacaagattcagatgatgaggatgctgcagttgatattgatgagcaaattgaaagcatgtttaattcaaagaagagagtaaaggatatggctgctcctggaacatcaagtgttcctgctccaactgcaggaaatgctgagaaattagaaattgctaagagattggctcttagaatcaatgcccagaagaatttgggcatcgagtctcaggatgtgatgcagcaggccaccaatgcaattcttaggggtggcaccattctggctcccactgtttctgcaaaaaccattgcagaacaacttgctgaaaagatcaatgccaagctcaattatgtgccgttagagaaacaagaagaagagagacaggatggtggacagaatgaatcttttaagagatatgaagaagaattagagatcaatgacttcccacagactgctaggtggaaagttacctctaaggaagctctgcagagaatcagtgaatactctgaagccgcaattacaatcagaggaacctacttccctcctggcaaagaacccaaggaaggcgagcggaagatttacttggcaattgaaagtgccaatgaactggctgtgcagaaagcaaaggcagaaatcaccaggctcataaaagaagagctgatccggctgcaaaattcataccaaccaacaaataaaggaagatacaaagtcttatagacatccggaaaaaagatttttacctgtgctggtctatgatgtatgtggcagttgctgtctgcagtttacaatgtattgtaaatgaagattttttaaattctatcttgctgattttttttaaatataagaaactggtacttggtaaagaaatctgtccgtaagtacccccacaatcagtcaaactatatttaaagccagcctgttttcagagtatgatgtcctttaatgtaaactcaaatatcaatattttaaatgtccggataatattctagaggtttaaaaaatggaaatatttgaactttctattgaagacaataaagtacacaagtcgttaaggggctattcactttatcctgtactttcaatgaaattgtgatcatttcctaagaaaaggtaaaattcactatcatattttgtgtccccaccttgatgttacatgactctggaacaatatgaactggatttaagaatgttataatagaagtcttacaaaatggg

SEQ ID NO: 11777 - protein, 498 aa, Homo sapiens [sequence omitted]

SEQ ID NO: 11778 - DNA, 3832 bp, Homo sapiens
agcacgtcctgttttcgttggccgcgctgggatggccgccacagctgtaggtgctgctagtgtttagcgctggtctttgccgggcgttgagggcagctcagcctccttgtttgtccggttcgcctgtgcgtggtactcaagggcaccagtattcccgcggtcggcagcatgggtcgggagtcacgccactatcgaaaacgatcggcatcccggggtcgctctggaagtcggtctagaagtcgctcaccctcagacaaaagaagtaaacgtggagatgacagacggtctagaagtagagatagagataggaggagagagaggtctcgtagcagggataaaagaagatctcggtcaagggacaggaagcgtctgagatctaggtccaaagagaaaactgatggtggggaaagttctaaagagaagaaaaaagacaaagatgacaaggaggatgaaaaagaaaaagatgctggcaactttgaccagaataagctggaagaagaaatgagaaagcgaaaagaaagagtagaaaaatggcgagaagagcaacgtaaaaaggctatggaaaacataggagaactgaaaaaggaaatcgaagagatgaaacaagggaaaaagtggagtttagaggacgatgatgatgacgaagatgatcctgcagaagctgaaaaggagggaaatgaaatggagggtgaggagttagatccattagatgcttacatggaagaagtgaaagaggaagtaaaaaaatttaacatgagaagtgtaaaaggtggtgggggaaatgaaaagaagtctgggccaacggtcacaaaagttgtcactgttgtgacaaccaaaaaagcagttgtggattctgataagaagaaaggtgagctgatggagaatgaccaggatgccatggagtattcttcagaggaggaagaagttgatcttcagacagcccttacagggtatcaaacaaaacagcgaaagcttctagaaccagttgatcatggaaaaattgagtatgagccatttaggaaaaacttctatgttgaagttccagaactagcaaaaatgtctcaagaagaggtaaatgtgtttcgattggaaatggagggcattacagttaaaggaaaaggttgccccaaaccaattaaatcctgggtccagtgtggaatttccatgaagatcttaaattccctcaagaagcatggctatgaaaagcccacgcccatccaaacccaagctattcctgctataatgtctggacgagatttgattggcattgccaaaacaggaagtggaaagaccattgcttttctgttgcccatgtttagacacatcatggatcagaggtcattagaggaaggagaggggccaatagctgtcatcatgactccaactcgagaactggctttacagattactaaagagtgtaagaagttttccaagactttgggacttagagtggtctgtgtttacggaggaacaggaatcagtgagcagattgctgagctgaaaagaggtgctgaaattattgtttgcacacctggtcgaatgattgacatgttagccgctaacagtggtgatgctgtcagataatggctgatgtggctcgatgcttcatctcagtcttagttttatgatgtgttttggagagggctgttttctgaattttacaggttcttcaggccctatgatggtcgggtcacaaatcttcgaagagtgacatatgttgttttagatgaagcagacagaatgtttgacatgggttttgaaccccaggtcatgcgcatcgtggataatgttcgtcctgatcgacagacggttatgttttcagctactttccccagagctatggaggctttggctcgcaggatcctcagtaaacctattgaagtacaagttggaggcaggagtgtggtttgctcagatgtggagcaacaagtgattgtgattgaagaagaaaagaaattcttgaagttacttgagcttctaggccattatcaagagtcaggatctgtcattatatttgtggataagcaggaacatgctgatggtcttcttaaggatttaatgagagcatcttatccttgcatgtctcttcatggaggcattgatcaatatgacagagatagcatcataaatgactttaagaatgggacctgcaaacttcttgtggctacctctgttgctgcccgaggtctagatgtgaaacatctgattcttgtagtaaattatagctgccccaaccattatgaggattatgtacacagagcagggcggactggaagagcaggaaacaagggttatgcttatacttttatcacagaggatcaagctcgctatgctggtgacataattaaagctcttgaattgtcagggactgcagtacctcctgatttagagaaactgtggagtgatttcaaagatcagcagaaagctgaggggaaaataattaaaaagagtagtgggttctctggtaagggattcaagtttgatgaaacagaacaagctttggctaatgagaggaagaagttacaaaaagcagctcttggtctacaagattcagatgatgaggatgctgcagttgatattgatgagcaaattgaaagcatgtttaattcaaagaagagagtaaaggatatggctgctcctggaacatcaagtgttcctgctccaactgcaggaaatgctgagaaattagaaattgctaagagattggctcttagaatcaatgcccagaagaatttgggcatcgagtctcaggatgtgatgcagcaggccaccaatgcaattcttaggggtggcaccattctggctcccactgtttctgcaaaaaccattgcagaacaacttgctgaaaagatcaatgccaagctcaattatgtgccgttagagaaacaagaagaagagagacaggatggtggacagaatgaatcttttaagagatatgaagaagaattagagatcaatgacttcccacagactgctaggtggaaagttacctctaaggaagctctgcagagaatcagtgaatactctgaagccgcaattacaatcagaggaacctacttccctcctggcaaagaacccaaggaaggcgagcggaagatttacttggcaattgaaagtgccaatgaactggctgtgcagaaagcaaaggcagaaatcaccaggctcataaaagaagagctgatccggctgcaaaattcataccaaccaacaaataaaggaagatacaaagtcttatagacatccggaaaaaagatttttacctgtgctggtctatgatgtatgtggcagttgctgtctgcagtttacaatgtattgtaaatgaagattttttaaattctatcttgctgattttttttaaatataagaaactggtacttggtaaagaaatctgtccgtaagtacccccacaatcagtcaaactatatttaaagccagcctgttttcagagtatgatgtcctttaatgtaaactcaaatatcaatattttaaatgtccggataatattctagaggtttaaaaaatggaaatatttgaactttctattgaagacaataaagtacacaagtcgttaaggggctattcactttatcctgtactttcaatgaaattgtgatcatttcctaagaaaaggtaaaattcactatcatattttgtgtccccaccttgatgttacatgactctggaacaatatgaactggatttaagaatgttataatagaagtcttacaaaatgggttgagagtttttgtttcaatttttatcatcataaatgggcaaaaagtagttggactaatttcggtttttatacaagtaaagatttaatagtataagg

SEQ ID NO: 11779 - protein, 498 aa, Homo sapiens [sequence omitted]

SEQ ID NO: 11780 - DNA, 5665 bp, Homo sapiens
agcacgtcctgttttcgttggccgcgctgggatggccgccacagctgtaggtgctgctagtgtttagcgctggtctttgccgggcgttgagggcagctcagcctccttgtttgtccggttcgcctgtgcgtggtactcaagggcaccagtattcccgcggtcggcagcatgggtcgggagtcacgccactatcgaaaacgatcggcatcccggggtcgctctggaagtcggtctagaagtcgctcaccctcagacaaaagaagtaaacgtggagatgacagacggtctagaagtagagatagagataggaggagagagaggtctcgtagcagggataaaagaagatctcggtcaagggacaggaagcgtctgagatctaggtccaaagagaaaactgatggtggggaaagttctaaagagaagaaaaaagacaaagatgacaaggaggatgaaaaagaaaaagatgctggcaactttgaccagaataagctggaagaagaaatgagaaagcgaaaagaaagagtagaaaaatggcgagaagagcaacgtaaaaaggctatggaaaacataggagaactgaaaaaggaaatcgaagagatgaaacaagggaaaaagtggagtttagaggacgatgatgatgacgaagatgatcctgcagaagctgaaaaggagggaaatgaaatggagggtgaggagttagatccattagatgcttacatggaagaagtgaaagaggaagtaaaaaaatttaacatgagaagtgtaaaaggtggtgggggaaatgaaaagaagtctgggccaacggtcacaaaagttgtcactgttgtgacaaccaaaaaagcagttgtggattctgataagaagaaaggtgagctgatggagaatgaccaggatgccatggagtattcttcagaggaggaagaagttgatcttcagacagcccttacagggtatcaaacaaaacagcgaaagcttctagaaccagttgatcatggaaaaattgagtatgagccatttaggaaaaacttctatgttgaagttccagaactagcaaaaatgtctcaagaagaggtaaatgtgtttcgattggaaatggagggcattacagttaaaggaaaaggttgccccaaaccaattaaatcctgggtccagtgtggaatttccatgaagatcttaaattccctcaagaagcatggctatgaaaagcccacgcccatccaaacccaagctattcctgctataatgtctggacgagatttgattggcattgccaaaacaggaagtggaaagaccattgcttttctgttgcccatgtttagacacatcatggatcagaggtcattagaggaaggagaggggccaatagctgtcatcatgactccaactcgagaactggctttacagattactaaagagtgtaagaagttttccaagactttgggacttagagtggtctgtgtttacggaggaacaggaatcagtgagcagattgctgagctgaaaagaggtgctgaaattattgtttgcacacctggtcgaatgattgacatgttagccgctaacagtggtgatgctgtcagataatggctgatgtggctcgatgcttcatctcagtcttagttttatgatgtgttttggagagggctgttttctgaattttacaggttcttcaggccctatgatggtcgggtcacaaatcttcgaagagtgacatatgttgttttagatgaagcagacagaatgtttgacatgggttttgaaccccaggtcatgcgcatcgtggataatgttcgtcctgatcgacagacggttatgttttcagctactttccccagagctatggaggctttggctcgcaggatcctcagtaaacctattgaagtacaagttggaggcaggagtgtggtttgctcagatgtggagcaacaagtgattgtgattgaagaagaaaagaaattcttgaagttacttgagcttctaggccattatcaagagtcaggatctgtcattatatttgtggataagcaggaacatgctgatggtcttcttaaggatttaatgagagcatcttatccttgcatgtctcttcatggaggcattgatcaatatgacagagatagcatcataaatgactttaagaatgggacctgcaaacttcttgtggctacctctgttgctgcccgaggtctagatgtgaaacatctgattcttgtagtaaattatagctgccccaaccattatgaggattatgtacacagagcagggcggactggaagagcaggaaacaagggttatgcttatacttttatcacagaggatcaagctcgctatgctggtgacataattaaagctcttgaattgtcagggactgcagtacctcctgatttagagaaactgtggagtgatttcaaagatcagcagaaagctgaggggaaaataattaaaaagagtagtgggttctctggtaagggattcaagtttgatgaaacagaacaagctttggctaatgagaggaagaagttacaaaaagcagctcttggtctacaagattcagatgatgaggatgctgcagttgatattgatgagcaaattgaaagcatgtttaattcaaagaagagagtaaaggatatggctgctcctggaacatcaagtgttcctgctccaactgcaggaaatgctgagaaattagaaattgctaagagattggctcttagaatcaatgcccagaagaatttgggcatcgagtctcaggatgtgatgcagcaggccaccaatgcaattcttaggggtggcaccattctggctcccactgtttctgcaaaaaccattgcagaacaacttgctgaaaagatcaatgccaagctcaattatgtgccgttagagaaacaagaagaagagagacaggatggtggacagaatgaatcttttaagagatatgaagaagaattagagatcaatgacttcccacagactgctaggtggaaagttacctctaaggaagctctgcagagaatcagtgaatactctgaagccgcaattacaatcagaggaacctacttccctcctggcaaagaacccaaggaaggcgagcggaagatttacttggcaattgaaagtgccaatgaactggctgtgcagaaagcaaaggcagaaatcaccaggctcataaaagaagagctgatccggctgcaaaattcataccaaccaacaaataaaggaagatacaaagtcttatagacatccggaaaaaagatttttacctgtgctggtctatgatgtatgtggcagttgctgtctgcagtttacaatgtattgtaaatgaagattttttaaattctatcttgctgattttttttaaatataagaaactggtacttggtaaagaaatctgtccgtaagtacccccacaatcagtcaaactatatttaaagccagcctgttttcagagtatgatgtcctttaatgtaaactcaaatatcaatattttaaatgtccggataatattctagaggtttaaaaaatggaaatatttgaactttctattgaagacaataaagtacacaagtcgttaaggggctattcactttatcctgtactttcaatgaaattgtgatcatttcctaagaaaaggtaaaattcactatcatattttgtgtccccaccttgatgttacatgactctggaacaatatgaactggatttaagaatgttataatagaagtcttacaaaatgggttgagagtttttgtttcaatttttatcatcataaatgggcaaaaagtagttggactaatttcggtttttatacaagtaaagatttaatagtataaggatttttttgcatttctttacactgagtgtaaaactctacaaagagttatagtatttactactttgaggtttccctcacaacttctggctccatacctagcccctcttttataatcttccttaaaagaaagagtgtagcctataaatactaaatatgataccttttccttctagaaagtgtttatttatatatctatacatgttgtatgtacaaatatcctactacttttaatctgatttttcttcaggattattgagtaggttgtgaattttctttcttaaaaattgtaaaacataatggtacccaagttttaaacttagatgtgcttcatcttagtgaaatttaattcacaaggaatcataaattgtgtttttgaggctgggcgcagtgactcacacctgtatcccagcaatttgggaggccgaggtgggcagatcacttgaggtcaggagttcaagactagcctggtcaacatggtgaaaccctgtctctactaaaaatacaaaaattagtcggcatggtggtgggtggctgtaatcccagctactcaggaggctgaggcagaagaatctgagccaagataacaccattgcactccagcctgggcgacagagtgagactatctcaaaaataaataaataaataaataaatagtatttttgagccttcaagatacagttcctgaatattctaatttaaattgttataattggattacctaatattcttttcaagactcctgatgtattaacttcatgttattgtcacttttcaaaaaaggaatttttttcaggagttaaataaagtcagtcttttatatccaagggtttcaaacccacagattaaaccaaccacagatcaaaaatagaaaaaaaaaaaaaaagaaaaaaagaatgtaaaattttaaaaatacagtttaacagctgtaaaagttttactataacatttacattgtgttaggtattttaagtaatttaaaggttacagtatacaggcggttaaagtatacaggaggatgtgcatcggttatatgcatatagcaagccatttcatataagaggcttgaacatccatggattttggtatagaggaggggtttaaggggtgtcctgcaatcagtccccctctcataccaaaggatgactgtatatttcttaaatgaagagactttcattctttaaatattattgacttacagtttaaaaataaataaataaaagcatactatagttgtaaaaacaaataattttaatagtatattcagtggctgaagtgatagggagtattaatcattatttcttcagtataaagttattcttcctgaaaaagtaagatatacctgggaaatattcttggatccttcacacatccacttaatttcttgaaggaagaaaacagacaaaagacatgtaacaacagaaacaaataaaccacttactgtaaaatttcagaaattgtgggctcattccctccctctagtttatttatttgctcatctttatcacctaatggtagtttgttttctttggtagagtatatggcagtcccacatcgatgataattggtgctcccttcatccaactggatcactttgagattcagttttacatcattttagcattttgtttgtatatcagttgtgatgagccactgataaaattttgttctaaaatgaaacatattactttgttagtacattttttagtgtcacactgacttttaaaatttgaatgatatatagactttgtttttttaatgcaatatgaatatttgctcatgttttctaaattccttataaaataaaattaattcgaattcaatctgcactttctt

SEQ ID NO: 11781 - protein, 498 aa, Homo sapiens [sequence omitted]

SEQ ID NO: 11782 - DNA, 5909 bp, Homo sapiens
agcacgtcctgttttcgttggccgcgctgggatggccgccacagctgtaggtgctgctagtgtttagcgctggtctttgccgggcgttgagggcagctcagcctccttgtttgtccggttcgcctgtgcgtggtactcaagggcaccagtattcccgcggtcggcagcatgggtcgggagtcacgccactatcgaaaacgatcggcatcccggggtcgctctggaagtcggtctagaagtcgctcaccctcagacaaaagaagtaaacgtggagatgacagacggtctagaagtagagatagagataggaggagagagaggtctcgtagcagggataaaagaagatctcggtcaagggacaggaagcgtctgagatctaggtccaaagagaaaactgatggtggggaaagttctaaagagaagaaaaaagacaaagatgacaaggaggatgaaaaagaaaaagatgctggcaactttgaccagaataagctggaagaagaaatgagaaagcgaaaagaaagagtagaaaaatggcgagaagagcaacgtaaaaaggctatggaaaacataggagaactgaaaaaggaaatcgaagagatgaaacaagggaaaaagtggagtttagaggacgatgatgatgacgaagatgatcctgcagaagctgaaaaggagggaaatgaaatggagggtgaggagttagatccattagatgcttacatggaagaagtgaaagaggaagtaaaaaaatttaacatgagaagtgtaaaaggtggtgggggaaatgaaaagaagtctgggccaacggtcacaaaagttgtcactgttgtgacaaccaaaaaagcagttgtggattctgataagaagaaaggtgagctgatggagaatgaccaggatgccatggagtattcttcagaggaggaagaagttgatcttcagacagcccttacagggtatcaaacaaaacagcgaaagcttctagaaccagttgatcatggaaaaattgagtatgagccatttaggaaaaacttctatgttgaagttccagaactagcaaaaatgtctcaagaagaggtaaatgtgtttcgattggaaatggagggcattacagttaaaggaaaaggttgccccaaaccaattaaatcctgggtccagtgtggaatttccatgaagatcttaaattccctcaagaagcatggctatgaaaagcccacgcccatccaaacccaagctattcctgctataatgtctggacgagatttgattggcattgccaaaacaggaagtggaaagaccattgcttttctgttgcccatgtttagacacatcatggatcagaggtcattagaggaaggagaggggccaatagctgtcatcatgactccaactcgagaactggctttacagattactaaagagtgtaagaagttttccaagactttgggacttagagtggtctgtgtttacggaggaacaggaatcagtgagcagattgctgagctgaaaagaggtgctgaaattattgtttgcacacctggtcgaatgattgacatgttagccgctaacagtggtgatgctgtcagataatggctgatgtggctcgatgcttcatctcagtcttagttttatgatgtgttttggagagggctgttttctgaattttacaggttcttcaggccctatgatggtcgggtcacaaatcttcgaagagtgacatatgttgttttagatgaagcagacagaatgtttgacatgggttttgaaccccaggtcatgcgcatcgtggataatgttcgtcctgatcgacagacggttatgttttcagctactttccccagagctatggaggctttggctcgcaggatcctcagtaaacctattgaagtacaagttggaggcaggagtgtggtttgctcagatgtggagcaacaagtgattgtgattgaagaagaaaagaaattcttgaagttacttgagcttctaggccattatcaagagtcaggatctgtcattatatttgtggataagcaggaacatgctgatggtcttcttaaggatttaatgagagcatcttatccttgcatgtctcttcatggaggcattgatcaatatgacagagatagcatcataaatgactttaagaatgggacctgcaaacttcttgtggctacctctgttgctgcccgaggtctagatgtgaaacatctgattcttgtagtaaattatagctgccccaaccattatgaggattatgtacacagagcagggcggactggaagagcaggaaacaagggttatgcttatacttttatcacagaggatcaagctcgctatgctggtgacataattaaagctcttgaattgtcagggactgcagtacctcctgatttagagaaactgtggagtgatttcaaagatcagcagaaagctgaggggaaaataattaaaaagagtagtgggttctctggtaagggattcaagtttgatgaaacagaacaagctttggctaatgagaggaagaagttacaaaaagcagctcttggtctacaagattcagatgatgaggatgctgcagttgatattgatgagcaaattgaaagcatgtttaattcaaagaagagagtaaaggatatggctgctcctggaacatcaagtgttcctgctccaactgcaggaaatgctgagaaattagaaattgctaagagattggctcttagaatcaatgcccagaagaatttgggcatcgagtctcaggatgtgatgcagcaggccaccaatgcaattcttaggggtggcaccattctggctcccactgtttctgcaaaaaccattgcagaacaacttgctgaaaagatcaatgccaagctcaattatgtgccgttagagaaacaagaagaagagagacaggatggtggacagaatgaatcttttaagagatatgaagaagaattagagatcaatgacttcccacagactgctaggtggaaagttacctctaaggaagctctgcagagaatcagtgaatactctgaagccgcaattacaatcagaggaacctacttccctcctggcaaagaacccaaggaaggcgagcggaagatttacttggcaattgaaagtgccaatgaactggctgtgcagaaagcaaaggcagaaatcaccaggctcataaaagaagagctgatccggctgcaaaattcataccaaccaacaaataaaggaagatacaaagtcttatagacatccggaaaaaagatttttacctgtgctggtctatgatgtatgtggcagttgctgtctgcagtttacaatgtattgtaaatgaagattttttaaattctatcttgctgattttttttaaatataagaaactggtacttggtaaagaaatctgtccgtaagtacccccacaatcagtcaaactatatttaaagccagcctgttttcagagtatgatgtcctttaatgtaaactcaaatatcaatattttaaatgtccggataatattctagaggtttaaaaaatggaaatatttgaactttctattgaagacaataaagtacacaagtcgttaaggggctattcactttatcctgtactttcaatgaaattgtgatcatttcctaagaaaaggtaaaattcactatcatattttgtgtccccaccttgatgttacatgactctggaacaatatgaactggatttaagaatgttataatagaagtcttacaaaatgggttgagagtttttgtttcaatttttatcatcataaatgggcaaaaagtagttggactaatttcggtttttatacaagtaaagatttaatagtataaggatttttttgcatttctttacactgagtgtaaaactctacaaagagttatagtatttactactttgaggtttccctcacaacttctggctccatacctagcccctcttttataatcttccttaaaagaaagagtgtagcctataaatactaaatatgataccttttccttctagaaagtgtttatttatatatctatacatgttgtatgtacaaatatcctactacttttaatctgatttttcttcaggattattgagtaggttgtgaattttctttcttaaaaattgtaaaacataatggtacccaagttttaaacttagatgtgcttcatcttagtgaaatttaattcacaaggaatcataaattgtgtttttgaggctgggcgcagtgactcacacctgtatcccagcaatttgggaggccgaggtgggcagatcacttgaggtcaggagttcaagactagcctggtcaacatggtgaaaccctgtctctactaaaaatacaaaaattagtcggcatggtggtgggtggctgtaatcccagctactcaggaggctgaggcagaagaatctgagccaagataacaccattgcactccagcctgggcgacagagtgagactatctcaaaaataaataaataaataaataaatagtatttttgagccttcaagatacagttcctgaatattctaatttaaattgttataattggattacctaatattcttttcaagactcctgatgtattaacttcatgttattgtcacttttcaaaaaaggaatttttttcaggagttaaataaagtcagtcttttatatccaagggtttcaaacccacagattaaaccaaccacagatcaaaaatagaaaaaaaaaaaaaaagaaaaaaagaatgtaaaattttaaaaatacagtttaacagctgtaaaagttttactataacatttacattgtgttaggtattttaagtaatttaaaggttacagtatacaggcggttaaagtatacaggaggatgtgcatcggttatatgcatatagcaagccatttcatataagaggcttgaacatccatggattttggtatagaggaggggtttaaggggtgtcctgcaatcagtccccctctcataccaaaggatgactgtatatttcttaaatgaagagactttcattctttaaatattattgacttacagtttaaaaataaataaataaaagcatactatagttgtaaaaacaaataattttaatagtatattcagtggctgaagtgatagggagtattaatcattatttcttcagtataaagttattcttcctgaaaaagtaagatatacctgggaaatattcttggatccttcacacatccacttaatttcttgaaggaagaaaacagacaaaagacatgtaacaacagaaacaaataaaccacttactgtaaaatttcagaaattgtgggctcattccctccctctagtttatttatttgctcatctttatcacctaatggtagtttgttttctttggtagagtatatggcagtcccacatcgatgataattggtgctcccttcatccaactggatcactttgagattcagttttacatcattttagcattttgtttgtatatcagttgtgatgagccactgataaaattttgttctaaaatgaaacatattactttgttagtacattttttagtgtcacactgacttttaaaatttgaatgatatatagactttgtttttttaatgcaatatgaatatttgctcatgttttctaaattccttataaaataaaattaattcgaattcaatctgcactttcttaaaattatctttcctcaatgctttttctttcttctgtttctctaattttgtttatgttggtgagagaagtattatactctctatttttatttaaaaaattctagcaacttattacccaaaatatttataattctgttccaaaaatgtcttcctgaagaaggctcttaagtcttttatgttcattgtatttagcataagagaaacataggtgaaataataggttcatttaccagttggggttttg

SEQ ID NO: 11783 - protein, 498 aa, Homo sapiens [sequence omitted]

SEQ ID NO: 11784 - DNA, 332 bp, Homo sapiens
aatgtgaagacaacaaggatgaagacctttaagatgatctacttcaacttaatggacagactggaggatcgggatcgccggccccggcttctactccttgagcgtctcctgtctctacttcgagatcttcttcgctctcggcttctgtctctctctctacttctggaacgtctgaaagggggacacttttcatttattctatgaccaaatggagctactatttcagatcaggggattctgtcccacattgaaagaatcttaatcactaccattattaaaggtggaggtctcaatgaagtaaagccaagtcttataagtgctcaacgaaaaaa

SEQ ID NO: 11785 - protein, 61 aa, Homo sapiens
MKTFKMIYFNLMDRLEDRDRRPRLLLLERLLSLLRDLLRSRLLSLSLLLERLKGGHFSFIL

SEQ ID NO: 11786 - DNA, 5280 bp, Homo sapiens
tcttagttttatgatgtgttttggagagggctgttttctgaattttacaggttcttcaggccctatgatggtcgggtcacaaatcttcgaagagtgacatatgttgttttagatgaagcagacagaatgtttgacatgggttttgaaccccaggtcatgcgcatcgtggataatgttcgtcctgatcgacagacggttatgttttcagctactttccccagagctatggaggctttggctcgcaggatcctcagtaaacctattgaagtacaagttggaggcaggagtgtggtttgctcagatgtggagcaacaagtgattgtgattgaagaagaaaagaaattcttgaagttacttgagcttctaggccattatcaagagtcaggatctgtcattatatttgtggataagcaggaacatgctgatggtcttcttaaggatttaatgagagcatcttatccttgcatgtctcttcatggaggcattgatcaatatgacagagatagcatcataaatgactttaagaatgggacctgcaaacttcttgtggctacctctgttgctgcccgaggtctagatgtgaaacatctgattcttgtagtaaattatagctgccccaaccattatgaggattatgtacacagagcagggcggactggaagagcaggaaacaagggttatgcttatacttttatcacagaggatcaagctcgctatgctggtgacataattaaagctcttgaattgtcagggactgcagtacctcctgatttagagaaactgtggagtgatttcaaagatcagcagaaagctgtgagtttttaacccatgttactcttctagaaatcattaatgtgactaaaccttgattatttaattcttggaaatcttttatttaacacttgaaaattttgctacgactatttttatttctctctagagggaaaaatgagtgaaagctaaaatcctatcttattcttgaacttagtattttgtggtgtctatgtagagctcttagtttatcttacatgctagatgaagtgtttttattacattgacatacaccaccttgaaaaatatttaattagtatgaattcctaaacattaaagtttttactatgagattaacttcgttttctttttttgaaaggaggggaaaataattaaaaagagtagtgggttctctggtaagggattcaagtttgatgaaacagaacaagctttggctaatgagaggaagaagttacaaaaagcagctcttggtctacaagattcagatgatgaggatgctgcagttgatattgatgagcaaattgaaagcatgtttaattcaaagaagagagtaaaggatatggctgctcctggaacatcaagtgttcctgctccaactgcaggaaatgctgagaaattagaaattgctaagagattggctcttagaatcaatgcccagaagaatttgggcatcgagtctcaggtattaagtaatttgttccaagtctcagtcaatacttttaagaagttctttgattttacttttcaggaattatgttgaacacaagtaaacaagttgtcctagacattgagtttgtgagaatttaacattctcaatacagaattttttgataattgcatttggatgatttctcagtgctattgactgaggactttgggcctattctggaatttctaactgttagccactggtagttttatagggtagtattctgatgagtcttaacaaaatcttaaagatgtattaataattctctttttctttctttatctgcttttattgggcacacaactccctggatatacaaacacccagttacatgactcaaatcaatatggtcttaaacagtggagaaatgtgatttttaaatatttcacgttatctttttcttggaagcttacttgttattttgaagcttttgaggcagtcattaactataacgtttgtaatgttgggttgggtcatagagatgaaggagctcagtgatggtagtagtacaaacattcaaattcggaggagactcctaggaattagagtatgcaaatgattttcgaaatatttactgtgtctgacatcaagagttagctaattatcaactacatctctatgatctagtagaatatttaatagagttgaatgttctccagttttcttatccactaggaggtacattaaactacattataaatatatattgctaaatcacacatatcaatgagactatgcattagaaaggtttatttattaaacttgcatacaaagttagtagcttttcagagaataatttgtggtgtggtccctactcttgtctctgccctcatttgagatttaactaagtcttctttaactacaggatgtgatgcagcaggccaccaatgcaattcttaggggtggcaccattctggctcccactgtttctgcaaaaaccattgcagaacaacttgctgaaaagatcaatgccaagctcaattatgtgccgttagagaaacaagaagaagagagacaggatggtggacagaatgaatcttttaagagatatgaagaagaattagagatcaatgacttcccacagactgctaggtggaaagttacctctaaggaagctctgcagagaatcagtgaatactctgaagccgcaattacaatcagaggaacctacttccctcctggcaaagaacccaaggaaggcgagcggaagatttacttggcaattgaaagtgccaatgaactggctgtgcagaaagcaaaggcagaaatcaccaggctcataaaagaagagctgatccggctgcaaaattcataccaaccaacaaataaaggaagatacaaagtcttatagacatccggaaaaaagatttttacctgtgctggtctatgatgtatgtggcagttgctgtctgcagtttacaatgtattgtaaatgaagattttttaaattctatcttgctgattttttttaaatataagaaactggtacttggtaaagaaatctgtccgtaagtacccccacaatcagtcaaactatatttaaagccagcctgttttcagagtatgatgtcctttaatgtaaactcaaatatcaatattttaaatgtccggataatattctagaggtttaaaaaatggaaatatttgaactttctattgaagacaataaagtacacaagtcgttaaggggctattcactttatcctgtactttcaatgaaattgtgatcatttcctaagaaaaggtaaaattcactatcatattttgtgtccccaccttgatgttacatgactctggaacaatatgaactggatttaagaatgttataatagaagtcttacaaaatgggttgagagtttttgtttcaatttttatcatcataaatgggcaaaaagtagttggactaatttcggtttttatacaagtaaagatttaatagtataaggatttttttgcatttctttacactgagtgtaaaactctacaaagagttatagtatttactactttgaggtttccctcacaacttctggctccatacctagcccctcttttataatcttccttaaaagaaagagtgtagcctataaatactaaatatgataccttttccttctagaaagtgtttatttatatatctatacatgttgtatgtacaaatatcctactacttttaatctgatttttcttcaggattattgagtaggttgtgaattttctttcttaaaaattgtaaaacataatggtacccaagttttaaacttagatgtgcttcatcttagtgaaatttaattcacaaggaatcataaattgtgtttttgaggctgggcgcagtgactcacacctgtatcccagcaatttgggaggccgaggtgggcagatcacttgaggtcaggagttcaagactagcctggtcaacatggtgaaaccctgtctctactaaaaatacaaaaattagtcggcatggtggtgggtggctgtaatcccagctactcaggaggctgaggcagaagaatctgagccaagataacaccattgcactccagcctgggcgacagagtgagactatctcaaaaataaataaataaataaataaatagtatttttgagccttcaagatacagttcctgaatattctaatttaaattgttataattggattacctaatattcttttcaagactcctgatgtattaacttcatgttattgtcacttttcaaaaaaggaatttttttcaggagttaaataaagtcagtcttttatatccaagggtttcaaacccacagattaaaccaaccacagatcaaaaatagaaaaaaaaaaaaaaagaaaaaaagaatgtaaaattttaaaaatacagtttaacagctgtaaaagttttactataacatttacattgtgttaggtattttaagtaatttaaaggttacagtatacaggcggttaaagtatacaggaggatgtgcatcggttatatgcatatagcaagccatttcatataagaggcttgaacatccatggattttggtatagaggaggggtttaaggggtgtcctgcaatcagtccccctctcataccaaaggatgactgtatatttcttaaatgaagagactttcattctttaaatattattgacttacagtttaaaaataaataaataaaagcatactatagttgtaaaaacaaataattttaatagtatattcagtggctgaagtgatagggagtattaatcattatttcttcagtataaagttattcttcctgaaaaagtaagatatacctgggaaatattcttggatccttcacacatccacttaatttcttgaaggaagaaaacagacaaaagacatgtaacaacagaaacaaataaaccacttactgtaaaatttcagaaattgtgggctcattccctccctctagtttatttatttgctcatctttatcacctaatggtagtttgttttctttggtagagtatatggcagtcccacatcgatgataattggtgctcccttcatccaactggatcactttgagattcagttttacatcattttagcattttgtttgtatatcagttgtgatgagccactgataaaattttgttctaaaatgaaacatattactttgttagtacattttttagtgtcacactgacttttaaaatttgaatgatatatagactttgtttttttaatgcaatatgaatatttgctcatgttttctaaattccttataaaataaaattaattcgaattcaatctgcactttctt

SEQ ID NO: 11787 - protein, 232 aa, Homo sapiens
MFDMGFEPQVMRIVDNVRPDRQTVMFSATFPRAMEALARRILSKPIEVQVGGRSVVCSDVEQQVIVIEEEKKFLKLLELLGHYQESGSVIIFVDKQEHADGLLKDLMRASYPCMSLHGGIDQYDRDSIINDFKNGTCKLLVATSVAARGLDVKHLILVVNYSCPNHYEDYVHRAGRTGRAGNKGYAYTFITEDQARYAGDIIKALELSGTAVPPDLEKLWSDFKDQQKAVSF

SEQ ID NO: 11788 - DNA, 5524 bp, Homo sapiens
tcttagttttatgatgtgttttggagagggctgttttctgaattttacaggttcttcaggccctatgatggtcgggtcacaaatcttcgaagagtgacatatgttgttttagatgaagcagacagaatgtttgacatgggttttgaaccccaggtcatgcgcatcgtggataatgttcgtcctgatcgacagacggttatgttttcagctactttccccagagctatggaggctttggctcgcaggatcctcagtaaacctattgaagtacaagttggaggcaggagtgtggtttgctcagatgtggagcaacaagtgattgtgattgaagaagaaaagaaattcttgaagttacttgagcttctaggccattatcaagagtcaggatctgtcattatatttgtggataagcaggaacatgctgatggtcttcttaaggatttaatgagagcatcttatccttgcatgtctcttcatggaggcattgatcaatatgacagagatagcatcataaatgactttaagaatgggacctgcaaacttcttgtggctacctctgttgctgcccgaggtctagatgtgaaacatctgattcttgtagtaaattatagctgccccaaccattatgaggattatgtacacagagcagggcggactggaagagcaggaaacaagggttatgcttatacttttatcacagaggatcaagctcgctatgctggtgacataattaaagctcttgaattgtcagggactgcagtacctcctgatttagagaaactgtggagtgatttcaaagatcagcagaaagctgtgagtttttaacccatgttactcttctagaaatcattaatgtgactaaaccttgattatttaattcttggaaatcttttatttaacacttgaaaattttgctacgactatttttatttctctctagagggaaaaatgagtgaaagctaaaatcctatcttattcttgaacttagtattttgtggtgtctatgtagagctcttagtttatcttacatgctagatgaagtgtttttattacattgacatacaccaccttgaaaaatatttaattagtatgaattcctaaacattaaagtttttactatgagattaacttcgttttctttttttgaaaggaggggaaaataattaaaaagagtagtgggttctctggtaagggattcaagtttgatgaaacagaacaagctttggctaatgagaggaagaagttacaaaaagcagctcttggtctacaagattcagatgatgaggatgctgcagttgatattgatgagcaaattgaaagcatgtttaattcaaagaagagagtaaaggatatggctgctcctggaacatcaagtgttcctgctccaactgcaggaaatgctgagaaattagaaattgctaagagattggctcttagaatcaatgcccagaagaatttgggcatcgagtctcaggtattaagtaatttgttccaagtctcagtcaatacttttaagaagttctttgattttacttttcaggaattatgttgaacacaagtaaacaagttgtcctagacattgagtttgtgagaatttaacattctcaatacagaattttttgataattgcatttggatgatttctcagtgctattgactgaggactttgggcctattctggaatttctaactgttagccactggtagttttatagggtagtattctgatgagtcttaacaaaatcttaaagatgtattaataattctctttttctttctttatctgcttttattgggcacacaactccctggatatacaaacacccagttacatgactcaaatcaatatggtcttaaacagtggagaaatgtgatttttaaatatttcacgttatctttttcttggaagcttacttgttattttgaagcttttgaggcagtcattaactataacgtttgtaatgttgggttgggtcatagagatgaaggagctcagtgatggtagtagtacaaacattcaaattcggaggagactcctaggaattagagtatgcaaatgattttcgaaatatttactgtgtctgacatcaagagttagctaattatcaactacatctctatgatctagtagaatatttaatagagttgaatgttctccagttttcttatccactaggaggtacattaaactacattataaatatatattgctaaatcacacatatcaatgagactatgcattagaaaggtttatttattaaacttgcatacaaagttagtagcttttcagagaataatttgtggtgtggtccctactcttgtctctgccctcatttgagatttaactaagtcttctttaactacaggatgtgatgcagcaggccaccaatgcaattcttaggggtggcaccattctggctcccactgtttctgcaaaaaccattgcagaacaacttgctgaaaagatcaatgccaagctcaattatgtgccgttagagaaacaagaagaagagagacaggatggtggacagaatgaatcttttaagagatatgaagaagaattagagatcaatgacttcccacagactgctaggtggaaagttacctctaaggaagctctgcagagaatcagtgaatactctgaagccgcaattacaatcagaggaacctacttccctcctggcaaagaacccaaggaaggcgagcggaagatttacttggcaattgaaagtgccaatgaactggctgtgcagaaagcaaaggcagaaatcaccaggctcataaaagaagagctgatccggctgcaaaattcataccaaccaacaaataaaggaagatacaaagtcttatagacatccggaaaaaagatttttacctgtgctggtctatgatgtatgtggcagttgctgtctgcagtttacaatgtattgtaaatgaagattttttaaattctatcttgctgattttttttaaatataagaaactggtacttggtaaagaaatctgtccgtaagtacccccacaatcagtcaaactatatttaaagccagcctgttttcagagtatgatgtcctttaatgtaaactcaaatatcaatattttaaatgtccggataatattctagaggtttaaaaaatggaaatatttgaactttctattgaagacaataaagtacacaagtcgttaaggggctattcactttatcctgtactttcaatgaaattgtgatcatttcctaagaaaaggtaaaattcactatcatattttgtgtccccaccttgatgttacatgactctggaacaatatgaactggatttaagaatgttataatagaagtcttacaaaatgggttgagagtttttgtttcaatttttatcatcataaatgggcaaaaagtagttggactaatttcggtttttatacaagtaaagatttaatagtataaggatttttttgcatttctttacactgagtgtaaaactctacaaagagttatagtatttactactttgaggtttccctcacaacttctggctccatacctagcccctcttttataatcttccttaaaagaaagagtgtagcctataaatactaaatatgataccttttccttctagaaagtgtttatttatatatctatacatgttgtatgtacaaatatcctactacttttaatctgatttttcttcaggattattgagtaggttgtgaattttctttcttaaaaattgtaaaacataatggtacccaagttttaaacttagatgtgcttcatcttagtgaaatttaattcacaaggaatcataaattgtgtttttgaggctgggcgcagtgactcacacctgtatcccagcaatttgggaggccgaggtgggcagatcacttgaggtcaggagttcaagactagcctggtcaacatggtgaaaccctgtctctactaaaaatacaaaaattagtcggcatggtggtgggtggctgtaatcccagctactcaggaggctgaggcagaagaatctgagccaagataacaccattgcactccagcctgggcgacagagtgagactatctcaaaaataaataaataaataaataaatagtatttttgagccttcaagatacagttcctgaatattctaatttaaattgttataattggattacctaatattcttttcaagactcctgatgtattaacttcatgttattgtcacttttcaaaaaaggaatttttttcaggagttaaataaagtcagtcttttatatccaagggtttcaaacccacagattaaaccaaccacagatcaaaaatagaaaaaaaaaaaaaaagaaaaaaagaatgtaaaattttaaaaatacagtttaacagctgtaaaagttttactataacatttacattgtgttaggtattttaagtaatttaaaggttacagtatacaggcggttaaagtatacaggaggatgtgcatcggttatatgcatatagcaagccatttcatataagaggcttgaacatccatggattttggtatagaggaggggtttaaggggtgtcctgcaatcagtccccctctcataccaaaggatgactgtatatttcttaaatgaagagactttcattctttaaatattattgacttacagtttaaaaataaataaataaaagcatactatagttgtaaaaacaaataattttaatagtatattcagtggctgaagtgatagggagtattaatcattatttcttcagtataaagttattcttcctgaaaaagtaagatatacctgggaaatattcttggatccttcacacatccacttaatttcttgaaggaagaaaacagacaaaagacatgtaacaacagaaacaaataaaccacttactgtaaaatttcagaaattgtgggctcattccctccctctagtttatttatttgctcatctttatcacctaatggtagtttgttttctttggtagagtatatggcagtcccacatcgatgataattggtgctcccttcatccaactggatcactttgagattcagttttacatcattttagcattttgtttgtatatcagttgtgatgagccactgataaaattttgttctaaaatgaaacatattactttgttagtacattttttagtgtcacactgacttttaaaatttgaatgatatatagactttgtttttttaatgcaatatgaatatttgctcatgttttctaaattccttataaaataaaattaattcgaattcaatctgcactttcttaaaattatctttcctcaatgctttttctttcttctgtttctctaattttgtttatgttggtgagagaagtattatactctctatttttatttaaaaaattctagcaacttattacccaaaatatttataattctgttccaaaaatgtcttcctgaagaaggctcttaagtcttttatgttcattgtatttagcataagagaaacataggtgaaataataggttcatttaccagttggggttttg

SEQ ID NO: 11789 - protein, 232 aa, Homo sapiens; identical to SEQ ID NO: 11787

SEQ ID NO: 11790 - DNA, 1754 bp, Homo sapiens
tatttccaattggatgtctgatgagcacctcaactacagcaattttagaattaaatttcacccattatcactgtccagaaaacacctgtttacctcctggaatcagtatattcttttacttctgccttttttcacttgccagccagctcttaatatcttaatttgtttctctttttcactgttcatatcccatcagaaaaaatatcttgtccattctacctcaaaagtgtgctcttgtgatggtataaatacaatattgtgagagcactaaggaaaaaaacacttaactgtgcctttcagagtcaggaaaacttcctaaaagtggtatttaaaagtgaagtttgtgaactacttccttttcatcctgttttgatatctttacaagtttgtttttctagtctgtaagcttttaaagagcatgaatttgttatttatatgttaaatgtctcacagtatgtgagaggtgagtgcttaatgtttatgaaattgataactgtgaatgaatgtctgcagcctacctcatctagtcagctatcttgcggtgttctttcatactccttttccaaccacgctacgcttctcttattcttcaataattaagcatgcttgtcttaactctgtaccattacgcatgtaattaatttcctttgcaaaatactcttatggtatctttcctccctccaattggctagtcctcctttcattttaaagattttgttcagacgagacccttctgaaacatttgtagacttcagtgaacatcataaatgtctaataaatacttactaaatgaataaaccaaggaagttatatttccctttagccttctcttactatctcctggacaaatcactaatagtctttttattccactctttttaatcaccatactaggaactcttaacacataatatgacctcagtggttacatttgaaactctgaaagtaatcaaaataataagcagccattatataatgtgggtaatgttccaccaggcattaaatggctatcttggcaggcagtacagtgtttctgaaagtcacctacagtgtttcttcctggacctccgtgatatgggtaaacacagtgtaagtttagtaatttgaataatatgctttccactcaatcactaggtgccaatgaactggctgtgcagaaagcaaaggcagaaatcaccaggctcataaaagaagagctgatccggctgcaaaattcataccaaccaacaaataaaggaagatacaaagtcttatagacatccggaaaaaagatttttacctgtgctggtctatgatgtatgtggcagttgctgtctgcagtttacaatgtattgtaaatgaagattttttaaattctatcttgctgattttttttaaatataagaaactggtacttggtaaagaaatctgtccgtaagtacccccacaatcagtcaaactatatttaaagccagcctgttttcagagtatgatgtcctttaatgtaaactcaaatatcaatattttaaatgtccggataatattctagaggtttaaaaaatggaaatatttgaactttctattgaagacaataaagtacacaagtcgttaaggggctattcactttatcctgtactttcaatgaaattgtgatcatttcctaagaaaaggtaaaattcactatcatattttgtgtccccaccttgatgttacatgactctggaacaatatgaactggatttaagaatgttataatagaagtcttacaaaatggg

SEQ ID NO: 11791 - protein, 47 aa, Homo sapiens
MLSTQSLGANELAVQKAKAEITRLIKEELIRLQNSYQPTNKGRYKVL

SEQ ID NO: 11792 - DNA, 1851 bp, Homo sapiens
tatttccaattggatgtctgatgagcacctcaactacagcaattttagaattaaatttcacccattatcactgtccagaaaacacctgtttacctcctggaatcagtatattcttttacttctgccttttttcacttgccagccagctcttaatatcttaatttgtttctctttttcactgttcatatcccatcagaaaaaatatcttgtccattctacctcaaaagtgtgctcttgtgatggtataaatacaatattgtgagagcactaaggaaaaaaacacttaactgtgcctttcagagtcaggaaaacttcctaaaagtggtatttaaaagtgaagtttgtgaactacttccttttcatcctgttttgatatctttacaagtttgtttttctagtctgtaagcttttaaagagcatgaatttgttatttatatgttaaatgtctcacagtatgtgagaggtgagtgcttaatgtttatgaaattgataactgtgaatgaatgtctgcagcctacctcatctagtcagctatcttgcggtgttctttcatactccttttccaaccacgctacgcttctcttattcttcaataattaagcatgcttgtcttaactctgtaccattacgcatgtaattaatttcctttgcaaaatactcttatggtatctttcctccctccaattggctagtcctcctttcattttaaagattttgttcagacgagacccttctgaaacatttgtagacttcagtgaacatcataaatgtctaataaatacttactaaatgaataaaccaaggaagttatatttccctttagccttctcttactatctcctggacaaatcactaatagtctttttattccactctttttaatcaccatactaggaactcttaacacataatatgacctcagtggttacatttgaaactctgaaagtaatcaaaataataagcagccattatataatgtgggtaatgttccaccaggcattaaatggctatcttggcaggcagtacagtgtttctgaaagtcacctacagtgtttcttcctggacctccgtgatatgggtaaacacagtgtaagtttagtaatttgaataatatgctttccactcaatcactaggtgccaatgaactggctgtgcagaaagcaaaggcagaaatcaccaggctcataaaagaagagctgatccggctgcaaaattcataccaaccaacaaataaaggaagatacaaagtcttatagacatccggaaaaaagatttttacctgtgctggtctatgatgtatgtggcagttgctgtctgcagtttacaatgtattgtaaatgaagattttttaaattctatcttgctgattttttttaaatataagaaactggtacttggtaaagaaatctgtccgtaagtacccccacaatcagtcaaactatatttaaagccagcctgttttcagagtatgatgtcctttaatgtaaactcaaatatcaatattttaaatgtccggataatattctagaggtttaaaaaatggaaatatttgaactttctattgaagacaataaagtacacaagtcgttaaggggctattcactttatcctgtactttcaatgaaattgtgatcatttcctaagaaaaggtaaaattcactatcatattttgtgtccccaccttgatgttacatgactctggaacaatatgaactggatttaagaatgttataatagaagtcttacaaaatgggttgagagtttttgtttcaatttttatcatcataaatgggcaaaaagtagttggactaatttcggtttttatacaagtaaagatttaatagtataagg

SEQ ID NO: 11793 - protein, 47 aa, Homo sapiens; identical to SEQ ID NO: 11791

SEQ ID NO: 11794 - DNA, 3684 bp, Homo sapiens
tatttccaattggatgtctgatgagcacctcaactacagcaattttagaattaaatttcacccattatcactgtccagaaaacacctgtttacctcctggaatcagtatattcttttacttctgccttttttcacttgccagccagctcttaatatcttaatttgtttctctttttcactgttcatatcccatcagaaaaaatatcttgtccattctacctcaaaagtgtgctcttgtgatggtataaatacaatattgtgagagcactaaggaaaaaaacacttaactgtgcctttcagagtcaggaaaacttcctaaaagtggtatttaaaagtgaagtttgtgaactacttccttttcatcctgttttgatatctttacaagtttgtttttctagtctgtaagcttttaaagagcatgaatttgttatttatatgttaaatgtctcacagtatgtgagaggtgagtgcttaatgtttatgaaattgataactgtgaatgaatgtctgcagcctacctcatctagtcagctatcttgcggtgttctttcatactccttttccaaccacgctacgcttctcttattcttcaataattaagcatgcttgtcttaactctgtaccattacgcatgtaattaatttcctttgcaaaatactcttatggtatctttcctccctccaattggctagtcctcctttcattttaaagattttgttcagacgagacccttctgaaacatttgtagacttcagtgaacatcataaatgtctaataaatacttactaaatgaataaaccaaggaagttatatttccctttagccttctcttactatctcctggacaaatcactaatagtctttttattccactctttttaatcaccatactaggaactcttaacacataatatgacctcagtggttacatttgaaactctgaaagtaatcaaaataataagcagccattatataatgtgggtaatgttccaccaggcattaaatggctatcttggcaggcagtacagtgtttctgaaagtcacctacagtgtttcttcctggacctccgtgatatgggtaaacacagtgtaagtttagtaatttgaataatatgctttccactcaatcactaggtgccaatgaactggctgtgcagaaagcaaaggcagaaatcaccaggctcataaaagaagagctgatccggctgcaaaattcataccaaccaacaaataaaggaagatacaaagtcttatagacatccggaaaaaagatttttacctgtgctggtctatgatgtatgtggcagttgctgtctgcagtttacaatgtattgtaaatgaagattttttaaattctatcttgctgattttttttaaatataagaaactggtacttggtaaagaaatctgtccgtaagtacccccacaatcagtcaaactatatttaaagccagcctgttttcagagtatgatgtcctttaatgtaaactcaaatatcaatattttaaatgtccggataatattctagaggtttaaaaaatggaaatatttgaactttctattgaagacaataaagtacacaagtcgttaaggggctattcactttatcctgtactttcaatgaaattgtgatcatttcctaagaaaaggtaaaattcactatcatattttgtgtccccaccttgatgttacatgactctggaacaatatgaactggatttaagaatgttataatagaagtcttacaaaatgggttgagagtttttgtttcaatttttatcatcataaatgggcaaaaagtagttggactaatttcggtttttatacaagtaaagatttaatagtataaggatttttttgcatttctttacactgagtgtaaaactctacaaagagttatagtatttactactttgaggtttccctcacaacttctggctccatacctagcccctcttttataatcttccttaaaagaaagagtgtagcctataaatactaaatatgataccttttccttctagaaagtgtttatttatatatctatacatgttgtatgtacaaatatcctactacttttaatctgatttttcttcaggattattgagtaggttgtgaattttctttcttaaaaattgtaaaacataatggtacccaagttttaaacttagatgtgcttcatcttagtgaaatttaattcacaaggaatcataaattgtgtttttgaggctgggcgcagtgactcacacctgtatcccagcaatttgggaggccgaggtgggcagatcacttgaggtcaggagttcaagactagcctggtcaacatggtgaaaccctgtctctactaaaaatacaaaaattagtcggcatggtggtgggtggctgtaatcccagctactcaggaggctgaggcagaagaatctgagccaagataacaccattgcactccagcctgggcgacagagtgagactatctcaaaaataaataaataaataaataaatagtatttttgagccttcaagatacagttcctgaatattctaatttaaattgttataattggattacctaatattcttttcaagactcctgatgtattaacttcatgttattgtcacttttcaaaaaaggaatttttttcaggagttaaataaagtcagtcttttatatccaagggtttcaaacccacagattaaaccaaccacagatcaaaaatagaaaaaaaaaaaaaaagaaaaaaagaatgtaaaattttaaaaatacagtttaacagctgtaaaagttttactataacatttacattgtgttaggtattttaagtaatttaaaggttacagtatacaggcggttaaagtatacaggaggatgtgcatcggttatatgcatatagcaagccatttcatataagaggcttgaacatccatggattttggtatagaggaggggtttaaggggtgtcctgcaatcagtccccctctcataccaaaggatgactgtatatttcttaaatgaagagactttcattctttaaatattattgacttacagtttaaaaataaataaataaaagcatactatagttgtaaaaacaaataattttaatagtatattcagtggctgaagtgatagggagtattaatcattatttcttcagtataaagttattcttcctgaaaaagtaagatatacctgggaaatattcttggatccttcacacatccacttaatttcttgaaggaagaaaacagacaaaagacatgtaacaacagaaacaaataaaccacttactgtaaaatttcagaaattgtgggctcattccctccctctagtttatttatttgctcatctttatcacctaatggtagtttgttttctttggtagagtatatggcagtcccacatcgatgataattggtgctcccttcatccaactggatcactttgagattcagttttacatcattttagcattttgtttgtatatcagttgtgatgagccactgataaaattttgttctaaaatgaaacatattactttgttagtacattttttagtgtcacactgacttttaaaatttgaatgatatatagactttgtttttttaatgcaatatgaatatttgctcatgttttctaaattccttataaaataaaattaattcgaattcaatctgcactttctt

SEQ ID NO: 11795 - protein, 47 aa, Homo sapiens; identical to SEQ ID NO: 11791

SEQ ID NO: 11796 - DNA, 3928 bp, Homo sapiens
tatttccaattggatgtctgatgagcacctcaactacagcaattttagaattaaatttcacccattatcactgtccagaaaacacctgtttacctcctggaatcagtatattcttttacttctgccttttttcacttgccagccagctcttaatatcttaatttgtttctctttttcactgttcatatcccatcagaaaaaatatcttgtccattctacctcaaaagtgtgctcttgtgatggtataaatacaatattgtgagagcactaaggaaaaaaacacttaactgtgcctttcagagtcaggaaaacttcctaaaagtggtatttaaaagtgaagtttgtgaactacttccttttcatcctgttttgatatctttacaagtttgtttttctagtctgtaagcttttaaagagcatgaatttgttatttatatgttaaatgtctcacagtatgtgagaggtgagtgcttaatgtttatgaaattgataactgtgaatgaatgtctgcagcctacctcatctagtcagctatcttgcggtgttctttcatactccttttccaaccacgctacgcttctcttattcttcaataattaagcatgcttgtcttaactctgtaccattacgcatgtaattaatttcctttgcaaaatactcttatggtatctttcctccctccaattggctagtcctcctttcattttaaagattttgttcagacgagacccttctgaaacatttgtagacttcagtgaacatcataaatgtctaataaatacttactaaatgaataaaccaaggaagttatatttccctttagccttctcttactatctcctggacaaatcactaatagtctttttattccactctttttaatcaccatactaggaactcttaacacataatatgacctcagtggttacatttgaaactctgaaagtaatcaaaataataagcagccattatataatgtgggtaatgttccaccaggcattaaatggctatcttggcaggcagtacagtgtttctgaaagtcacctacagtgtttcttcctggacctccgtgatatgggtaaacacagtgtaagtttagtaatttgaataatatgctttccactcaatcactaggtgccaatgaactggctgtgcagaaagcaaaggcagaaatcaccaggctcataaaagaagagctgatccggctgcaaaattcataccaaccaacaaataaaggaagatacaaagtcttatagacatccggaaaaaagatttttacctgtgctggtctatgatgtatgtggcagttgctgtctgcagtttacaatgtattgtaaatgaagattttttaaattctatcttgctgattttttttaaatataagaaactggtacttggtaaagaaatctgtccgtaagtacccccacaatcagtcaaactatatttaaagccagcctgttttcagagtatgatgtcctttaatgtaaactcaaatatcaatattttaaatgtccggataatattctagaggtttaaaaaatggaaatatttgaactttctattgaagacaataaagtacacaagtcgttaaggggctattcactttatcctgtactttcaatgaaattgtgatcatttcctaagaaaaggtaaaattcactatcatattttgtgtccccaccttgatgttacatgactctggaacaatatgaactggatttaagaatgttataatagaagtcttacaaaatgggttgagagtttttgtttcaatttttatcatcataaatgggcaaaaagtagttggactaatttcggtttttatacaagtaaagatttaatagtataaggatttttttgcatttctttacactgagtgtaaaactctacaaagagttatagtatttactactttgaggtttccctcacaacttctggctccatacctagcccctcttttataatcttccttaaaagaaagagtgtagcctataaatactaaatatgataccttttccttctagaaagtgtttatttatatatctatacatgttgtatgtacaaatatcctactacttttaatctgatttttcttcaggattattgagtaggttgtgaattttctttcttaaaaattgtaaaacataatggtacccaagttttaaacttagatgtgcttcatcttagtgaaatttaattcacaaggaatcataaattgtgtttttgaggctgggcgcagtgactcacacctgtatcccagcaatttgggaggccgaggtgggcagatcacttgaggtcaggagttcaagactagcctggtcaacatggtgaaaccctgtctctactaaaaatacaaaaattagtcggcatggtggtgggtggctgtaatcccagctactcaggaggctgaggcagaagaatctgagccaagataacaccattgcactccagcctgggcgacagagtgagactatctcaaaaataaataaataaataaataaatagtatttttgagccttcaagatacagttcctgaatattctaatttaaattgttataattggattacctaatattcttttcaagactcctgatgtattaacttcatgttattgtcacttttcaaaaaaggaatttttttcaggagttaaataaagtcagtcttttatatccaagggtttcaaacccacagattaaaccaaccacagatcaaaaatagaaaaaaaaaaaaaaagaaaaaaagaatgtaaaattttaaaaatacagtttaacagctgtaaaagttttactataacatttacattgtgttaggtattttaagtaatttaaaggttacagtatacaggcggttaaagtatacaggaggatgtgcatcggttatatgcatatagcaagccatttcatataagaggcttgaacatccatggattttggtatagaggaggggtttaaggggtgtcctgcaatcagtccccctctcataccaaaggatgactgtatatttcttaaatgaagagactttcattctttaaatattattgacttacagtttaaaaataaataaataaaagcatactatagttgtaaaaacaaataattttaatagtatattcagtggctgaagtgatagggagtattaatcattatttcttcagtataaagttattcttcctgaaaaagtaagatatacctgggaaatattcttggatccttcacacatccacttaatttcttgaaggaagaaaacagacaaaagacatgtaacaacagaaacaaataaaccacttactgtaaaatttcagaaattgtgggctcattccctccctctagtttatttatttgctcatctttatcacctaatggtagtttgttttctttggtagagtatatggcagtcccacatcgatgataattggtgctcccttcatccaactggatcactttgagattcagttttacatcattttagcattttgtttgtatatcagttgtgatgagccactgataaaattttgttctaaaatgaaacatattactttgttagtacattttttagtgtcacactgacttttaaaatttgaatgatatatagactttgtttttttaatgcaatatgaatatttgctcatgttttctaaattccttataaaataaaattaattcgaattcaatctgcactttcttaaaattatctttcctcaatgctttttctttcttctgtttctctaattttgtttatgttggtgagagaagtattatactctctatttttatttaaaaaattctagcaacttattacccaaaatatttataattctgttccaaaaatgtcttcctgaagaaggctcttaagtcttttatgttcattgtatttagcataagagaaacataggtgaaataataggttcatttaccagttggggttttg

SEQ ID NO: 11797 - protein, 47 aa, Homo sapiens; identical to SEQ ID NO: 11791

SEQ ID NO: 11798 - DNA, 283 bp, Homo sapiens
atgaaagtgacaaatgcaagattctctgagattcttctctgccattaggactgtgatgttagagttgccatcagtctggatcctggattctggggttagatagatgtgaagtaaagcttctcctcttacaacacatgaggataatttagcatagatgagaaataaacttttttttttgagacagtctcattctgtcacccaggctggagtgcagtggcgagatgttggttcccagcctggtctccaactcctggcctcaggtgatctgcccacttcagcctcc

SEQ ID NO: 11799 - protein, 42 aa, Homo sapiens
MRNKLFFLRQSHSVTQAGVQWRDVGSQPGLQLLASGDLPTSA

SEQ ID NO: 11800 - DNA, 1027 bp, Homo sapiens
aagaaatggggtcagcaggagttccagcatctcagaattgtggtgaaaaccaatacaaaaaatgatgcatcctgttgccagcagtaatccagctttctgtgggcctggcaagccttcctgcctcaatgaagatgccatgagagctgctgatcagtttgacatatattcctcccagcaaagcaaatacagccacacagtcaaccacaaaccaatggtttgtcagaggcaagacccattaaatgaaacacacttgcagactacaagtggcagaagcatagaaataaaagatgaactaaagaaaaagaagaatctcaaccgatctggtaagcgtggccggccttcgggaaccaccaaatcagcaggataccggaccagcacaggcagacccctgggaaccaccaaagcagctggatttaagacaagtccaggcagacctttggggacaactaaagctgcgggatacaaagtcagcccaggcagacctccaggtagcattaaagctctatcccgtcttgccgatcttggttatggctgtggcactgctgcttttccttaccctatgatgcatggcagagcagttcatggggtagaggaaactagcagtgaagtcaaaccacccaatgagtgaatgaggcaggaaaagagggccaggtttagaaggaagattgtgaataatcccaaagcttcttggttttattttgatatacataattttatggcctgggctttccaaatttgttttcctgtttggtttttttcctgcttttgctcaaaaactgccatatgctgacagatgcactcagggcatgagcagcggcattgtatttgtacataggttcaagtgtaacacctaactaaatcatttttccttttcctttagagttatggtcatgtctcatgtttcattactactttggggctgttctaaatagatgctttatgtgataaacaactgaaaccattatacctattagtttgtgaagtaagcctacagtataataaagacactaacgtatttttaactgat

SEQ ID NO: 11801 - protein, 188 aa, Homo sapiens; identical to SEQ ID NO: 1122

SEQ ID NO: 11802 - DNA, 4898 bp, Homo sapiens
aagaaatggggtcagcaggagttccagcatctcagaattgtggtgaaaaccaatacaaaaaatgatgcatcctgttgccagcagtaatccagctttctgtgggcctggcaagccttcctgcctcaatgaagatgccatgagagctgctgatcagtttgacatatattcctcccagcaaagcaaatacagccacacagtcaaccacaaaccaatggtttgtcagaggcaagacccattaaatgaaacacacttgcagactacaagtggcagaagcatagaaataaaagatgaactaaagaaaaagaagaatctcaaccgatctggtaagcgtggccggccttcgggaaccaccaaatcagcaggataccggaccagcacaggcagacccctgggaaccaccaaagcagctggatttaagacaagtccaggcagacctttggggacaactaaagctgcgggatacaaagtcagcccaggcagacctccaggtagcattaaagctctatcccgtcttgccgatcttggttatggctgtggcactgctgcttttccttaccctatgatgcatggcagagcagttcatggggtagaggaaactagcagtgaagtcaaaccacccaatgagtgaatgaggcaggaaaagagggccaggtttagaaggaagattgtgaataatcccaaagcttcttggttttattttgatatacataattttatggcctgggctttccaaatttgttttcctgtttggtttttttcctgcttttgctcaaaaactgccatatgctgacagatgcactcagggcatgagcagcggcattgtatttgtacataggttcaagtgtaacacctaactaaatcatttttccttttcctttagagttatggtcatgtctcatgtttcattactactttggggctgttctaaatagatgctttatgtgataaacaactgaaaccattatacctattagtttgtgaagtaagcctacagtataataaagacactaacgtatttttaactgatggagcaaaaaagcaaactaatgaatcaggattacttgaggtaatggctgtgtgagtttttgtaacatttattttcacaagatgggacacatatttgtatgctttggcatttacatccacttcaaatgttaaaaaacttatttttaatgttttaggtttaagcagcttgtaatttattgatctacatggcattaattgatttaaccattatacctgaaataattcttcagtgtttgcctttgagcagtgataggttgtgtattttttaattgcctaagagcatatataccaaacactacaaacaattcatatttacagaaaatttaaactattttataaaaactgcacattacatttttggtgaaatatagtgcattctgaggatagcatatttcatataatagaaaaagaagcattctctaggtttgcatgtagctatagtcactatattttgcctttcatatagaaagttttaaagtattatgtttaaaaacatttattggctgggtgtggtggctcacacccagcactttgggaggccgaggcaggcggatcacttgaggtcagcagttcaagactagcctggccaacatggtgaaaccccatctctactaaaaatataaaaattagccaggcgtggtggcgggcgcctgtaatccaagctactggggaggctgaggcaggagaattgcttaaatccaggaggcggaggttgcagtgagccaagattgtgccactgcactccagcctgggtgacagagtaagactccgtctcaaataaataaataaataaataaataaataaataaataaataaaaccatttattgatgttgctcatttatttggaacgtttttagtttttctcagaaattgtcccattgcattagcacttactgtgttttcaggttgatatctaccaaaggacacaaattgaatggtagactgtaaaactggtataaacagaatgcagtttcccgaccatcagaacccaaatattaagaagcatataggaatccatctatgcatgaaacatgtaaaaaatatgttggttagtttaattaaaaatcttattgtgggtccagtgagaccatctcatccaaaagattttttttcccccaatgatgtttgctttagaagcaagatagaaaggaaaaaaagtattaggtagatatgtatagtagggacagagggaaatctttcttctttcctttctgaaagtaatacttcttgttacacattttatttattgagtttgttctaaataaaatattataaacttcagacttgaaaaaattccacttaactttaaagttacaatgtttgtatttgggattttaaatgcctttgagattaaaatgtagaattgcaggacccaaaaacttttaaaataattaaaattttaaaagagcacatgttgtgttttttgggcttgctattaatgcaaactctgattgcaaatggatgtcatgtttcataccttttttatcaggaaaaaagcagcaagccttcaggtgttccagtgatgcctgacacaattgagctggactttatgctgctctttacagtaagaggtgttgcattgtatgtggggactatgtgcactggcgtctaagacagtgacctcaacaatattagctttgcacaaaccatagagaacgatgttggatggttacataatcagttataacattctggcagctaaattgctacaagagctttttcttgcaaaagcttaaaatacaagatttttaataatttactcagaacagtataacttctgacacacacaaatgcttgcctctttattcatatgttcgttacctactctgtacatgtatctgtcatttagctgtttctcaagatgatgttcagcagttggctgcttagaaatctttttcaagccagtttctaaagacatttgtttaatgttctaccatagaataatgcacaccattgtcaaagatttgattattgtgttttatagtaagtccatttgacatttatttccctttcagtttattttccttccttattttgttatacatacccttccctttctcccctgcctttcgtacattcattcctcttcctctaccctccagcacatctacttactggtgctgtgctgtgtgtcagaagataaaacaggtgtattattgtataatgaattttgtatacatgtttatgaaatggtgagatcaactaaaggaggcatgttcataacagtgtttattatcagcagctatgtcccaggaaaaaaaaatgggaggggcaaatggctacagttgtaaatggataacatcatttagaaagccgaatttactgttcatctgagcggttacctggagtattatatctatgcactggtgagcatctcctgattccacttacttttctccctgtgaacagtttaccggtgccatgctgaagagaaagacatctaagtgataacatgaatgaagtcttaaaatttaaagtatttttactgctatataaactaaagactacattgtgcatattttgttaacactgtctcttgttatgataaacactgaaatagcatgttaaacagttgcctatactttaatataatcagttggggaaaactggccttttctcccccactgtatgattgtttcttgaaaggtaaattgctaattttatacagtgtaattctgttcttcacaaaataggtttcattattctatatttaaactgttggtcagaaaatgatctgcaattcaagtaagtctgcattacttttttctttaaaaagtactttaacatgccttatttattatattagcaaatgagctaataacagatgaaattttcattttttgacagatataaccttgcataagtagtatttagggtgattttgatactatctttagagttttgcattggatattaaaaaatatattggcacaatgtattggaagaaaatgagtagtatctggtttaatttttaatatttagggacattttaaaaaatcaatgttttaattagactaaaaattctttatattttttatttactttttaaagaaacatctgtcaaagtaatattgattccaaactgatgtttgtgtgaatttacatgtctattttcatgaactaagaatagagtttctttgagttgaggagaaaaaaatatatatgtgggtccatttattaggttaaagttgacccattcagtgtaaaaataaccatagtgtgtgagctaaagaaaaaaaaaagtaaatttctcctttatattctaagaagctttaaaagaacaattcaggggttattgataactgctactctgtcggtcattgtctctatatgcagtaaaattttatggtccctttataggaatataaagaattcaaaacagtttttcaaaagatttttttccttggacataaaaaattttgatgctattctatttttgtttttattacagcttaactgtatgctgttaaactctaggatgtatctgaatctttccttttttcccccctcctccaaatatataaatctgtgctctcacatgtaatgtatttaatttttggaaaatttaatgctatatagtaaatcaagtgtgtgatttaaagtaatcagatcactttgattcttttaagttttcagaatttcttttttccacaggtaattttggagaaaataattaccaattaactgataataagcacgctgtcctctgctgtaaaaagtctgaatagatactgtgtatgtttttatgtccatgaacttgagctactcgtgtgcaattatgtgtatgggaatggagtagtgttcatgatttgtatctacatcatcatatggatgtatatttattaataaagtcattactttaaaaccagc

SEQ ID NO: 11803 - protein, 188 aa, Homo sapiens; identical to SEQ ID NO: 1122

SEQ ID NO: 11804 - DNA, 1198 bp, Homo sapiens
agcggcctcttcgtactgcgtccggggcaggaccgtgcgcggcggccgcggcgggtgctgggagccagcgcctgcctcgccgccgccctcgctgcctgccactccgtcttggcccgttctccgcaccgtgcagaggcggcgggctggggagggagcggcgccagcacgaggttcccagccgctgggaagcccctagacgcgccgaggggccgggctacgagcggctgagaaaatgatgcatcctgttgccagcagtaatccagctttctgtgggcctggcaagccttcctgcctcaatgaagatgccatgagagctgctgatcagtttgacatatattcctcccagcaaagcaaatacagccacacagtcaaccacaaaccaatggtttgtcagaggcaagacccattaaatgaaacacacttgcagactacaagtggcagaagcatagaaataaaagatgaactaaagaaaaagaagaatctcaaccgatctggtaagcgtggccggccttcgggaaccaccaaatcagcaggataccggaccagcacaggcagacccctgggaaccaccaaagcagctggatttaagacaagtccaggcagacctttggggacaactaaagctgcgggatacaaagtcagcccaggcagacctccaggtagcattaaagctctatcccgtcttgccgatcttggttatggctgtggcactgctgcttttccttaccctatgatgcatggcagagcagttcatggggtagaggaaactagcagtgaagtcaaaccacccaatgagtgaatgaggcaggaaaagagggccaggtttagaaggaagattgtgaataatcccaaagcttcttggttttattttgatatacataattttatggcctgggctttccaaatttgttttcctgtttggtttttttcctgcttttgctcaaaaactgccatatgctgacagatgcactcagggcatgagcagcggcattgtatttgtacataggttcaagtgtaacacctaactaaatcatttttccttttcctttagagttatggtcatgtctcatgtttcattactactttggggctgttctaaatagatgctttatgtgataaacaactgaaaccattatacctattagtttgtgaagtaagcctacagtataataaagacactaacgtatttttaactgat

SEQ ID NO: 11805 - protein, 188 aa, Homo sapiens; identical to SEQ ID NO: 1122

SEQ ID NO: 11806 - DNA, 2018 bp, Homo sapiens
agcggcctcttcgtactgcgtccggggcaggaccgtgcgcggcggccgcggcgggtgctgggagccagcgcctgcctcgccgccgccctcgctgcctgccactccgtcttggcccgttctccgcaccgtgcagaggcggcgggctggggagggagcggcgccagcacgaggttcccagccgctgggaagcccctagacgcgccgaggggccgggctacgagcggctgagaaaatgatgcatcctgttgccagcagtaatccagctttctgtgggcctggcaagccttcctgcctcaatgaagatgccatgagagctgctgatcagtttgacatatattcctcccagcaaagcaaatacagccacacagtcaaccacaaaccaatggtttgtcagaggcaagacccattaaatgaaacacacttgcagactacaagtggcagaagcatagaaataaaagatgaactaaagaaaaagaagaatctcaaccgatctggtaagcgtggccggccttcgggaaccaccaaatcagcaggataccggaccagcacaggcagacccctgggaaccaccaaagcagctggatttaagacaagtccaggcagacctttggggacaactaaagctgcgggatacaaagtcagcccaggcagacctccaggtagcattaaagctctatcccgtcttgccgatcttggttatggctgtggcactgctgcttttccttaccctatgatgcatggcagagcagttcatggggtagaggaaactagcagtgaagtcaaaccacccaatgagtgaatgaggcaggaaaagagggccaggtttagaaggaagattgtgaataatcccaaagcttcttggttttattttgatatacataattttatggcctgggctttccaaatttgttttcctgtttggtttttttcctgcttttgctcaaaaactgccatatgctgacagatgcactcagggcatgagcagcggcattgtatttgtacataggttcaagtgtaacacctaactaaatcatttttccttttcctttagagttatggtcatgtctcatgtttcattactactttggggctgttctaaatagatgctttatgtgataaacaactgaaaccattatacctattagtttgtgaagtaagcctacagtataataaagacactaacgtatttttaactgatggagcaaaaaagcaaactaatgaatcaggattacttgaggtaatggctgtgtgagtttttgtaacatttattttcacaagatgggacacatatttgtatgctttggcatttacatccacttcaaatgttaaaaaacttatttttaatgttttaggtttaagcagcttgtaatttattgatctacatggcattaattgatttaaccattatacctgaaataattcttcagtgtttgcctttgagcagtgataggttgtgtattttttaattgcctaagagcatatataccaaacactacaaacaattcatatttacagaaaatttaaactattttataaaaactgcacattacatttttggtgaaatatagtgcattctgaggatagcatatttcatataatagaaaaagaagcattctctaggtttgcatgtagctatagtcactatattttgcctttcatatagaaagttttaaagtattatgtttaaaaacatttattggctgggtgtggtggctcacacccagcactttgggaggccgaggcaggcggatcacttgaggtcagcagttcaagactagcctggccaacatggtgaaaccccatctctactaaaaatataaaaattagccaggcgtggtggcgggcgcctgtaatccaagctactggggaggctgaggcaggagaattgcttaaatccaggaggcggaggttgcagtgagccaagattgtgccactgcactccagcctgggtgacagagtaagactccgtctcaaataaataaataaataaataaataaataaataaataaataaaacc

SEQ ID NO: 11807 - protein, 188 aa, Homo sapiens; identical to SEQ ID NO: 1122

SEQ ID NO: 11808 - DNA, 5069 bp, Homo sapiens
agcggcctcttcgtactgcgtccggggcaggaccgtgcgcggcggccgcggcgggtgctgggagccagcgcctgcctcgccgccgccctcgctgcctgccactccgtcttggcccgttctccgcaccgtgcagaggcggcgggctggggagggagcggcgccagcacgaggttcccagccgctgggaagcccctagacgcgccgaggggccgggctacgagcggctgagaaaatgatgcatcctgttgccagcagtaatccagctttctgtgggcctggcaagccttcctgcctcaatgaagatgccatgagagctgctgatcagtttgacatatattcctcccagcaaagcaaatacagccacacagtcaaccacaaaccaatggtttgtcagaggcaagacccattaaatgaaacacacttgcagactacaagtggcagaagcatagaaataaaagatgaactaaagaaaaagaagaatctcaaccgatctggtaagcgtggccggccttcgggaaccaccaaatcagcaggataccggaccagcacaggcagacccctgggaaccaccaaagcagctggatttaagacaagtccaggcagacctttggggacaactaaagctgcgggatacaaagtcagcccaggcagacctccaggtagcattaaagctctatcccgtcttgccgatcttggttatggctgtggcactgctgcttttccttaccctatgatgcatggcagagcagttcatggggtagaggaaactagcagtgaagtcaaaccacccaatgagtgaatgaggcaggaaaagagggccaggtttagaaggaagattgtgaataatcccaaagcttcttggttttattttgatatacataattttatggcctgggctttccaaatttgttttcctgtttggtttttttcctgcttttgctcaaaaactgccatatgctgacagatgcactcagggcatgagcagcggcattgtatttgtacataggttcaagtgtaacacctaactaaatcatttttccttttcctttagagttatggtcatgtctcatgtttcattactactttggggctgttctaaatagatgctttatgtgataaacaactgaaaccattatacctattagtttgtgaagtaagcctacagtataataaagacactaacgtatttttaactgatggagcaaaaaagcaaactaatgaatcaggattacttgaggtaatggctgtgtgagtttttgtaacatttattttcacaagatgggacacatatttgtatgctttggcatttacatccacttcaaatgttaaaaaacttatttttaatgttttaggtttaagcagcttgtaatttattgatctacatggcattaattgatttaaccattatacctgaaataattcttcagtgtttgcctttgagcagtgataggttgtgtattttttaattgcctaagagcatatataccaaacactacaaacaattcatatttacagaaaatttaaactattttataaaaactgcacattacatttttggtgaaatatagtgcattctgaggatagcatatttcatataatagaaaaagaagcattctctaggtttgcatgtagctatagtcactatattttgcctttcatatagaaagttttaaagtattatgtttaaaaacatttattggctgggtgtggtggctcacacccagcactttgggaggccgaggcaggcggatcacttgaggtcagcagttcaagactagcctggccaacatggtgaaaccccatctctactaaaaatataaaaattagccaggcgtggtggcgggcgcctgtaatccaagctactggggaggctgaggcaggagaattgcttaaatccaggaggcggaggttgcagtgagccaagattgtgccactgcactccagcctgggtgacagagtaagactccgtctcaaataaataaataaataaataaataaataaataaataaataaaaccatttattgatgttgctcatttatttggaacgtttttagtttttctcagaaattgtcccattgcattagcacttactgtgttttcaggttgatatctaccaaaggacacaaattgaatggtagactgtaaaactggtataaacagaatgcagtttcccgaccatcagaacccaaatattaagaagcatataggaatccatctatgcatgaaacatgtaaaaaatatgttggttagtttaattaaaaatcttattgtgggtccagtgagaccatctcatccaaaagattttttttcccccaatgatgtttgctttagaagcaagatagaaaggaaaaaaagtattaggtagatatgtatagtagggacagagggaaatctttcttctttcctttctgaaagtaatacttcttgttacacattttatttattgagtttgttctaaataaaatattataaacttcagacttgaaaaaattccacttaactttaaagttacaatgtttgtatttgggattttaaatgcctttgagattaaaatgtagaattgcaggacccaaaaacttttaaaataattaaaattttaaaagagcacatgttgtgttttttgggcttgctattaatgcaaactctgattgcaaatggatgtcatgtttcataccttttttatcaggaaaaaagcagcaagccttcaggtgttccagtgatgcctgacacaattgagctggactttatgctgctctttacagtaagaggtgttgcattgtatgtggggactatgtgcactggcgtctaagacagtgacctcaacaatattagctttgcacaaaccatagagaacgatgttggatggttacataatcagttataacattctggcagctaaattgctacaagagctttttcttgcaaaagcttaaaatacaagatttttaataatttactcagaacagtataacttctgacacacacaaatgcttgcctctttattcatatgttcgttacctactctgtacatgtatctgtcatttagctgtttctcaagatgatgttcagcagttggctgcttagaaatctttttcaagccagtttctaaagacatttgtttaatgttctaccatagaataatgcacaccattgtcaaagatttgattattgtgttttatagtaagtccatttgacatttatttccctttcagtttattttccttccttattttgttatacatacccttccctttctcccctgcctttcgtacattcattcctcttcctctaccctccagcacatctacttactggtgctgtgctgtgtgtcagaagataaaacaggtgtattattgtataatgaattttgtatacatgtttatgaaatggtgagatcaactaaaggaggcatgttcataacagtgtttattatcagcagctatgtcccaggaaaaaaaaatgggaggggcaaatggctacagttgtaaatggataacatcatttagaaagccgaatttactgttcatctgagcggttacctggagtattatatctatgcactggtgagcatctcctgattccacttacttttctccctgtgaacagtttaccggtgccatgctgaagagaaagacatctaagtgataacatgaatgaagtcttaaaatttaaagtatttttactgctatataaactaaagactacattgtgcatattttgttaacactgtctcttgttatgataaacactgaaatagcatgttaaacagttgcctatactttaatataatcagttggggaaaactggccttttctcccccactgtatgattgtttcttgaaaggtaaattgctaattttatacagtgtaattctgttcttcacaaaataggtttcattattctatatttaaactgttggtcagaaaatgatctgcaattcaagtaagtctgcattacttttttctttaaaaagtactttaacatgccttatttattatattagcaaatgagctaataacagatgaaattttcattttttgacagatataaccttgcataagtagtatttagggtgattttgatactatctttagagttttgcattggatattaaaaaatatattggcacaatgtattggaagaaaatgagtagtatctggtttaatttttaatatttagggacattttaaaaaatcaatgttttaattagactaaaaattctttatattttttatttactttttaaagaaacatctgtcaaagtaatattgattccaaactgatgtttgtgtgaatttacatgtctattttcatgaactaagaatagagtttctttgagttgaggagaaaaaaatatatatgtgggtccatttattaggttaaagttgacccattcagtgtaaaaataaccatagtgtgtgagctaaagaaaaaaaaaagtaaatttctcctttatattctaagaagctttaaaagaacaattcaggggttattgataactgctactctgtcggtcattgtctctatatgcagtaaaattttatggtccctttataggaatataaagaattcaaaacagtttttcaaaagatttttttccttggacataaaaaattttgatgctattctatttttgtttttattacagcttaactgtatgctgttaaactctaggatgtatctgaatctttccttttttcccccctcctccaaatatataaatctgtgctctcacatgtaatgtatttaatttttggaaaatttaatgctatatagtaaatcaagtgtgtgatttaaagtaatcagatcactttgattcttttaagttttcagaatttcttttttccacaggtaattttggagaaaataattaccaattaactgataataagcacgctgtcctctgctgtaaaaagtctgaatagatactgtgtatgtttttatgtccatgaacttgagctactcgtgtgcaattatgtgtatgggaatggagtagtgttcatgatttgtatctacatcatcatatggatgtatatttattaataaagtcattactttaaaaccagc

SEQ ID NO: 11809 - protein, 188 aa, Homo sapiens; identical to SEQ ID NO: 1122

SEQ ID NO: 11810 - DNA, 3036 bp, Homo sapiens
gcctcttcgtactgcgtccggggcaggaccgtgcgcggcggccgcggcgggtgctgggagccagcgcctgcctcgccgccgccctcgctgcctgccactccgtcttggcccgttctccgcaccgtgcagaggcggcgggctggggagggagcggcgccagcacgaggttcccagccgctgggaagcccctagacgcgccgaggggccgggctacgagcggctgagaaaatgatgcatcctgttgccagcagtaatccagctttctgtgggcctggcaagccttcctgcctcaatgaagatgccatgagagctgctgatcagtttgacatatattcctcccagcaaagcaaatacagccacacagtcaaccacaaaccaatggtttgtcagaggcaagacccattaaatgaaacacacttgcagactacaagtggcagaagcatagaaataaaagatgaactaaagaaaaagaagaatctcaaccgatctggtaagcgtggccggccttcgggaaccaccaaatcagcaggataccggaccagcacaggcagacccctgggaaccaccaaagcagctggatttaagacaagtccaggcagacctttggggacaactaaagctgcgggatacaaagtcagcccaggcagacctccaggaaaaaagcagcaagccttcaggtgttccagtgatgcctgacacaattgagctggactttatgctgctctttacagtaagaggtgttgcattgtatgtggggactatgtgcactggcgtctaagacagtgacctcaacaatattagctttgcacaaaccatagagaacgatgttggatggttacataatcagttataacattctggcagctaaattgctacaagagctttttcttgcaaaagcttaaaatacaagatttttaataatttactcagaacagtataacttctgacacacacaaatgcttgcctctttattcatatgttcgttacctactctgtacatgtatctgtcatttagctgtttctcaagatgatgttcagcagttggctgcttagaaatctttttcaagccagtttctaaagacatttgtttaatgttctaccatagaataatgcacaccattgtcaaagatttgattattgtgttttatagtaagtccatttgacatttatttccctttcagtttattttccttccttattttgttatacatacccttccctttctcccctgcctttcgtacattcattcctcttcctctaccctccagcacatctacttactggtgctgtgctgtgtgtcagaagataaaacaggtgtattattgtataatgaattttgtatacatgtttatgaaatggtgagatcaactaaaggaggcatgttcataacagtgtttattatcagcagctatgtcccaggaaaaaaaaatgggaggggcaaatggctacagttgtaaatggataacatcatttagaaagccgaatttactgttcatctgagcggttacctggagtattatatctatgcactggtgagcatctcctgattccacttacttttctccctgtgaacagtttaccggtgccatgctgaagagaaagacatctaagtgataacatgaatgaagtcttaaaatttaaagtatttttactgctatataaactaaagactacattgtgcatattttgttaacactgtctcttgttatgataaacactgaaatagcatgttaaacagttgcctatactttaatataatcagttggggaaaactggccttttctcccccactgtatgattgtttcttgaaaggtaaattgctaattttatacagtgtaattctgttcttcacaaaataggtttcattattctatatttaaactgttggtcagaaaatgatctgcaattcaagtaagtctgcattacttttttctttaaaaagtactttaacatgccttatttattatattagcaaatgagctaataacagatgaaattttcattttttgacagatataaccttgcataagtagtatttagggtgattttgatactatctttagagttttgcattggatattaaaaaatatattggcacaatgtattggaagaaaatgagtagtatctggtttaatttttaatatttagggacattttaaaaaatcaatgttttaattagactaaaaattctttatattttttatttactttttaaagaaacatctgtcaaagtaatattgattccaaactgatgtttgtgtgaatttacatgtctattttcatgaactaagaatagagtttctttgagttgaggagaaaaaaatatatatgtgggtccatttattaggttaaagttgacccattcagtgtaaaaataaccatagtgtgtgagctaaagaaaaaaaaaagtaaatttctcctttatattctaagaagctttaaaagaacaattcaggggttattgataactgctactctgtcggtcattgtctctatatgcagtaaaattttatggtccctttataggaatataaagaattcaaaacagtttttcaaaagatttttttccttggacataaaaaattttgatgctattctatttttgtttttattacagcttaactgtatgctgttaaactctaggatgtatctgaatctttccttttttcccccctcctccaaatatataaatctgtgctctcacatgtaatgtatttaatttttggaaaatttaatgctatatagtaaatcaagtgtgtgatttaaagtaatcagatcactttgattcttttaagttttcagaatttcttttttccacaggtaattttggagaaaataattaccaattaactgataataagcacgctgtcctctgctgtaaaaagtctgaatagatactgtgtatgtttttatgtccatgaacttgagctactcgtgtgcaattatgtgtatgggaatggagtagtgttcatgatttgtatctacatcatcatatggatgtatatttattaataaagtcattactttaaaaccagc

SEQ ID NO: 11811 - protein, 155 aa, Homo sapiens
MMHPVASSNPAFCGPGKPSCLNEDAMRAADQFDIYSSQQSKYSHTVNHKPMVCQRQDPLNETHLQTTSGRSIEIKDELKKKKNLNRSGKRGRPSGTTKSAGYRTSTGRPLGTTKAAGFKTSPGRPLGTTKAAGYKVSPGRPPGKKQQAFRCSSDA

SEQ ID NO: 11812 - DNA, 1745 bp, Homo sapiens
cgtcttggcccgttctccgcaccgtgcagaggcggcgggctggggagggagcggcgccagcacgaggttcccagccgctgggaagcccctagacgcgccgaggggccgggctacgagcggctgaggtaggtaggggtgcgcgggctggtcagccggccgggagcggggtagggcggcggcgagaacgggcgcctcgctgaccggggagaagaggcctcctgccaaggggccctagtgtagccggagtgagaggaggggccccggacgtagcctgctcttccccggtgtggagccattacggggggacattcctcctgcggcggggggagggagccccctttcttttctttgagaggtcagaatccgcagtccgcccttcgcctttaaataaaagcctgccggctcgagatcggcgtcgcgatggagtgcccgtggacttctacgcttgcggaactccgagtggacggatagcggcttatgaattttgctttttagagggtacacaaccctttctctagggtggcgtgcatcttctgcaaacttgttattgccaatacgctaatagtcgctttcagcacacaacaggtaatacattctaaacgcctcgtgtcaaaataaggagagtccttatttgtgcaccgtggggcacagttaaggagcaggaagaagacaaaggaggccgttatttatgtgccgtcctattatcaaaactttccgtggtggggcagggtgcgtggctattggcctctgctgaatggactttcagagtgattgagaaaatgatgcatcctgttgccagcagtaatccagctttctgtgggcctggcaagccttcctgcctcaatgaagatgccatgagagctgctgatcagtttgacatatattcctcccagcaaagcaaatacagccacacagtcaaccacaaaccaatggtttgtcagaggcaagacccattaaatgaaacacacttgcagactacaagtggcagaagcatagaaataaaagatgaactaaagaaaaagaagaatctcaaccgatctggtaagcgtggccggccttcgggaaccaccaaatcagcaggataccggaccagcacaggcagacccctgggaaccaccaaagcagctggatttaagacaagtccaggcagacctttggggacaactaaagctgcgggatacaaagtcagcccaggcagacctccaggtagcattaaagctctatcccgtcttgccgatcttggttatggctgtggcactgctgcttttccttaccctatgatgcatggcagagcagttcatggggtagaggaaactagcagtgaagtcaaaccacccaatgagtgaatgaggcaggaaaagagggccaggtttagaaggaagattgtgaataatcccaaagcttcttggttttattttgatatacataattttatggcctgggctttccaaatttgttttcctgtttggtttttttcctgcttttgctcaaaaactgccatatgctgacagatgcactcagggcatgagcagcggcattgtatttgtacataggttcaagtgtaacacctaactaaatcatttttccttttcctttagagttatggtcatgtctcatgtttcattactactttggggctgttctaaatagatgctttatgtgataaacaactgaaaccattatacctattagtttgtgaagtaagcctacagtataataaagacactaacgtatttttaactgat

SEQ ID NO: 11813 - protein, 188 aa, Homo sapiens; identical to SEQ ID NO: 1122

SEQ ID NO: 11814 - DNA, 5616 bp, Homo sapiens
cgtcttggcccgttctccgcaccgtgcagaggcggcgggctggggagggagcggcgccagcacgaggttcccagccgctgggaagcccctagacgcgccgaggggccgggctacgagcggctgaggtaggtaggggtgcgcgggctggtcagccggccgggagcggggtagggcggcggcgagaacgggcgcctcgctgaccggggagaagaggcctcctgccaaggggccctagtgtagccggagtgagaggaggggccccggacgtagcctgctcttccccggtgtggagccattacggggggacattcctcctgcggcggggggagggagccccctttcttttctttgagaggtcagaatccgcagtccgcccttcgcctttaaataaaagcctgccggctcgagatcggcgtcgcgatggagtgcccgtggacttctacgcttgcggaactccgagtggacggatagcggcttatgaattttgctttttagagggtacacaaccctttctctagggtggcgtgcatcttctgcaaacttgttattgccaatacgctaatagtcgctttcagcacacaacaggtaatacattctaaacgcctcgtgtcaaaataaggagagtccttatttgtgcaccgtggggcacagttaaggagcaggaagaagacaaaggaggccgttatttatgtgccgtcctattatcaaaactttccgtggtggggcagggtgcgtggctattggcctctgctgaatggactttcagagtgattgagaaaatgatgcatcctgttgccagcagtaatccagctttctgtgggcctggcaagccttcctgcctcaatgaagatgccatgagagctgctgatcagtttgacatatattcctcccagcaaagcaaatacagccacacagtcaaccacaaaccaatggtttgtcagaggcaagacccattaaatgaaacacacttgcagactacaagtggcagaagcatagaaataaaagatgaactaaagaaaaagaagaatctcaaccgatctggtaagcgtggccggccttcgggaaccaccaaatcagcaggataccggaccagcacaggcagacccctgggaaccaccaaagcagctggatttaagacaagtccaggcagacctttggggacaactaaagctgcgggatacaaagtcagcccaggcagacctccaggtagcattaaagctctatcccgtcttgccgatcttggttatggctgtggcactgctgcttttccttaccctatgatgcatggcagagcagttcatggggtagaggaaactagcagtgaagtcaaaccacccaatgagtgaatgaggcaggaaaagagggccaggtttagaaggaagattgtgaataatcccaaagcttcttggttttattttgatatacataattttatggcctgggctttccaaatttgttttcctgtttggtttttttcctgcttttgctcaaaaactgccatatgctgacagatgcactcagggcatgagcagcggcattgtatttgtacataggttcaagtgtaacacctaactaaatcatttttccttttcctttagagttatggtcatgtctcatgtttcattactactttggggctgttctaaatagatgctttatgtgataaacaactgaaaccattatacctattagtttgtgaagtaagcctacagtataataaagacactaacgtatttttaactgatggagcaaaaaagcaaactaatgaatcaggattacttgaggtaatggctgtgtgagtttttgtaacatttattttcacaagatgggacacatatttgtatgctttggcatttacatccacttcaaatgttaaaaaacttatttttaatgttttaggtttaagcagcttgtaatttattgatctacatggcattaattgatttaaccattatacctgaaataattcttcagtgtttgcctttgagcagtgataggttgtgtattttttaattgcctaagagcatatataccaaacactacaaacaattcatatttacagaaaatttaaactattttataaaaactgcacattacatttttggtgaaatatagtgcattctgaggatagcatatttcatataatagaaaaagaagcattctctaggtttgcatgtagctatagtcactatattttgcctttcatatagaaagttttaaagtattatgtttaaaaacatttattggctgggtgtggtggctcacacccagcactttgggaggccgaggcaggcggatcacttgaggtcagcagttcaagactagcctggccaacatggtgaaaccccatctctactaaaaatataaaaattagccaggcgtggtggcgggcgcctgtaatccaagctactggggaggctgaggcaggagaattgcttaaatccaggaggcggaggttgcagtgagccaagattgtgccactgcactccagcctgggtgacagagtaagactccgtctcaaataaataaataaataaataaataaataaataaataaataaaaccatttattgatgttgctcatttatttggaacgtttttagtttttctcagaaattgtcccattgcattagcacttactgtgttttcaggttgatatctaccaaaggacacaaattgaatggtagactgtaaaactggtataaacagaatgcagtttcccgaccatcagaacccaaatattaagaagcatataggaatccatctatgcatgaaacatgtaaaaaatatgttggttagtttaattaaaaatcttattgtgggtccagtgagaccatctcatccaaaagattttttttcccccaatgatgtttgctttagaagcaagatagaaaggaaaaaaagtattaggtagatatgtatagtagggacagagggaaatctttcttctttcctttctgaaagtaatacttcttgttacacattttatttattgagtttgttctaaataaaatattataaacttcagacttgaaaaaattccacttaactttaaagttacaatgtttgtatttgggattttaaatgcctttgagattaaaatgtagaattgcaggacccaaaaacttttaaaataattaaaattttaaaagagcacatgttgtgttttttgggcttgctattaatgcaaactctgattgcaaatggatgtcatgtttcataccttttttatcaggaaaaaagcagcaagccttcaggtgttccagtgatgcctgacacaattgagctggactttatgctgctctttacagtaagaggtgttgcattgtatgtggggactatgtgcactggcgtctaagacagtgacctcaacaatattagctttgcacaaaccatagagaacgatgttggatggttacataatcagttataacattctggcagctaaattgctacaagagctttttcttgcaaaagcttaaaatacaagatttttaataatttactcagaacagtataacttctgacacacacaaatgcttgcctctttattcatatgttcgttacctactctgtacatgtatctgtcatttagctgtttctcaagatgatgttcagcagttggctgcttagaaatctttttcaagccagtttctaaagacatttgtttaatgttctaccatagaataatgcacaccattgtcaaagatttgattattgtgttttatagtaagtccatttgacatttatttccctttcagtttattttccttccttattttgttatacatacccttccctttctcccctgcctttcgtacattcattcctcttcctctaccctccagcacatctacttactggtgctgtgctgtgtgtcagaagataaaacaggtgtattattgtataatgaattttgtatacatgtttatgaaatggtgagatcaactaaaggaggcatgttcataacagtgtttattatcagcagctatgtcccaggaaaaaaaaatgggaggggcaaatggctacagttgtaaatggataacatcatttagaaagccgaatttactgttcatctgagcggttacctggagtattatatctatgcactggtgagcatctcctgattccacttacttttctccctgtgaacagtttaccggtgccatgctgaagagaaagacatctaagtgataacatgaatgaagtcttaaaatttaaagtatttttactgctatataaactaaagactacattgtgcatattttgttaacactgtctcttgttatgataaacactgaaatagcatgttaaacagttgcctatactttaatataatcagttggggaaaactggccttttctcccccactgtatgattgtttcttgaaaggtaaattgctaattttatacagtgtaattctgttcttcacaaaataggtttcattattctatatttaaactgttggtcagaaaatgatctgcaattcaagtaagtctgcattacttttttctttaaaaagtactttaacatgccttatttattatattagcaaatgagctaataacagatgaaattttcattttttgacagatataaccttgcataagtagtatttagggtgattttgatactatctttagagttttgcattggatattaaaaaatatattggcacaatgtattggaagaaaatgagtagtatctggtttaatttttaatatttagggacattttaaaaaatcaatgttttaattagactaaaaattctttatattttttatttactttttaaagaaacatctgtcaaagtaatattgattccaaactgatgtttgtgtgaatttacatgtctattttcatgaactaagaatagagtttctttgagttgaggagaaaaaaatatatatgtgggtccatttattaggttaaagttgacccattcagtgtaaaaataaccatagtgtgtgagctaaagaaaaaaaaaagtaaatttctcctttatattctaagaagctttaaaagaacaattcaggggttattgataactgctactctgtcggtcattgtctctatatgcagtaaaattttatggtccctttataggaatataaagaattcaaaacagtttttcaaaagatttttttccttggacataaaaaattttgatgctattctatttttgtttttattacagcttaactgtatgctgttaaactctaggatgtatctgaatctttccttttttcccccctcctccaaatatataaatctgtgctctcacatgtaatgtatttaatttttggaaaatttaatgctatatagtaaatcaagtgtgtgatttaaagtaatcagatcactttgattcttttaagttttcagaatttcttttttccacaggtaattttggagaaaataattaccaattaactgataataagcacgctgtcctctgctgtaaaaagtctgaatagatactgtgtatgtttttatgtccatgaacttgagctactcgtgtgcaattatgtgtatgggaatggagtagtgttcatgatttgtatctacatcatcatatggatgtatatttattaataaagtcattactttaaaaccagc

SEQ ID NO: 11815 - protein, 188 aa, Homo sapiens; identical to SEQ ID NO: 1122

SEQ ID NO: 11816 - DNA, 685 bp, Homo sapiens
acataatgtaagctgagactgtatatcctgagttctctgatagattatgaatgttcatatatatatatatatatacacacacacacacacactacacacacatacatattttatacatacagaaatacatatatttatttatttatttatttatttatttatttatttatttttgttaccctcctggtaagtcacagaacttttttttttcccccacaaaatttttgtaaatttttgtatttttagtagaaacagggttttgccattttggccaagctggtcttgaactcctgaccttaggtgattttcccgccttggcctctcacagtgctgggattgtaggcgtgagccatcgtggccatcctggttgtctttactaattctggcatttgcttttcttccatttggaaaccaaatctatttgactttgcatgagctgagatcgcgctactgcactccagcctgggtgacagagcaagactcagtctcaaaaaaaaataaaaaataaaatgaaaatacaaaataaaaataaaaaattagccaggcgtggtggcacatgcctgtaatcccagctactcgggaggctgaggcaggagaatcgcttgaacccaggaggcggaggttgcggtgagccaagattgtgccattgcactccaacctgggcaacaagtgcgaaactccacct

SEQ ID NO: 11817 - protein, 59 aa, Homo sapiens
MFIYIYIYTHTHTHYTHIHILYIQKYIYLFIYLFIYLFIYFCYPPGKSQNFFFSPTKFL

SEQ ID NO: 11818 - DNA, 2648 bp, Homo sapiens
agaaaatgatgcatcctgttgccagcagtaatccagctttctgtgggcctggcaagccttcctgcctcaatgaagatgccatgagagctgctgatcagtttgacatatattcctcccagcaaagcaaatacagccacacagtcaaccacaaaccaatggtttgtcagaggcaagacccattaaatgaaacacacttgcagactacaagtggcagaagcatagaaataaaagatgaactaaagaaaaagaagaatctcaaccgatctggaaaaaagcagcaagccttcaggtgttccagtgatgcctgacacaattgagctggactttatgctgctctttacagtaagaggtgttgcattgtatgtggggactatgtgcactggcgtctaagacagtgacctcaacaatattagctttgcacaaaccatagagaacgatgttggatggttacataatcagttataacattctggcagctaaattgctacaagagctttttcttgcaaaagcttaaaatacaagatttttaataatttactcagaacagtataacttctgacacacacaaatgcttgcctctttattcatatgttcgttacctactctgtacatgtatctgtcatttagctgtttctcaagatgatgttcagcagttggctgcttagaaatctttttcaagccagtttctaaagacatttgtttaatgttctaccatagaataatgcacaccattgtcaaagatttgattattgtgttttatagtaagtccatttgacatttatttccctttcagtttattttccttccttattttgttatacatacccttccctttctcccctgcctttcgtacattcattcctcttcctctaccctccagcacatctacttactggtgctgtgctgtgtgtcagaagataaaacaggtgtattattgtataatgaattttgtatacatgtttatgaaatggtgagatcaactaaaggaggcatgttcataacagtgtttattatcagcagctatgtcccaggaaaaaaaaatgggaggggcaaatggctacagttgtaaatggataacatcatttagaaagccgaatttactgttcatctgagcggttacctggagtattatatctatgcactggtgagcatctcctgattccacttacttttctccctgtgaacagtttaccggtgccatgctgaagagaaagacatctaagtgataacatgaatgaagtcttaaaatttaaagtatttttactgctatataaactaaagactacattgtgcatattttgttaacactgtctcttgttatgataaacactgaaatagcatgttaaacagttgcctatactttaatataatcagttggggaaaactggccttttctcccccactgtatgattgtttcttgaaaggtaaattgctaattttatacagtgtaattctgttcttcacaaaataggtttcattattctatatttaaactgttggtcagaaaatgatctgcaattcaagtaagtctgcattacttttttctttaaaaagtactttaacatgccttatttattatattagcaaatgagctaataacagatgaaattttcattttttgacagatataaccttgcataagtagtatttagggtgattttgatactatctttagagttttgcattggatattaaaaaatatattggcacaatgtattggaagaaaatgagtagtatctggtttaatttttaatatttagggacattttaaaaaatcaatgttttaattagactaaaaattctttatattttttatttactttttaaagaaacatctgtcaaagtaatattgattccaaactgatgtttgtgtgaatttacatgtctattttcatgaactaagaatagagtttctttgagttgaggagaaaaaaatatatatgtgggtccatttattaggttaaagttgacccattcagtgtaaaaataaccatagtgtgtgagctaaagaaaaaaaaaagtaaatttctcctttatattctaagaagctttaaaagaacaattcaggggttattgataactgctactctgtcggtcattgtctctatatgcagtaaaattttatggtccctttataggaatataaagaattcaaaacagtttttcaaaagatttttttccttggacataaaaaattttgatgctattctatttttgtttttattacagcttaactgtatgctgttaaactctaggatgtatctgaatctttccttttttcccccctcctccaaatatataaatctgtgctctcacatgtaatgtatttaatttttggaaaatttaatgctatatagtaaatcaagtgtgtgatttaaagtaatcagatcactttgattcttttaagttttcagaatttcttttttccacaggtaattttggagaaaataattaccaattaactgataataagcacgctgtcctctgctgtaaaaagtctgaatagatactgtgtatgtttttatgtccatgaacttgagctactcgtgtgcaattatgtgtatgggaatggagtagtgttcatgatttgtatctacatcatcatatggatgtatatttattaataaagtcattactttaaaaccagc

SEQ ID NO: 11819 - protein, 100 aa, Homo sapiens
MMHPVASSNPAFCGPGKPSCLNEDAMRAADQFDIYSSQQSKYSHTVNHKPMVCQRQDPLNETHLQTTSGRSIEIKDELKKKKNLNRSGKKQQAFRCSSDA

SEQ ID NO: 11820 - DNA, 4773 bp, Homo sapiens
agaaaatgatgcatcctgttgccagcagtaatccagctttctgtgggcctggcaagccttcctgcctcaatgaagatgccatgagagctgctgatcagtttgacatatattcctcccagcaaagcaaatacagccacacagtcaaccacaaaccaatggtttgtcagaggcaagacccattaaatgaaacacacttgcagactacaagtggcagaagcatagaaataaaagatgaactaaagaaaaagaagaatctcaaccgatctggtaagcgtggccggccttcgggaaccaccaatccaggcagacctttggggacaactaaagctgcgggatacaaagtcagcccaggcagacctccaggtagcattaaagctctatcccgtcttgccgatcttggttatggctgtggcactgctgcttttccttaccctatgatgcatggcagagcagttcatggggtagaggaaactagcagtgaagtcaaaccacccaatgagtgaatgaggcaggaaaagagggccaggtttagaaggaagattgtgaataatcccaaagcttcttggttttattttgatatacataattttatggcctgggctttccaaatttgttttcctgtttggtttttttcctgcttttgctcaaaaactgccatatgctgacagatgcactcagggcatgagcagcggcattgtatttgtacataggttcaagtgtaacacctaactaaatcatttttccttttcctttagagttatggtcatgtctcatgtttcattactactttggggctgttctaaatagatgctttatgtgataaacaactgaaaccattatacctattagtttgtgaagtaagcctacagtataataaagacactaacgtatttttaactgatggagcaaaaaagcaaactaatgaatcaggattacttgaggtaatggctgtgtgagtttttgtaacatttattttcacaagatgggacacatatttgtatgctttggcatttacatccacttcaaatgttaaaaaacttatttttaatgttttaggtttaagcagcttgtaatttattgatctacatggcattaattgatttaaccattatacctgaaataattcttcagtgtttgcctttgagcagtgataggttgtgtattttttaattgcctaagagcatatataccaaacactacaaacaattcatatttacagaaaatttaaactattttataaaaactgcacattacatttttggtgaaatatagtgcattctgaggatagcatatttcatataatagaaaaagaagcattctctaggtttgcatgtagctatagtcactatattttgcctttcatatagaaagttttaaagtattatgtttaaaaacatttattggctgggtgtggtggctcacacccagcactttgggaggccgaggcaggcggatcacttgaggtcagcagttcaagactagcctggccaacatggtgaaaccccatctctactaaaaatataaaaattagccaggcgtggtggcgggcgcctgtaatccaagctactggggaggctgaggcaggagaattgcttaaatccaggaggcggaggttgcagtgagccaagattgtgccactgcactccagcctgggtgacagagtaagactccgtctcaaataaataaataaataaataaataaataaataaataaataaaaccatttattgatgttgctcatttatttggaacgtttttagtttttctcagaaattgtcccattgcattagcacttactgtgttttcaggttgatatctaccaaaggacacaaattgaatggtagactgtaaaactggtataaacagaatgcagtttcccgaccatcagaacccaaatattaagaagcatataggaatccatctatgcatgaaacatgtaaaaaatatgttggttagtttaattaaaaatcttattgtgggtccagtgagaccatctcatccaaaagattttttttcccccaatgatgtttgctttagaagcaagatagaaaggaaaaaaagtattaggtagatatgtatagtagggacagagggaaatctttcttctttcctttctgaaagtaatacttcttgttacacattttatttattgagtttgttctaaataaaatattataaacttcagacttgaaaaaattccacttaactttaaagttacaatgtttgtatttgggattttaaatgcctttgagattaaaatgtagaattgcaggacccaaaaacttttaaaataattaaaattttaaaagagcacatgttgtgttttttgggcttgctattaatgcaaactctgattgcaaatggatgtcatgtttcataccttttttatcaggaaaaaagcagcaagccttcaggtgttccagtgatgcctgacacaattgagctggactttatgctgctctttacagtaagaggtgttgcattgtatgtggggactatgtgcactggcgtctaagacagtgacctcaacaatattagctttgcacaaaccatagagaacgatgttggatggttacataatcagttataacattctggcagctaaattgctacaagagctttttcttgcaaaagcttaaaatacaagatttttaataatttactcagaacagtataacttctgacacacacaaatgcttgcctctttattcatatgttcgttacctactctgtacatgtatctgtcatttagctgtttctcaagatgatgttcagcagttggctgcttagaaatctttttcaagccagtttctaaagacatttgtttaatgttctaccatagaataatgcacaccattgtcaaagatttgattattgtgttttatagtaagtccatttgacatttatttccctttcagtttattttccttccttattttgttatacatacccttccctttctcccctgcctttcgtacattcattcctcttcctctaccctccagcacatctacttactggtgctgtgctgtgtgtcagaagataaaacaggtgtattattgtataatgaattttgtatacatgtttatgaaatggtgagatcaactaaaggaggcatgttcataacagtgtttattatcagcagctatgtcccaggaaaaaaaaatgggaggggcaaatggctacagttgtaaatggataacatcatttagaaagccgaatttactgttcatctgagcggttacctggagtattatatctatgcactggtgagcatctcctgattccacttacttttctccctgtgaacagtttaccggtgccatgctgaagagaaagacatctaagtgataacatgaatgaagtcttaaaatttaaagtatttttactgctatataaactaaagactacattgtgcatattttgttaacactgtctcttgttatgataaacactgaaatagcatgttaaacagttgcctatactttaatataatcagttggggaaaactggccttttctcccccactgtatgattgtttcttgaaaggtaaattgctaattttatacagtgtaattctgttcttcacaaaataggtttcattattctatatttaaactgttggtcagaaaatgatctgcaattcaagtaagtctgcattacttttttctttaaaaagtactttaacatgccttatttattatattagcaaatgagctaataacagatgaaattttcattttttgacagatataaccttgcataagtagtatttagggtgattttgatactatctttagagttttgcattggatattaaaaaatatattggcacaatgtattggaagaaaatgagtagtatctggtttaatttttaatatttagggacattttaaaaaatcaatgttttaattagactaaaaattctttatattttttatttactttttaaagaaacatctgtcaaagtaatattgattccaaactgatgtttgtgtgaatttacatgtctattttcatgaactaagaatagagtttctttgagttgaggagaaaaaaatatatatgtgggtccatttattaggttaaagttgacccattcagtgtaaaaataaccatagtgtgtgagctaaagaaaaaaaaaagtaaatttctcctttatattctaagaagctttaaaagaacaattcaggggttattgataactgctactctgtcggtcattgtctctatatgcagtaaaattttatggtccctttataggaatataaagaattcaaaacagtttttcaaaagatttttttccttggacataaaaaattttgatgctattctatttttgtttttattacagcttaactgtatgctgttaaactctaggatgtatctgaatctttccttttttcccccctcctccaaatatataaatctgtgctctcacatgtaatgtatttaatttttggaaaatttaatgctatatagtaaatcaagtgtgtgatttaaagtaatcagatcactttgattcttttaagttttcagaatttcttttttccacaggtaattttggagaaaataattaccaattaactgataataagcacgctgtcctctgctgtaaaaagtctgaatagatactgtgtatgtttttatgtccatgaacttgagctactcgtgtgcaattatgtgtatgggaatggagtagtgttcatgatttgtatctacatcatcatatggatgtatatttattaataaagtcattactttaaaaccagc

SEQ ID NO: 11821 - protein, 165 aa, Homo sapiens
MMHPVASSNPAFCGPGKPSCLNEDAMRAADQFDIYSSQQSKYSHTVNHKPMVCQRQDPLNETHLQTTSGRSIEIKDELKKKKNLNRSGKRGRPSGTTNPGRPLGTTKAAGYKVSPGRPPGSIKALSRLADLGYGCGTAAFPYPMMHGRAVHGVEETSSEVKPPNE

SEQ ID NO: 11822 - DNA, 752 bp, Homo sapiens
ggaaaaaagcagcaagccttcaggtgttccagtgatgcctgacacaattgagctggactttatgttaaagttgacccattcagtgtaaaaataaccatagtgtgtgagctaaagaaaaaaaaaagtaaatttctcctttatattctaagaagctttaaaagaacaattcaggggttattgataactgctactctgtcggtcattgtctctatatgcagtaaaattttatggtccctttataggaatataaagaattcaaaacagtttttcaaaagatttttttccttggacataaaaaattttgatgctattctatttttgtttttattacagcttaactgtatgctgttaaactctaggatgtatctgaatctttccttttttcccccctcctccaaatatataaatctgtgctctcacatgtaatgtatttaatttttggaaaatttaatgctatatagtaaatcaagtgtgtgatttaaagtaatcagatcactttgattcttttaagttttcagaatttcttttttccacaggtaattttggagaaaataattaccaattaactgataataagcacgctgtcctctgctgtaaaaagtctgaatagatactgtgtatgtttttatgtccatgaacttgagctactcgtgtgcaattatgtgtatgggaatggagtagtgttcatgatttgtatctacatcatcatatggatgtatatttattaataaagtcattactttaaaaccagc

SEQ ID NO: 11823 - protein, 40 aa, Homo sapiens
SDHFDSFKFSEFLFSTGNFGENNYQLTDNKHAVLCCKKSE

SEQ ID NO: 11824 - DNA, 2764 bp, Homo sapiens
tgattaaaaagagattgccctgcaaggtaaatcagttaaaaccaacctctcctgccctgagtggataggtagggttagggttgccagatgtcacgaagttacaggatgctcagttttaaggtatatcccttatactataagggttatagtaaaaaatattcattatgtgaaattcaaatataactgggtatcaggtattctatgtggcaaccctaggtaggggagcacaggttaggcaagcgattagaagatttgcagcctccaaagtttctgcacctcgatgggacactagaacaggaaggctcctgggcctttctggctctgggaatgaagcgtggaaaaccctccttaggcgggcgcagtgcttcaagtagccaagctctgacttccgagggaagaaaggaggccatgggcctctgccagagccatgctctgcactctggggtcagcagagttcaaaacgacctgcaacgtctggcgcttagctcctaaagaggtctccagtccagcgccgacggccagcggctagaggccgtccgcccgactccaagatggcgcccgccacagctgccaggtgttaagatggcggcgcggggccgcgcccgcgctcccaggctctcctcccccagccttcctccggctggcagcacgactcgcgtagccgtgcgccgattgcctctcggcctgggcaatggtcccggctgccggtcgacgaccgccccgcgtcatgcggctcctcggctggtggcaagtattgctgtgggtgctgggacttcccgtccgcggcgtggaggttgcagaggaaagtggtcgcttatggtcagaggagcagcctgctcaccctctccaggtgggggctgtgtacctgggtgaggaggagctcctgcatgacccgatgggccaggacagggcagcagaagaggccaatgcggtgctggggctggacacccaaggcgatcacatggtgatgctgtctgtgattcctggggaagctgaggacaaagtgagttcagagcctagcggcgtcacctgtggtgctggaggagcggaggactcaaggtgcaacgtccgagagagccttttctctctggatggcgctggagcacacttccctgacagagaagaggagtattacacagagccagaagtggcggaatctgacgcagccccgacagaggactccaataacactgaaagtctgaaatccccaaaggtgaactgtgaggagagaaacattacaggattagaaaatttcactctgaaaattttaaatatgtcacaggaccttatggattttctgaacccaaacggtagtgactgtactctagtcctgttttacaccccgtggtgccgcttttctgccagtttggcccctcactttaactctctgccccgggcatttccagctcttcactttttggcactggatgcatctcagcacagcagcctttctaccaggtttggcaccgtagctgttcctaatattttattatttcaaggagctaaaccaatggccagatttaatcatacagatcgaacactggaaacactgaaaatcttcatttttaatcagacaggtatagaagccaagaagaatgtggtggtaactcaagccgaccaaataggccctcttcccagcactttgataaaaagtgtggactggttgcttgtattttccttattctttttaattagttttattatgtatgctaccattcgaactgagagtattcggtggctaattccaggacaagagcaggaacatgtggagtagtgatggtctgaaagaagttggaaagaggaacttcaatccttcgtttcagaaattagtgctacagtttcatacattttctccagtgacgtgttgacttgaaacttcaggcagattaaaagaatcatttgttgaacaactgaatgtataaaaaaattataaactggtgttttaactagtattgcaataagcaaatgcaaaaatattcaatagatgcactattcttgtttttactgcatgaacgtaatccagtatttggaaagtaatccagtttgaaatgtgaagatgtattccggcagaatagtgagtagaatgacatgcttactatacagaaggcaaaaataggactctcaggtaatagtttaaggaaacccttgattccttatatatgtttaagaaggttagttttctgtttctttgcagtttttcttctagagtccatagcaggaaagtatgtaaccagaattggttagtgtgaccccctcaagtagcaagtgatggaaaataagagtcaaataccttgatgtttgtgatctctaactcaaaaaatttgaagtgttttaagttgtttctgggtaagggagatgttaggagaaaggaaatgctgtaactaaagctcaattattatcagttctatgctaacgtatacattttaatcatagttacctaagcagcatgcattaattgaaccttaaaatgttcccagcaggctggtctcaaactgctgacttcaggtgatccacccgcctcagcctcccaaagtgttgggattacaggtgtgagccactgcgcctggcctaaacaaactttttgaaaagctgtttctaaaagattccttaaattcagatatgacagctaattacctcatcataaattacttttatactaattgtttccagggttttagagtagttgaatgtttatttcacaaggcaccctaaattctatagaaataaaacctcagatgagtctccttcttagagtgttacaatg

SEQ ID NO: 11825 - protein, 360 aa, Homo sapiens; identical to SEQ ID NO: 1124

SEQ ID NO: 11826 - DNA, 3006 bp, Homo sapiens
tgattaaaaagagattgccctgcaaggtaaatcagttaaaaccaacctctcctgccctgagtggataggtagggttagggttgccagatgtcacgaagttacaggatgctcagttttaaggtatatcccttatactataagggttatagtaaaaaatattcattatgtgaaattcaaatataactgggtatcaggtattctatgtggcaaccctaggtaggggagcacaggttaggcaagcgattagaagatttgcagcctccaaagtttctgcacctcgatgggacactagaacaggaaggctcctgggcctttctggctctgggaatgaagcgtggaaaaccctccttaggcgggcgcagtgcttcaagtagccaagctctgacttccgagggaagaaaggaggccatgggcctctgccagagccatgctctgcactctggggtcagcagagttcaaaacgacctgcaacgtctggcgcttagctcctaaagaggtctccagtccagcgccgacggccagcggctagaggccgtccgcccgactccaagatggcgcccgccacagctgccaggtgttaagatggcggcgcggggccgcgcccgcgctcccaggctctcctcccccagccttcctccggctggcagcacgactcgcgtagccgtgcgccgattgcctctcggcctgggcaatggtcccggctgccggtcgacgaccgccccgcgtcatgcggctcctcggctggtggcaagtattgctgtgggtgctgggacttcccgtccgcggcgtggaggttgcagaggaaagtggtcgcttatggtcagaggagcagcctgctcaccctctccaggtgggggctgtgtacctgggtgaggaggagctcctgcatgacccgatgggccaggacagggcagcagaagaggccaatgcggtgctggggctggacacccaaggcgatcacatggtgatgctgtctgtgattcctggggaagctgaggacaaagtgagttcagagcctagcggcgtcacctgtggtgctggaggagcggaggactcaaggtgcaacgtccgagagagccttttctctctggatggcgctggagcacacttccctgacagagaagaggagtattacacagagccagaagtggcggaatctgacgcagccccgacagaggactccaataacactgaaagtctgaaatccccaaaggtgaactgtgaggagagaaacattacaggattagaaaatttcactctgaaaattttaaatatgtcacaggaccttatggattttctgaacccaaacggtagtgactgtactctagtcctgttttacaccccgtggtgccgcttttctgccagtttggcccctcactttaactctctgccccgggcatttccagctcttcactttttggcactggatgcatctcagcacagcagcctttctaccaggtttggcaccgtagctgttcctaatattttattatttcaaggagctaaaccaatggccagatttaatcatacagatcgaacactggaaacactgaaaatcttcatttttaatcagacaggtatagaagccaagaagaatgtggtggtaactcaagccgaccaaataggccctcttcccagcactttgataaaaagtgtggactggttgcttgtattttccttattctttttaattagttttattatgtatgctaccattcgaactgagagtattcggtggctaattccaggacaagagcaggaacatgtggagtagtgatggtctgaaagaagttggaaagaggaacttcaatccttcgtttcagaaattagtgctacagtttcatacattttctccagtgacgtgttgacttgaaacttcaggcagattaaaagaatcatttgttgaacaactgaatgtataaaaaaattataaactggtgttttaactagtattgcaataagcaaatgcaaaaatattcaatagatgcactattcttgtttttactgcatgaacgtaatccagtatttggaaagtaatccagtttgaaatgtgaagatgtattccggcagaatagtgagtagaatgacatgcttactatacagaaggcaaaaataggactctcaggtaatagtttaaggaaacccttgattccttatatatgtttaagaaggttagttttctgtttctttgcagtttttcttctagagtccatagcaggaaagtatgtaaccagaattggttagtgtgaccccctcaagtagcaagtgatggaaaataagagtcaaataccttgatgtttgtgatctctaactcaaaaaatttgaagtgttttaagttgtttctgggtaagggagatgttaggagaaaggaaatgctgtaactaaagctcaattattatcagttctatgctaacgtatacattttaatcatagttacctaagcagcatgcattaattgaaccttaaaatgttcccagcaggctggtctcaaactgctgacttcaggtgatccacccgcctcagcctcccaaagtgttgggattacaggtgtgagccactgcgcctggcctaaacaaactttttgaaaagctgtttctaaaagattccttaaattcagatatgacagctaattacctcatcataaattacttttatactaattgtttccagggttttagagtagttgaatgtttatttcacaaggcaccctaaattctatagaaataaaacctcagatgagtctccttcttagagtgttacaatgaatgggagtttacaacttttatgtgtcatgtttccaacagctgtgtttggggtggtcactggcaggaggggaccgtatctcagaatggcacattatttctattttacacatgagcaaattgaggcatagagagttagataacttgcccaggttacacagattgtaagttgatgaagctgggatttgaatcttcacatgtgtgtacttataaatacaaatgtaaggaaaactctagtgagtcc

SEQ ID NO: 11827 - protein, 360 aa, Homo sapiens; identical to SEQ ID NO: 1124

SEQ ID NO: 11828 - DNA, 3246 bp, Homo sapiens
tgattaaaaagagattgccctgcaaggtaaatcagttaaaaccaacctctcctgccctgagtggataggtagggttagggttgccagatgtcacgaagttacaggatgctcagttttaaggtatatcccttatactataagggttatagtaaaaaatattcattatgtgaaattcaaatataactgggtatcaggtattctatgtggcaaccctaggtaggggagcacaggttaggcaagcgattagaagatttgcagcctccaaagtttctgcacctcgatgggacactagaacaggaaggctcctgggcctttctggctctgggaatgaagcgtggaaaaccctccttaggcgggcgcagtgcttcaagtagccaagctctgacttccgagggaagaaaggaggccatgggcctctgccagagccatgctctgcactctggggtcagcagagttcaaaacgacctgcaacgtctggcgcttagctcctaaagaggtctccagtccagcgccgacggccagcggctagaggccgtccgcccgactccaagatggcgcccgccacagctgccaggtgttaagatggcggcgcggggccgcgcccgcgctcccaggctctcctcccccagccttcctccggctggcagcacgactcgcgtagccgtgcgccgattgcctctcggcctgggcaatggtcccggctgccggtcgacgaccgccccgcgtcatgcggctcctcggctggtggcaagtattgctgtgggtgctgggacttcccgtccgcggcgtggaggttgcagaggaaagtggtcgcttatggtcagaggagcagcctgctcaccctctccaggtgggggctgtgtacctgggtgaggaggagctcctgcatgacccgatgggccaggacagggcagcagaagaggccaatgcggtgctggggctggacacccaaggcgatcacatggtgatgctgtctgtgattcctggggaagctgaggacaaagtgagttcagagcctagcggcgtcacctgtggtgctggaggagcggaggactcaaggtgcaacgtccgagagagccttttctctctggatggcgctggagcacacttccctgacagagaagaggagtattacacagagccagaagtggcggaatctgacgcagccccgacagaggactccaataacactgaaagtctgaaatccccaaaggtgaactgtgaggagagaaacattacaggattagaaaatttcactctgaaaattttaaatatgtcacaggaccttatggattttctgaacccaaacggtagtgactgtactctagtcctgttttacaccccgtggtgccgcttttctgccagtttggcccctcactttaactctctgccccgggcatttccagctcttcactttttggcactggatgcatctcagcacagcagcctttctaccaggtttggcaccgtagctgttcctaatattttattatttcaaggagctaaaccaatggccagatttaatcatacagatcgaacactggaaacactgaaaatcttcatttttaatcagacaggtatagaagccaagaagaatgtggtggtaactcaagccgaccaaataggccctcttcccagcactttgataaaaagtgtggactggttgcttgtattttccttattctttttaattagttttattatgtatgctaccattcgaactgagagtattcggtggctaattccaggacaagagcaggaacatgtggagtagtgatggtctgaaagaagttggaaagaggaacttcaatccttcgtttcagaaattagtgctacagtttcatacattttctccagtgacgtgttgacttgaaacttcaggcagattaaaagaatcatttgttgaacaactgaatgtataaaaaaattataaactggtgttttaactagtattgcaataagcaaatgcaaaaatattcaatagatgcactattcttgtttttactgcatgaacgtaatccagtatttggaaagtaatccagtttgaaatgtgaagatgtattccggcagaatagtgagtagaatgacatgcttactatacagaaggcaaaaataggactctcaggtaatagtttaaggaaacccttgattccttatatatgtttaagaaggttagttttctgtttctttgcagtttttcttctagagtccatagcaggaaagtatgtaaccagaattggttagtgtgaccccctcaagtagcaagtgatggaaaataagagtcaaataccttgatgtttgtgatctctaactcaaaaaatttgaagtgttttaagttgtttctgggtaagggagatgttaggagaaaggaaatgctgtaactaaagctcaattattatcagttctatgctaacgtatacattttaatcatagttacctaagcagcatgcattaattgaaccttaaaatgttcccagcaggctggtctcaaactgctgacttcaggtgatccacccgcctcagcctcccaaagtgttgggattacaggtgtgagccactgcgcctggcctaaacaaactttttgaaaagctgtttctaaaagattccttaaattcagatatgacagctaattacctcatcataaattacttttatactaattgtttccagggttttagagtagttgaatgtttatttcacaaggcaccctaaattctatagaaataaaacctcagatgagtctccttcttagagtgttacaatgaatgggagtttacaacttttatgtgtcatgtttccaacagctgtgtttggggtggtcactggcaggaggggaccgtatctcagaatggcacattatttctattttacacatgagcaaattgaggcatagagagttagataacttgcccaggttacacagattgtaagttgatgaagctgggatttgaatcttcacatgtgtgtacttataaatacaaatgtaaggaaaactctagtgagtccacctcttatattgagttattactgtgtgagtgccaagtactgttttagatgctttacatatactattttgtttaatatcctttttaaagaataaactaggttggtgcagtagctcacgcctgtaatcccaggactttgggaagctgaggcaggtggattgcttgagtctcaggagttcgagaccaggctggttaacatggcgaaaccctgtctttactaaaagtacaaaaaattagctgg

SEQ ID NO: 11829 - protein, 360 aa, Homo sapiens; identical to SEQ ID NO: 1124

SEQ ID NO: 11830 - DNA, 1846 bp, Homo sapiens
aggtagggttagggttgccagatgtcacgaagttacaggatgctcagttttaaggtatatcccttatactataagggttatagtaaaaaatattcattatgtgaaattcaaatataactgggtatcaggtattctatgtggcaaccctaggtaggggagcacaggttaggcaagcgattagaagatttgcagcctccaaagtttctgcacctcgatgggacactagaacaggaaggctcctgggcctttctggctctgggaatgaagcgtggaaaaccctccttaggcgggcgcagtgcttcaagtagccaagctctgacttccgagggaagaaaggaggccatgggcctctgccagagccatgctctgcactctggggtcagcagagttcaaaacgacctgcaacgtctggcgcttagctcctaaagaggtctccagtccagcgccgacggccagcggctagaggccgtccgcccgactccaagatggcgcccgccacagctgccaggtgttaagatggcggcgcggggccgcgcccgcgctcccaggctctcctcccccagccttcctccggctggcagcacgactcgcgtagccgtgcgccgattgcctctcggcctgggcaatggtcccggctgccggtcgacgaccgccccgcgtcatgcggctcctcggctggtggcaagtattgctgtgggtgctgggacttcccgtccgcggcgtggaggttgcagaggaaagtggtcgcttatggtcagaggagcagcctgctcaccctctccaggtgggggctgtgtacctgggtgaggaggagctcctgcatgacccgatgggccaggacagggcagcagaagaggccaatgcggtgctggggctggacacccaaggcgatcacatggtgatgctgtctgtgattcctggggaagctgaggacaaagtgagttcagagcctagcggcgtcacctgtggtgctggaggagcggaggactcaaggtgcaacgtccgagagagccttttctctctggatggcgctggagcacacttccctgacagagaagaggagtattacacagagccagaagtggcggaatctgacgcagccccgacagaggactccaataacactgaaagtctgaaatccccaaaggtgaactgtgaggagagaaacattacaggattagaaaatttcactctgaaaattttaaatatgtcacaggaccttatggattttctgaacccaaacggtagtgactgtactctagtcctgttttacaccccgtggtgccgcttttctgccagtttggcccctcactttaactctctgccccgggcatttccagctcttcactttttggcactggatgcatctcagcacagcagcctttctaccaggtttggcaccgtagctgttcctaatattttattatttcaaggagctaaaccaatggccagatttaatcatacagatcgaacactggaaacactgaaaatcttcatttttaatcagacaggtatagaagccaagaagaatgtggtggtaactcaagccgaccaaataggccctcttcccagcactttgataaaaagtgtggactggttgcttgtattttccttattctttttaattagttttattatgtatgctaccattcgaactgagagtattcggtggctaattccaggacaagagcaggaacatgtggagtagtgatggtctgaaagaagttggaaagaggaacttcaatccttcgtttcagaaattagtgctacagtttcatacattttctccagtgacgtgttgacttgaaacttcaggcagattaaaagaatcatttgttgaacaact

SEQ ID NO: 11831 - protein, 360 aa, Homo sapiens; identical to SEQ ID NO: 1124

SEQ ID NO: 11832 - DNA, 1095 bp, Homo sapiens
aggtagggttagggttgccagatgtcacgaagttacaggatgctcagttttaaggtatatcccttatactataagggttatagtaaaaaatattcattatgtgaaattcaaatataactgggtatcaggtattctatgtggcaaccctaggtaggggagcacaggttaggcaagcgattagaagatttgcagcctccaaagtttctgcacctcgatgggacactagaacaggaaggctcctgggcctttctggctctgggaatgaagcgtggaaaaccctccttaggcgggcgcagtgcttcaagtagccaagctctgacttccgagggaagaaaggaggccatgggcctctgccagagccatgctctgcactctggggtcagcagagttcaaaacgacctgcaacgtctggcgcttagctcctaaagaggtctccagtccagcgccgacggccagcggctagaggccgtccgcccgactccaagatggcgcccgccacagctgccaggtgttaagatggcggcgcggggccgcgcccgcgctcccaggctctcctcccccagccttcctccggctggcagcacgactcgcgtagccgtgcgccgattgcctctcggcctgggcaatggtcccggctgccggtcgacgaccgccccgcgtcatgcggctcctcggctggtggcaagtattgctgtgggtgctgggacttcccgtccgcggcgtggagggtatagaagccaagaagaatgtggtggtaactcaagccgaccaaataggccctcttcccagcactttgataaaaagtgtggactggttgcttgtattttccttattctttttaattagttttattatgtatgctaccattcgaactgagagtattcggtggctaattccaggacaagagcaggaacatgtggagtagtgatggtctgaaagaagttggaaagaggaacttcaatccttcgtttcagaaattagtgctacagtttcatacattttctccagtgacgtgttgacttgaaacttcaggcagattaaaagaatcatttgttgaacaactgaatgtataaaaaaattataaactggtgtttt

SEQ ID NO: 11833 - protein, 109 aa, Homo sapiens
MAARGRARAPRLSSPSLPPAGSTTRVAVRRLPLGLGNGPGCRSTTAPRHAAPRLVASIAVGAGTSRPRRGGYRSQEECGGNSSRPNRPSSQHFDKKCGLVACIFLILFN

SEQ ID NO: 11834 - DNA, 1878 bp, Homo sapiens
aggtagggttagggttgccagatgtcacgaagttacaggatgctcagttttaaggtatatcccttatactataagggttatagtaaaaaatattcattatgtgaaattcaaatataactgggtatcaggtattctatgtggcaaccctaggtaggggagcacaggttaggcaagcgattagaagatttgcagcctccaaagtttctgcacctcgatgggacactagaacaggaaggctcctgggcctttctggctctgggaatgaagcgtggaaaaccctccttaggcgggcgcagtgcttcaagtagccaagctctgacttccgagggaagaaaggaggccatgggcctctgccagagccatgctctgcactctggggtcagcagagttcaaaacgacctgcaacgtctggcgcttagctcctaaagaggtctccagtccagcgccgacggccagcggctagaggccgtccgcccgactccaagatggcgcccgccacagctgccaggtgttaagatggcggcgcggggccgcgcccgcgctcccaggctctcctcccccagccttcctccggctggcagcacgactcgcgtagccgtgcgccgattgcctctcggcctgggcaatggtcccggctgccggtcgacgaccgccccgcgtcatgcggctcctcggctggtggcaagtattgctgtgggtgctgggacttcccgtccgcggcgtggaggttgcagaggaaagtggtcgcttatggtcagaggagcagcctgctcaccctctccaggtgggggctgtgtacctgggtgaggaggagctcctgcatgacccgatgggccaggacagggcagcagaagaggccaatgcggtgctggggctggacacccaaggcgatcacatggtgatgctgtctgtgattcctggggaagctgaggacaaagtgagttcagagcctagcggcgtcacctgtggtgctggaggagcggaggactcaaggtgcaacgtccgagagagccttttctctctggatggcgctggagcacacttccctgacagagaagaggagtattacacagagccagaagtggcggaatctgacgcagccccgacagaggactccaataacactgaaagtctgaaatccccaaaggtgaactgtgaggagagaaacattacaggattagaaaatttcactctgaaaattttaaatatgtcacaggaccttatggattttctgaacccaaacggtagtgactgtactctagtcctgttttacaccccgtggtgccgcttttctgccagtttggcccctcactttaactctctgccccgggcatttccagctcttcactttttggcactggatgcatctcagcacagcagcctttctaccaggtttggcaccgtagctgttcctaatattttattatttcaaggagctaaaccaatggccagatttaatcatacagatcgaacactggaaacactgaaaatcttcatttttaatcagacaggtatagaagccaagaagaatgtggtggtaactcaagccgaccaaataggccctcttcccagcactttgataaaaagtgtggactggttgcttgtattttccttattctttttaattagttttattatgtatgctaccattcgaactgagagtattcggtggctaattccaggacaagagcaggaacatgtggagtagtgatggtctgaaagaagttggaaagaggaacttcaatccttcgtttcagaaattagtgctacagtttcatacattttctccagtgacgtgttgacttgaaacttcaggcagattaaaagaatcatttgttgaacaactgaatgtataaaaaaattataaactggtgtttt

SEQ ID NO: 11835 - protein, 360 aa, Homo sapiens; identical to SEQ ID NO: 1124

SEQ ID NO: 11836 - DNA, 1139 bp, Homo sapiens
aggtagggttagggttgccagatgtcacgaagttacaggatgctcagttttaaggtatatcccttatactataagggttatagtaaaaaatattcattatgtgaaattcaaatataactgggtatcaggtattctatgtggcaaccctaggtaggggagcacaggttaggcaagcgattagaagatttgcagcctccaaagtttctgcacctcgatgggacactagaacaggaaggctcctgggcctttctggctctgggaatgaagcgtggaaaaccctccttaggcgggcgcagtgcttcaagtagccaagctctgacttccgagggaagaaaggaggccatgggcctctgccagagccatgctctgcactctggggtcagcagagttcaaaacgacctgcaacgtctggcgcttagctcctaaagaggtctccagtccagcgccgacggccagcggctagaggccgtccgcccgactccaagatggcgcccgccacagctgccaggtgttaagatggcggcgcggggccgcgcccgcgctcccaggctctcctcccccagccttcctccggctggcagcacgactcgcgtagccgtgcgccgattgcctctcggcctgggcaatggtcccggctgccggtcgacgaccgccccgcgtcatgcggctcctcggctggtggcaagtattgctgtgggtgctgggacttcccgtccgcggcgtggagggtatagaagccaagaagaatgtggtggtaactcaagccgaccaaataggccctcttcccagcactttgataaaaagtgtggactggttgcttgtattttccttattctttttaattagttttattatgtatgctaccattcgaactgagagtattcggtggctaattccaggacaagagcaggaacatgtggagtagtgatggtctgaaagaagttggaaagaggaacttcaatccttcgtttcagaaattagtgctacagtttcatacattttctccagtgacgtgttgacttgaaacttcaggcagattaaaagaatcatttgttgaacaactgaatgtataaaaaaattataaactggtgttttaactagtattgcaataagcaaatgcaaaaatattcaatagatgc

SEQ ID NO: 11837 - protein, 109 aa, Homo sapiens; identical to SEQ ID NO: 11833

SEQ ID NO: 11838 - DNA, 1922 bp, Homo sapiens
aggtagggttagggttgccagatgtcacgaagttacaggatgctcagttttaaggtatatcccttatactataagggttatagtaaaaaatattcattatgtgaaattcaaatataactgggtatcaggtattctatgtggcaaccctaggtaggggagcacaggttaggcaagcgattagaagatttgcagcctccaaagtttctgcacctcgatgggacactagaacaggaaggctcctgggcctttctggctctgggaatgaagcgtggaaaaccctccttaggcgggcgcagtgcttcaagtagccaagctctgacttccgagggaagaaaggaggccatgggcctctgccagagccatgctctgcactctggggtcagcagagttcaaaacgacctgcaacgtctggcgcttagctcctaaagaggtctccagtccagcgccgacggccagcggctagaggccgtccgcccgactccaagatggcgcccgccacagctgccaggtgttaagatggcggcgcggggccgcgcccgcgctcccaggctctcctcccccagccttcctccggctggcagcacgactcgcgtagccgtgcgccgattgcctctcggcctgggcaatggtcccggctgccggtcgacgaccgccccgcgtcatgcggctcctcggctggtggcaagtattgctgtgggtgctgggacttcccgtccgcggcgtggaggttgcagaggaaagtggtcgcttatggtcagaggagcagcctgctcaccctctccaggtgggggctgtgtacctgggtgaggaggagctcctgcatgacccgatgggccaggacagggcagcagaagaggccaatgcggtgctggggctggacacccaaggcgatcacatggtgatgctgtctgtgattcctggggaagctgaggacaaagtgagttcagagcctagcggcgtcacctgtggtgctggaggagcggaggactcaaggtgcaacgtccgagagagccttttctctctggatggcgctggagcacacttccctgacagagaagaggagtattacacagagccagaagtggcggaatctgacgcagccccgacagaggactccaataacactgaaagtctgaaatccccaaaggtgaactgtgaggagagaaacattacaggattagaaaatttcactctgaaaattttaaatatgtcacaggaccttatggattttctgaacccaaacggtagtgactgtactctagtcctgttttacaccccgtggtgccgcttttctgccagtttggcccctcactttaactctctgccccgggcatttccagctcttcactttttggcactggatgcatctcagcacagcagcctttctaccaggtttggcaccgtagctgttcctaatattttattatttcaaggagctaaaccaatggccagatttaatcatacagatcgaacactggaaacactgaaaatcttcatttttaatcagacaggtatagaagccaagaagaatgtggtggtaactcaagccgaccaaataggccctcttcccagcactttgataaaaagtgtggactggttgcttgtattttccttattctttttaattagttttattatgtatgctaccattcgaactgagagtattcggtggctaattccaggacaagagcaggaacatgtggagtagtgatggtctgaaagaagttggaaagaggaacttcaatccttcgtttcagaaattagtgctacagtttcatacattttctccagtgacgtgttgacttgaaacttcaggcagattaaaagaatcatttgttgaacaactgaatgtataaaaaaattataaactggtgttttaactagtattgcaataagcaaatgcaaaaatattcaatagatgc

SEQ ID NO: 11839 - protein, 360 aa, Homo sapiens; identical to SEQ ID NO: 1124

SEQ ID NO: 11840 - DNA, 1828 bp, Homo sapiens
aggtagggttagggttgccagatgtcacgaagttacaggatgctcagttttaaggtatatcccttatactataagggttatagtaaaaaatattcattatgtgaaattcaaatataactgggtatcaggtattctatgtggcaaccctaggtaggggagcacaggttaggcaagcgattagaagatttgcagcctccaaagtttctgcacctcgatgggacactagaacaggaaggctcctgggcctttctggctctgggaatgaagcgtggaaaaccctccttaggcgggcgcagtgcttcaagtagccaagctctgacttccgagggaagaaaggaggccatgggcctctgccagagccatgctctgcactctggggtcagcagagttcaaaacgacctgcaacgtctggcgcttagctcctaaagaggtctccagtccagcgccgacggccagcggctagaggccgtccgcccgactccaagatggcgcccgccacagctgccaggtgttaagatggcggcgcggggccgcgcccgcgctcccaggctctcctcccccagccttcctccggctggcagcacgactcgcgtagccgtgcgccgattgcctctcggcctgggcaatggtcccggctgccggtcgacgaccgccccgcgtcatgcggctcctcggctggtggcaagtattgctgtgggtgctgggacttcccgtccgcggcgtggagggtatagaagccaagaagaatgtggtggtaactcaagccgaccaaataggccctcttcccagcactttgataaaaagtgtggactggttgcttgtattttccttattctttttaattagttttattatgtatgctaccattcgaactgagagtattcggtggctaattccaggacaagagcaggaacatgtggagtagtgatggtctgaaagaagttggaaagaggaacttcaatccttcgtttcagaaattagtgctacagtttcatacattttctccagtgacgtgttgacttgaaacttcaggcagattaaaagaatcatttgttgaacaactgaatgtataaaaaaattataaactggtgttttaactagtattgcaataagcaaatgcaaaaatattcaatagatgcactattcttgtttttactgcatgaacgtaatccagtatttggaaagtaatccagtttgaaatgtgaagatgtattccggcagaatagtgagtagaatgacatgcttactatacagaaggcaaaaataggactctcaggtaatagtttaaggaaacccttgattccttatatatgtttaagaaggttagttttctgtttctttgcagtttttcttctagagtccatagcaggaaagtatgtaaccagaattggttagtgtgaccccctcaagtagcaagtgatggaaaataagagtcaaataccttgatgtttgtgatctctaactcaaaaaatttgaagtgttttaagttgtttctgggtaagggagatgttaggagaaaggaaatgctgtaactaaagctcaattattatcagttctatgctaacgtatacattttaatcatagttacctaagcagcatgcattaattgaaccttaaaatgttcccagcaggctgggcgcagtggctcatgcctgtaatcccagcactttgggaggccaaggcgggaggatcacttgaggttaggacttttgagaccagcctggccaacttggtgaaaccctctctctactaaaaatacaaaaaattagctgggcgtggtggcgggcacctgtaatcccagctacttgggaaagctgaggcatgagaa

SEQ ID NO: 11841 - protein, 109 aa, Homo sapiens; identical to SEQ ID NO: 11833

SEQ ID NO: 11842 - DNA, 2906 bp, Homo sapiens
gccgtgcgccgattgcctctcggcctgggcaatggtcccggctgccggtcgacgaccgccccgcgtcatgcggctcctcggctggtgttgcagaggaaagtggtcgcttatggtcagaggagcagcctgctcaccctctccaggtgggggctgtgtacctgggtgaggaggagctcctgcatgacccgatgggccaggacagggcagcagaagaggccaatgcggtgctggggctggacacccaaggcgatcacatggtgatgctgtctgtgattcctggggaagctgaggacaaagtgagttcagagcctagcggcgtcacctgtggtgctggaggagcggaggactcaaggtgcaacgtccgagagagccttttctctctggatggcgctggagcacacttccctgacagagaagaggagtattacacagagccagaagtggcggaatctgacgcagccccgacagaggactccaataacactgaaagtctgaaatccccaaaggtgaactgtgaggagagaaacattacaggattagaaaatttcactctgaaaattttaaatatgtcacaggaccttatggattttctgaacccaaacggtagtgactgtactctagtcctgttttacaccccgtggtgccgcttttctgccagtttggcccctcactttaactctctgccccgggcatttccagctcttcactttttggcactggatgcatctcagcacagcagcctttctaccaggtttggcaccgtagctgttcctaatattttattatttcaaggagctaaaccaatggccagatttaatcatacagatcgaacactggaaacactgaaaatcttcatttttaatcagacaggtatagaagccaagaagaatgtggtggtaactcaagccgaccaaataggccctcttcccagcactttgataaaaagtgtggactggttgcttgtattttccttattctttttaattagttttattatgtatgctaccattcgaactgagagtattcggtggctaattccaggacaagagcaggaacatgtggagtagtgatggtctgaaagaagttggaaagaggaacttcaatccttcgtttcagaaattagtgctacagtttcatacattttctccagtgacgtgttgacttgaaacttcaggcagattaaaagaatcatttgttgaacaactgaatgtataaaaaaattataaactggtgttttaactagtattgcaataagcaaatgcaaaaatattcaatagatgcactattcttgtttttactgcatgaacgtaatccagtatttggaaagtaatccagtttgaaatgtgaagatgtattccggcagaatagtgagtagaatgacatgcttactatacagaaggcaaaaataggactctcaggtaatagtttaaggaaacccttgattccttatatatgtttaagaaggttagttttctgtttctttgcagtttttcttctagagtccatagcaggaaagtatgtaaccagaattggttagtgtgaccccctcaagtagcaagtgatggaaaataagagtcaaataccttgatgtttgtgatctctaactcaaaaaatttgaagtgttttaagttgtttctgggtaagggagatgttaggagaaaggaaatgctgtaactaaagctcaattattatcagttctatgctaacgtatacattttaatcatagttacctaagcagcatgcattaattgaaccttaaaatgttcccagcaggctgggcgcagtggctcatgcctgtaatcccagcactttgggaggccaaggcgggaggatcacttgaggttaggacttttgagaccagcctggccaacttggtgaaaccctctctctactaaaaatacaaaaaattagctgggcgtggtggcgggcacctgtaatcccagctacttgggaaagctgaggcatgagaatcacttgaacccgggaggcagaggttgcagtgagctgagatcatgccactgcactccagcctgtgcaaccagagcgaaactccatctcaaaaacaaacaaaaagaagtattgaagtgtaaaacactgttcttgcccacaagttgattctagtctagttcaagacacatgtttagtaaagagacaacatgtaatttaaacaaactttttttttttttttagacaaagtctcactctgtcacctaggctggagtgcaatggtgcaatcttggctcactgcaacctctgcttcccgggttcaagcgattctccagcctcagcctcctgagtagctgggactatgggcctgtgccatcacacccagctaatttttctatttttagtagagatggggttttgccatgttggccaggctggtctcaaactgctgacttcaggtgatccacccgcctcagcctcccaaagtgttgggattacaggtgtgagccactgcgcctggcctaaacaaactttttgaaaagctgtttctaaaagattccttaaattcagatatgacagctaattacctcatcataaattacttttatactaattgtttccagggttttagagtagttgaatgtttatttcacaaggcaccctaaattctatagaaataaaacctcagatgagtctccttcttagagtgttacaatgaatgggagtttacaacttttatgtgtcatgtttccaacagctgtgtttggggtggtcactggcaggaggggaccgtatctcagaatggcacattatttctattttacacatgagcaaattgaggcatagagagttagataacttgcccaggttacacagattgtaagttgatgaagctgggatttgaatcttcacatgtgtgtacttataaatacaaatgtaaggaaaactctagtgagtcc

SEQ ID NO: 11843 - protein, 292 aa, Homo sapiens
MGQDRAAEEANAVLGLDTQGDHMVMLSVIPGEAEDKVSSEPSGVTCGAGGAEDSRCNVRESLFSLDGAGAHFPDREEEYYTEPEVAESDAAPTEDSNNTESLKSPKVNCEERNITGLENFTLKILNMSQDLMDFLNPNGSDCTLVLFYTPWCRFSASLAPHFNSLPRAFPALHFLALDASQHSSLSTRFGTVAVPNILLFQGAKPMARFNHTDRTLETLKIFIFNQTGIEAKKNVVVTQADQIGPLPSTLIKSVDWLLVFSLFFLISFIMYATIRTESIRWLIPGQEQEHVE

SEQ ID NO: 11844 - DNA, 529 bp, Homo sapiens
ttactttcatgctccttcaccccactcctcatagtcctgttaaagtccagaccctcggtctcgcttgtcatttagaccttaacaggaataggcaggtctttcttttccctggggtgtcctggatggaggcaggacagcagagagttgtggagaagggtgagtcatagtaacacaattaccatgaatgaaagcgctcactgtgtaccagatgctgtgctcagtgctttacgagcatcatcttttggaatctttactgttttgtttttgtttttttaagggatgagggcttgctctgttgcccaggcgggagtgcagtggcccatcatggctccctgcagcctgtgctacagagcaagactctgtctcaaaaaaaaccaaaaaaacaaagacaaaataattagctgggtgcagtggctcatgcctgtaatcctagctgcttgggaggctgaggtggtagaatcgcttgaacccgggaggtggttgtgccactgtactccagcctgggtgacagagcgagaccctgtctcaa

SEQ ID NO: 11845 - protein, 82 aa, Homo sapiens
MRACSVAQAGVQWPIMAPCSLCYRARLCLKKNQKNKDKIISWVQWLMPVILAAWEAEVVESLEPGRWLCHCTPAWVTERDPV

SEQ ID NO: 11846 - DNA, 6675 bp, Homo sapiens
agatttatatatttttaaggcccattggctttgcctaaaccttggtaaacagatactaaaaatctccagtaacattgcaaaattttgttctaattatcaggttcagcttcaaaacgtgtaaaatgcattgtgtactgagagtaagaggctgactctcgttagatccatttctatcagtgtgtttaaagccaaaaggaaagtaaaatacacatggctttcttctgacttgagttgtgtgattatggtcttttactcaagcttaaatgtttttatttttttgtcttccgagttcatgttgcccaaatgtcctgaggtggttccaaataccaatcccacacttcttgaccattgtcctgtggacaataacttggaataaatgtgaaactgaagtctgagtgcccatcagagagtgtcccaatccaaccagtctataagaagatctggggtgacatgtctgagagtaaagccaaaaagatagaaatcaaggacgtggatgggcagacgctgagtaagctgattgactacatctatactgctgaaatcgaggtgactgaagagaatgtccaggtgctgctcccggcagccagcttgctgcagctcatggatgttcggcagaactgctgtgacttcctgcagtctcagttgcatcccaccaattgcctgggcatccgtgcatttgcagatgtacacacctgcactgaccttctgcagcaggccaatgcctacgcagagcagcactttccagaggtgatgctaggagaagaatttcttagcctgagtctggaccaggtgtgcagcttgatatccagcgacaagctgaccgtttcttcagaagagaaggtgtttgaagctgtgatctcatggatcaattatgagaaagaaacccgtttagagcacatggcaaagctgatggaacatgtccgacttcctctcttacctagggactacctagtccaaacggttgaagaagaagctttgataaagaataacaacacctgtaaagacttcctcattgaggccatgaaataccatctcctccctctggatcagagactattgattaagaacccaaggaccaagcccaggactccagtcagccttcccaaggtcatgattgtggttggcggccaggcacccaaggcaatccgcagtgtggagtgctatgatttcgaggaggaccggtgggatcagattgctgagcttccttccagaagatgcagagcaggtgtggtgttcatggctggccacgtgtatgccgtgggagggtttaatggctcactgcgggtgcggacagtggatgtgtatgacggcgtgaaggaccagtggacgtccattgccagcatgcaggagcgccggagcacactgggcgcagcggtgctcaatgacttgctctacgcagtgggaggctttgatggcagtactggcctagcatcggtggaagcctacagctacaagaccaacgagtggttctttgtggccccgatgaacacgcggcggagcagtgtgggtgtgggcgttgtggaggggaagctatatgctgttgggggttatgatggagcttcccgccagtgtctgagcactgtggagcagtacaacccagcgaccaatgaatggatatacgtggcggacatgagcacccgccgcagtggcgcaggggttggagtgcttagcggacagctgtacgccacaggtgggcatgatgggcctttggtgaggaagagcgttgaggtttacgatcctggaacaaatacctggaagcaagtggcagacatgaacatgtgccggcgcaacgcaggggtctgtgcagtaaatgggctcctgtatgtggttggaggggatgatggatcctgcaacttggcttcggtggagtactacaatcctgtcactgacaaatggacgctgcttccaacgaacatgagcacggggcggagctatgcaggtgttgccgtgattcacaagtccttgtgacccaaactcctactgccaggaggtggaggaaggagcaggtgctgcctgtgactctgaacagcaggaccttggtgactggattcaacttgcttgggagggtctgtgctgctgtgagaaccgctctcctctgacttggcagactggtgttgttcatcgcagtgtggacaccattacccacccccgttcccctgaggtgctctggcctatgccctgagcaaggggggtcttgacatccccaggcagcacctttgggctttgttttggtgtttctacagggacaatacagaccctggagtgtgtgtgtgtgtgtgtgtgtgtgtagaccatggtgtttctctatgtttctctaagttggggggtgagcgtgtgtgacagtctactggatttctttactactgatcctttcgctgtgttaaaaatcaagtcacagagacctctcttctggatttgtcccatggggaccctgagactactaaagctgctttcttctgaaggtccagttggacagtctgggaatgtccagaaataaccagtgagaggggcagttctctggccacacccacttatgtactttaactactgtgactttgtctgcagaagagctggaaaattctcgaagctgcaccgtgtcctctgtgtgctagaataagggacaaatgggttccctgtgcttctcagctcactgtttttccttgagttctcctacaggaagcagatgagaactgcccagtcttcaggtttaggccattggtctttgatgtcatagattccaggcctgggaggtgttatgtctcttcagctgggaaaactagctcttcagagaagcctcgggtaacactgaaaaacaaaacaaaacaaaacaaaaacaggaaaaaaacaaaaaaccaaagtggtaaggattcagttcctgcctataatggtctcagagagggtcctacttttaggttttcccaggacaggacagtccccatttatacttattatcccagtttaattattcacagcaccccattttactcagaagtgttctggtctggaggataaataagaggtcaccctcctccagacccaaagatagatttgtgcctgtgttggatggggtcgtgtgtgattcagatggacattggatggcttcaaaggaatataccactagagctggcccttggcactttgtgacagtggtcaagtctgtctaatgtccttgtcttctttttcttgtgctttccccctattccagggtgtgcaccctctccccaacccccaagaaccccactactgctttccctgtgaggtaggagatatcagtgggccttggatttgaggcttcctaagatgtgcttgcattttaaaaagggagcttggtgagagctttgctaattcacaggtaaaaattattaacaatagaacttcaagcatcttgaggagcgggcatttgagggggcatggagtaatttgtatttaaaaaaccttaaagttgtgctgttcctaaactagcaaattgctcatgctgaaatttctggcataagcaggggaagtcttgtgtctggagaatagtctcataccttgcagtctgggacaccctccctactttgagaatccacctacaggaagccaaggaactttataaatcctgatgttggacttctgatacgactgggctacttccaagcaggtgctgcaggagattggcatcccccagcccctgcagttagaaaccccgaagtcttcccagccagtgagccactttgtgtatttactgtatatttattgtgccctaaatgtgcaactctcctaaagacaaaacttctctttctgatgttaagcacatgttacttcaacaagatgcttggagaacaacaaggtacccagaatttttagaagccttcagaagaggctaaaatatccagctttgggggacctggaagaaatgtctccaaaggaagcaaggcatgttttagttgagtgctctggtctcactatgaagtggggatgactgtggcttcataactctacctggctgtgggttggaagctgatggaatgagaaatgtcctttctccttctctgaggaaattttgagacttgtttcggtgtgtctgtgtgatggggatgaggctggggttgggatctgatgtatgccattcacagaagctctcaatttcagatgataggtgaattccctgcccctcccccaccactgagaagctagactttcatgcgggagaggctacttttatgtgtcgtcttccggggaagggtccctccactgaaagctagccagtcatgttttctgtttttggatttttgcaattggtttcacctcatgtctccctccctacaaagcactgcctctactgggcgtgctgccaaggccatgtgcactccatcctcatgtatcctttttcacggggaccagaacactggtacgtcatcaccaaagccaatctgctctagctgcccacagatgccaccaaaacctgctatctcttcatcaccaggtacgattctctttccacagtggacacagcaggctattttctagtttgtgctggtcacgtggtagatgaagcctcttactgccccacttagggtggccacggctgcttgtgaatgcagctttgccagtggcatatctgtcatctgattgcggtggtgaaatggaattgaggcccaaggttagaagcagccgagacgccacttggatactgatttgaacaatgtagaagtcagattctgaattccaaagttatttctcataagtacccaatggcatctctccatctacaaagttgcagtattatgcaaataaaactgacctcattttctgctatgcaataagaatacttaattctagttcccgacaagccagttgcaatatcccctaagatgctttttgagctgtcttactttgatatctgttgtgtaatgtttgtatatttctgagccagatcctttcaaagattgcctttttataaaattgaagctatagcttttaggctaaaattttaacgtagatatttttataagatatttttttcaagagtttgaatcgctttttattgtccatgataatgaaatgttgtgttctttgcatcattcactctcaaacgtagttcatgcctgtagctctcttccttttgtttctcacccttcagaaacatatttttcagtagctccaggtagatgagccttttttttttttttaaaaataccatattcaagggagtctgctgaattttaaaacgcagtcactggtgtttcttgaattgctagggactgatgttatgttcgactcagcacttgcccgtctgtattgattgtgtctttttttttttttttggagtctgctttctgtgggggtgaggccgggctgtctcgtggtggctcccactgacgggcactgagcctggtaccctgtggcatggagaagcctcagggaaaggcctgcccccccagcacatactcccatagtgtcctaggtccagccgaccattccttattctcttctatctccttgttgatctgaagcttccaatagcttgaggcctttgctgctggatgatgccctttttgggagcatcttgtctctaacctttaaaagaggggtcaatcctcatgatccctgtgtgttaagcatatgctttgcaggtgctcacactacacttacaacttgcttcttgagctatgtctctactccaggctctgttttgtgtatttatctgccatttgcatcatggtttttaaaatttattattattattattattgttgggacaggtgccatttaaattgcctccatgctccccatttgcacctagctggatcaagttgggaggctgagcaaactcatattccagttagttggagtttttaaaggctctgtttgcctggagaagcaaggaggttagaatgtaatttttttaagcgtttgcactatttagagtcctaagcccctcatgttcagctgtgctgtgtttctactgaccaagcaggagagccagcagcacttccagcatttgggaatggaagagatttcttctgtagtggataattacagcctcatagcccctgtgcagccttcgtcatgggactcagtgactcatggatatagcatcagccatggcaggaatgcacaggactgtggcatttgcagcatcaaatcaccctagtgccatgtttggttatgagattgtaaattattcgctcccccatcctcccctcccctcattttcagtggcaatagaggacccttgttgtacttcttgtttaatttgcatattatgtgtaaaatgctttcgttgaaagaaaactgaagacactgaatgtgtatgtctgtgtgggtgctctgtccctgtggttgtcatagccagtcagacttgatcactgacaccccgtacaacatattgcataggtaagatcctcgatctggtgttctctgcgtggctgttagggactgtatatcttgtaaaagaacacttgtcacatgcttgatcagttacagcaatagctgaagaaacatttcctcaaatgtattattttaacaggaatcatgttctaatttcccatcctttaattttaataaaagctgaactgtgtgaacttttctcagtatttcatttctatagtccagtctctctgctatgtctcaaacatgaaaaggacagacttattcctgtatgtctttggattaaaaaaaattttaagatct

SEQ ID NO: 11847 - protein, 505 aa, Homo sapiens
MSESKAKKIEIKDVDGQTLSKLIDYIYTAEIEVTEENVQVLLPAASLLQLMDVRQNCCDFLQSQLHPTNCLGIRAFADVHTCTDLLQQANAYAEQHFPEVMLGEEFLSLSLDQVCSLISSDKLTVSSEEKVFEAVISWINYEKETRLEHMAKLMEHVRLPLLPRDYLVQTVEEEALIKNNNTCKDFLIEAMKYHLLPLDQRLLIKNPRTKPRTPVSLPKVMIVVGGQAPKAIRSVECYDFEEDRWDQIAELPSRRCRAGVVFMAGHVYAVGGFNGSLRVRTVDVYDGVKDQWTSIASMQERRSTLGAAVLNDLLYAVGGFDGSTGLASVEAYSYKTNEWFFVAPMNTRRSSVGVGVVEGKLYAVGGYDGASRQCLSTVEQYNPATNEWIYVADMSTRRSGAGVGVLSGQLYATGGHDGPLVRKSVEVYDPGTNTWKQVADMNMCRRNAGVCAVNGLLYVVGGDDGSCNLASVEYYNPVTDKWTLLPTNMSTGRSYAGVAVIHKSL

SEQ ID NO: 11848 - DNA, 7090 bp, Homo sapiens
ctcttgtgctctcctctagttttactgaactgccagtactttgaacacactttgtgctttttctcctccaggtctttgtgcatactgtttcctctgcctggaatactcttctttctctttacctgactcgtttctgctcttacttcaagtctcagattctaggaagctttccatcaacctgctatcactgggacgagttggccatcccctgtgcttctgtagctcctatgaaatcataatagttgaaatgtgatgtttaaatgtttacttggcattctcctctactgaactctaagctttgtgagggtagtgatggtggctttgcctattgttttgtttcccttaaatctaaacgcagtgcctggcacatagtagcctccagtaaatgcttgtttaatgaacaaacaaacctgtgaagtgagtgatagagtgcttagtccccttcagttttcaggatggagagatggagaataaggacctcacacaaaatcacacagtacttggtggaagaagctgagctatgacctgccttccttcagaggaatgcactttgctttggaagatatgaagaaattcccagtacattgtctttcctattgggtctgtgtgagaacaggctgatagatgcctctgtgtcaagctgagctcccagactctgatacaggctggggatgatgagaagaaccagaggacgatcactgtcaaccctgcccacatggggaaagcattcaaggttatgaatgaactgcggagtaaacagctgttgtgtgacgtgatgattgtggcagaagatgtcgagatagaagcccaccgtgtggtcctggcagcctgcagcccctacttctgtgcgatgttcacaggtgacatgtctgagagtaaagccaaaaagatagaaatcaaggacgtggatgggcagacgctgagtaagctgattgactacatctatactgctgaaatcgaggtgactgaagagaatgtccaggtgctgctcccggcagccagcttgctgcagctcatggatgttcggcagaactgctgtgacttcctgcagtctcagttgcatcccaccaattgcctgggcatccgtgcatttgcagatgtacacacctgcactgaccttctgcagcaggccaatgcctacgcagagcagcactttccagaggtgatgctaggagaagaatttcttagcctgagtctggaccaggtgtgcagcttgatatccagcgacaagctgaccgtttcttcagaagagaaggtgtttgaagctgtgatctcatggatcaattatgagaaagaaacccgtttagagcacatggcaaagctgatggaacatgtccgacttcctctcttacctagggactacctagtccaaacggttgaagaagaagctttgataaagaataacaacacctgtaaagacttcctcattgaggccatgaaataccatctcctccctctggatcagagactattgattaagaacccaaggaccaagcccaggactccagtcagccttcccaaggtcatgattgtggttggcggccaggcacccaaggcaatccgcagtgtggagtgctatgatttcgaggaggaccggtgggatcagattgctgagcttccttccagaagatgcagagcaggtgtggtgttcatggctggccacgtgtatgccgtgggagggtttaatggctcactgcgggtgcggacagtggatgtgtatgacggcgtgaaggaccagtggacgtccattgccagcatgcaggagcgccggagcacactgggcgcagcggtgctcaatgacttgctctacgcagtgggaggctttgatggcagtactggcctagcatcggtggaagcctacagctacaagaccaacgagtggttctttgtggccccgatgaacacgcggcggagcagtgtgggtgtgggcgttgtggaggggaagctatatgctgttgggggttatgatggagcttcccgccagtgtctgagcactgtggagcagtacaacccagcgaccaatgaatggatatacgtggcggacatgagcacccgccgcagtggcgcaggggttggagtgcttagcggacagctgtacgccacaggtgggcatgatgggcctttggtgaggaagagcgttgaggtttacgatcctggaacaaatacctggaagcaagtggcagacatgaacatgtgccggcgcaacgcaggggtctgtgcagtaaatgggctcctgtatgtggttggaggggatgatggatcctgcaacttggcttcggtggagtactacaatcctgtcactgacaaatggacgctgcttccaacgaacatgagcacggggcggagctatgcaggtgttgccgtgattcacaagtccttgtgacccaaactcctactgccaggaggtggaggaaggagcaggtgctgcctgtgactctgaacagcaggaccttggtgactggattcaacttgcttgggagggtctgtgctgctgtgagaaccgctctcctctgacttggcagactggtgttgttcatcgcagtgtggacaccattacccacccccgttcccctgaggtgctctggcctatgccctgagcaaggggggtcttgacatccccaggcagcacctttgggctttgttttggtgtttctacagggacaatacagaccctggagtgtgtgtgtgtgtgtgtgtgtgtgtagaccatggtgtttctctatgtttctctaagttggggggtgagcgtgtgtgacagtctactggatttctttactactgatcctttcgctgtgttaaaaatcaagtcacagagacctctcttctggatttgtcccatggggaccctgagactactaaagctgctttcttctgaaggtccagttggacagtctgggaatgtccagaaataaccagtgagaggggcagttctctggccacacccacttatgtactttaactactgtgactttgtctgcagaagagctggaaaattctcgaagctgcaccgtgtcctctgtgtgctagaataagggacaaatgggttccctgtgcttctcagctcactgtttttccttgagttctcctacaggaagcagatgagaactgcccagtcttcaggtttaggccattggtctttgatgtcatagattccaggcctgggaggtgttatgtctcttcagctgggaaaactagctcttcagagaagcctcgggtaacactgaaaaacaaaacaaaacaaaacaaaaacaggaaaaaaacaaaaaaccaaagtggtaaggattcagttcctgcctataatggtctcagagagggtcctacttttaggttttcccaggacaggacagtccccatttatacttattatcccagtttaattattcacagcaccccattttactcagaagtgttctggtctggaggataaataagaggtcaccctcctccagacccaaagatagatttgtgcctgtgttggatggggtcgtgtgtgattcagatggacattggatggcttcaaaggaatataccactagagctggcccttggcactttgtgacagtggtcaagtctgtctaatgtccttgtcttctttttcttgtgctttccccctattccagggtgtgcaccctctccccaacccccaagaaccccactactgctttccctgtgaggtaggagatatcagtgggccttggatttgaggcttcctaagatgtgcttgcattttaaaaagggagcttggtgagagctttgctaattcacaggtaaaaattattaacaatagaacttcaagcatcttgaggagcgggcatttgagggggcatggagtaatttgtatttaaaaaaccttaaagttgtgctgttcctaaactagcaaattgctcatgctgaaatttctggcataagcaggggaagtcttgtgtctggagaatagtctcataccttgcagtctgggacaccctccctactttgagaatccacctacaggaagccaaggaactttataaatcctgatgttggacttctgatacgactgggctacttccaagcaggtgctgcaggagattggcatcccccagcccctgcagttagaaaccccgaagtcttcccagccagtgagccactttgtgtatttactgtatatttattgtgccctaaatgtgcaactctcctaaagacaaaacttctctttctgatgttaagcacatgttacttcaacaagatgcttggagaacaacaaggtacccagaatttttagaagccttcagaagaggctaaaatatccagctttgggggacctggaagaaatgtctccaaaggaagcaaggcatgttttagttgagtgctctggtctcactatgaagtggggatgactgtggcttcataactctacctggctgtgggttggaagctgatggaatgagaaatgtcctttctccttctctgaggaaattttgagacttgtttcggtgtgtctgtgtgatggggatgaggctggggttgggatctgatgtatgccattcacagaagctctcaatttcagatgataggtgaattccctgcccctcccccaccactgagaagctagactttcatgcgggagaggctacttttatgtgtcgtcttccggggaagggtccctccactgaaagctagccagtcatgttttctgtttttggatttttgcaattggtttcacctcatgtctccctccctacaaagcactgcctctactgggcgtgctgccaaggccatgtgcactccatcctcatgtatcctttttcacggggaccagaacactggtacgtcatcaccaaagccaatctgctctagctgcccacagatgccaccaaaacctgctatctcttcatcaccaggtacgattctctttccacagtggacacagcaggctattttctagtttgtgctggtcacgtggtagatgaagcctcttactgccccacttagggtggccacggctgcttgtgaatgcagctttgccagtggcatatctgtcatctgattgcggtggtgaaatggaattgaggcccaaggttagaagcagccgagacgccacttggatactgatttgaacaatgtagaagtcagattctgaattccaaagttatttctcataagtacccaatggcatctctccatctacaaagttgcagtattatgcaaataaaactgacctcattttctgctatgcaataagaatacttaattctagttcccgacaagccagttgcaatatcccctaagatgctttttgagctgtcttactttgatatctgttgtgtaatgtttgtatatttctgagccagatcctttcaaagattgcctttttataaaattgaagctatagcttttaggctaaaattttaacgtagatatttttataagatatttttttcaagagtttgaatcgctttttattgtccatgataatgaaatgttgtgttctttgcatcattcactctcaaacgtagttcatgcctgtagctctcttccttttgtttctcacccttcagaaacatatttttcagtagctccaggtagatgagccttttttttttttttaaaaataccatattcaagggagtctgctgaattttaaaacgcagtcactggtgtttcttgaattgctagggactgatgttatgttcgactcagcacttgcccgtctgtattgattgtgtctttttttttttttttggagtctgctttctgtgggggtgaggccgggctgtctcgtggtggctcccactgacgggcactgagcctggtaccctgtggcatggagaagcctcagggaaaggcctgcccccccagcacatactcccatagtgtcctaggtccagccgaccattccttattctcttctatctccttgttgatctgaagcttccaatagcttgaggcctttgctgctggatgatgccctttttgggagcatcttgtctctaacctttaaaagaggggtcaatcctcatgatccctgtgtgttaagcatatgctttgcaggtgctcacactacacttacaacttgcttcttgagctatgtctctactccaggctctgttttgtgtatttatctgccatttgcatcatggtttttaaaatttattattattattattattgttgggacaggtgccatttaaattgcctccatgctccccatttgcacctagctggatcaagttgggaggctgagcaaactcatattccagttagttggagtttttaaaggctctgtttgcctggagaagcaaggaggttagaatgtaatttttttaagcgtttgcactatttagagtcctaagcccctcatgttcagctgtgctgtgtttctactgaccaagcaggagagccagcagcacttccagcatttgggaatggaagagatttcttctgtagtggataattacagcctcatagcccctgtgcagccttcgtcatgggactcagtgactcatggatatagcatcagccatggcaggaatgcacaggactgtggcatttgcagcatcaaatcaccctagtgccatgtttggttatgagattgtaaattattcgctcccccatcctcccctcccctcattttcagtggcaatagaggacccttgttgtacttcttgtttaatttgcatattatgtgtaaaatgctttcgttgaaagaaaactgaagacactgaatgtgtatgtctgtgtgggtgctctgtccctgtggttgtcatagccagtcagacttgatcactgacaccccgtacaacatattgcataggtaagatcctcgatctggtgttctctgcgtggctgttagggactgtatatcttgtaaaagaacacttgtcacatgcttgatcagttacagcaatagctgaagaaacatttcctcaaatgtattattttaacaggaatcatgttctaatttcccatcctttaattttaataaaagctgaactgtgtgaacttttctcagtatttcatttctatagtccagtctctctgctatgtctcaaacatgaaaaggacagacttattcctgtatgtctttggattaaaaaaaattttaagatct

SEQ ID NO: 11849 - protein, 555 aa, Homo sapiens
MGKAFKVMNELRSKQLLCDVMIVAEDVEIEAHRVVLAACSPYFCAMFTGDMSESKAKKIEIKDVDGQTLSKLIDYIYTAEIEVTEENVQVLLPAASLLQLMDVRQNCCDFLQSQLHPTNCLGIRAFADVHTCTDLLQQANAYAEQHFPEVMLGEEFLSLSLDQVCSLISSDKLTVSSEEKVFEAVISWINYEKETRLEHMAKLMEHVRLPLLPRDYLVQTVEEEALIKNNNTCKDFLIEAMKYHLLPLDQRLLIKNPRTKPRTPVSLPKVMIVVGGQAPKAIRSVECYDFEEDRWDQIAELPSRRCRAGVVFMAGHVYAVGGFNGSLRVRTVDVYDGVKDQWTSIASMQERRSTLGAAVLNDLLYAVGGFDGSTGLASVEAYSYKTNEWFFVAPMNTRRSSVGVGVVEGKLYAVGGYDGASRQCLSTVEQYNPATNEWIYVADMSTRRSGAGVGVLSGQLYATGGHDGPLVRKSVEVYDPGTNTWKQVADMNMCRRNAGVCAVNGLLYVVGGDDGSCNLASVEYYNPVTDKWTLLPTNMSTGRSYAGVAVIHKSL

SEQ ID NO: 11850 - DNA, 6915 bp, Homo sapiens
gattctttgcagcctagacagaggaggcaggagccccaggggcgggctaatcgcctgggctggggatgcctgggcagatgcagaggaagctggaaaggtggcagtgcacctgggtcgctggagctgccgccgttcctaggagaccaaggagcagcaagcctgcgggggagggggagcaagtgggttgctgcttttagcagctgaaagggctgcagggagctctgggtaagacattttctgttgctgctgcttttgcggtagaagctgctgcgagtaagtcagaggaaggaggattgagaagggaggaggcttcacttgcagccatgctgaatcactgttgctgatcagatttcccactggtctgctgggagaatcaagaacagaactaggatccccgagtgcatacacagttcagcagctaccaccctggctgggcctcacacaatggagggtgaaagtgtcaagctgagctcccagactctgatacaggctggggatgatgagaagaaccagaggacgatcactgtcaaccctgcccacatggggaaagcattcaaggttatgaatgaactgcggagtaaacagctgttgtgtgacgtgatgattgtggcagaagatgtcgagatagaagcccaccgtgtggtcctggcagcctgcagcccctacttctgtgcgatgttcacaggtgacatgtctgagagtaaagccaaaaagatagaaatcaaggacgtggatgggcagacgctgagtaagctgattgactacatctatactgctgaaatcgaggtgactgaagagaatgtccaggtgctgctcccggcagccagcttgctgcagctcatggatgttcggcagaactgctgtgacttcctgcagtctcagttgcatcccaccaattgcctgggcatccgtgcatttgcagatgtacacacctgcactgaccttctgcagcaggccaatgcctacgcagagcagcactttccagaggtgatgctaggagaagaatttcttagcctgagtctggaccaggtgtgcagcttgatatccagcgacaagctgaccgtttcttcagaagagaaggtgtttgaagctgtgatctcatggatcaattatgagaaagaaacccgtttagagcacatggcaaagctgatggaacatgtccgacttcctctcttacctagggactacctagtccaaacggttgaagaagaagctttgataaagaataacaacacctgtaaagacttcctcattgaggccatgaaataccatctcctccctctggatcagagactattgattaagaacccaaggaccaagcccaggactccagtcagccttcccaaggtcatgattgtggttggcggccaggcacccaaggcaatccgcagtgtggagtgctatgatttcgaggaggaccggtgggatcagattgctgagcttccttccagaagatgcagagcaggtgtggtgttcatggctggccacgtgtatgccgtgggagggtttaatggctcactgcgggtgcggacagtggatgtgtatgacggcgtgaaggaccagtggacgtccattgccagcatgcaggagcgccggagcacactgggcgcagcggtgctcaatgacttgctctacgcagtgggaggctttgatggcagtactggcctagcatcggtggaagcctacagctacaagaccaacgagtggttctttgtggccccgatgaacacgcggcggagcagtgtgggtgtgggcgttgtggaggggaagctatatgctgttgggggttatgatggagcttcccgccagtgtctgagcactgtggagcagtacaacccagcgaccaatgaatggatatacgtggcggacatgagcacccgccgcagtggcgcaggggttggagtgcttagcggacagctgtacgccacaggtgggcatgatgggcctttggtgaggaagagcgttgaggtttacgatcctggaacaaatacctggaagcaagtggcagacatgaacatgtgccggcgcaacgcaggggtctgtgcagtaaatgggctcctgtatgtggttggaggggatgatggatcctgcaacttggcttcggtggagtactacaatcctgtcactgacaaatggacgctgcttccaacgaacatgagcacggggcggagctatgcaggtgttgccgtgattcacaagtccttgtgacccaaactcctactgccaggaggtggaggaaggagcaggtgctgcctgtgactctgaacagcaggaccttggtgactggattcaacttgcttgggagggtctgtgctgctgtgagaaccgctctcctctgacttggcagactggtgttgttcatcgcagtgtggacaccattacccacccccgttcccctgaggtgctctggcctatgccctgagcaaggggggtcttgacatccccaggcagcacctttgggctttgttttggtgtttctacagggacaatacagaccctggagtgtgtgtgtgtgtgtgtgtgtgtgtagaccatggtgtttctctatgtttctctaagttggggggtgagcgtgtgtgacagtctactggatttctttactactgatcctttcgctgtgttaaaaatcaagtcacagagacctctcttctggatttgtcccatggggaccctgagactactaaagctgctttcttctgaaggtccagttggacagtctgggaatgtccagaaataaccagtgagaggggcagttctctggccacacccacttatgtactttaactactgtgactttgtctgcagaagagctggaaaattctcgaagctgcaccgtgtcctctgtgtgctagaataagggacaaatgggttccctgtgcttctcagctcactgtttttccttgagttctcctacaggaagcagatgagaactgcccagtcttcaggtttaggccattggtctttgatgtcatagattccaggcctgggaggtgttatgtctcttcagctgggaaaactagctcttcagagaagcctcgggtaacactgaaaaacaaaacaaaacaaaacaaaaacaggaaaaaaacaaaaaaccaaagtggtaaggattcagttcctgcctataatggtctcagagagggtcctacttttaggttttcccaggacaggacagtccccatttatacttattatcccagtttaattattcacagcaccccattttactcagaagtgttctggtctggaggataaataagaggtcaccctcctccagacccaaagatagatttgtgcctgtgttggatggggtcgtgtgtgattcagatggacattggatggcttcaaaggaatataccactagagctggcccttggcactttgtgacagtggtcaagtctgtctaatgtccttgtcttctttttcttgtgctttccccctattccagggtgtgcaccctctccccaacccccaagaaccccactactgctttccctgtgaggtaggagatatcagtgggccttggatttgaggcttcctaagatgtgcttgcattttaaaaagggagcttggtgagagctttgctaattcacaggtaaaaattattaacaatagaacttcaagcatcttgaggagcgggcatttgagggggcatggagtaatttgtatttaaaaaaccttaaagttgtgctgttcctaaactagcaaattgctcatgctgaaatttctggcataagcaggggaagtcttgtgtctggagaatagtctcataccttgcagtctgggacaccctccctactttgagaatccacctacaggaagccaaggaactttataaatcctgatgttggacttctgatacgactgggctacttccaagcaggtgctgcaggagattggcatcccccagcccctgcagttagaaaccccgaagtcttcccagccagtgagccactttgtgtatttactgtatatttattgtgccctaaatgtgcaactctcctaaagacaaaacttctctttctgatgttaagcacatgttacttcaacaagatgcttggagaacaacaaggtacccagaatttttagaagccttcagaagaggctaaaatatccagctttgggggacctggaagaaatgtctccaaaggaagcaaggcatgttttagttgagtgctctggtctcactatgaagtggggatgactgtggcttcataactctacctggctgtgggttggaagctgatggaatgagaaatgtcctttctccttctctgaggaaattttgagacttgtttcggtgtgtctgtgtgatggggatgaggctggggttgggatctgatgtatgccattcacagaagctctcaatttcagatgataggtgaattccctgcccctcccccaccactgagaagctagactttcatgcgggagaggctacttttatgtgtcgtcttccggggaagggtccctccactgaaagctagccagtcatgttttctgtttttggatttttgcaattggtttcacctcatgtctccctccctacaaagcactgcctctactgggcgtgctgccaaggccatgtgcactccatcctcatgtatcctttttcacggggaccagaacactggtacgtcatcaccaaagccaatctgctctagctgcccacagatgccaccaaaacctgctatctcttcatcaccaggtacgattctctttccacagtggacacagcaggctattttctagtttgtgctggtcacgtggtagatgaagcctcttactgccccacttagggtggccacggctgcttgtgaatgcagctttgccagtggcatatctgtcatctgattgcggtggtgaaatggaattgaggcccaaggttagaagcagccgagacgccacttggatactgatttgaacaatgtagaagtcagattctgaattccaaagttatttctcataagtacccaatggcatctctccatctacaaagttgcagtattatgcaaataaaactgacctcattttctgctatgcaataagaatacttaattctagttcccgacaagccagttgcaatatcccctaagatgctttttgagctgtcttactttgatatctgttgtgtaatgtttgtatatttctgagccagatcctttcaaagattgcctttttataaaattgaagctatagcttttaggctaaaattttaacgtagatatttttataagatatttttttcaagagtttgaatcgctttttattgtccatgataatgaaatgttgtgttctttgcatcattcactctcaaacgtagttcatgcctgtagctctcttccttttgtttctcacccttcagaaacatatttttcagtagctccaggtagatgagccttttttttttttttaaaaataccatattcaagggagtctgctgaattttaaaacgcagtcactggtgtttcttgaattgctagggactgatgttatgttcgactcagcacttgcccgtctgtattgattgtgtctttttttttttttttggagtctgctttctgtgggggtgaggccgggctgtctcgtggtggctcccactgacgggcactgagcctggtaccctgtggcatggagaagcctcagggaaaggcctgcccccccagcacatactcccatagtgtcctaggtccagccgaccattccttattctcttctatctccttgttgatctgaagcttccaatagcttgaggcctttgctgctggatgatgccctttttgggagcatcttgtctctaacctttaaaagaggggtcaatcctcatgatccctgtgtgttaagcatatgctttgcaggtgctcacactacacttacaacttgcttcttgagctatgtctctactccaggctctgttttgtgtatttatctgccatttgcatcatggtttttaaaatttattattattattattattgttgggacaggtgccatttaaattgcctccatgctccccatttgcacctagctggatcaagttgggaggctgagcaaactcatattccagttagttggagtttttaaaggctctgtttgcctggagaagcaaggaggttagaatgtaatttttttaagcgtttgcactatttagagtcctaagcccctcatgttcagctgtgctgtgtttctactgaccaagcaggagagccagcagcacttccagcatttgggaatggaagagatttcttctgtagtggataattacagcctcatagcccctgtgcagccttcgtcatgggactcagtgactcatggatatagcatcagccatggcaggaatgcacaggactgtggcatttgcagcatcaaatcaccctagtgccatgtttggttatgagattgtaaattattcgctcccccatcctcccctcccctcattttcagtggcaatagaggacccttgttgtacttcttgtttaatttgcatattatgtgtaaaatgctttcgttgaaagaaaactgaagacactgaatgtgtatgtctgtgtgggtgctctgtccctgtggttgtcatagccagtcagacttgatcactgacaccccgtacaacatattgcataggtaagatcctcgatctggtgttctctgcgtggctgttagggactgtatatcttgtaaaagaacacttgtcacatgcttgatcagttacagcaatagctgaagaaacatttcctcaaatgtattattttaacaggaatcatgttctaatttcccatcctttaattttaataaaagctgaactgtgtgaacttttctcagtatttcatttctatagtccagtctctctgctatgtctcaaacatgaaaaggacagacttattcctgtatgtctttggattaaaaaaaattttaagatct

SEQ ID NO: 11851 - protein, 587 aa, Homo sapiens
MEGESVKLSSQTLIQAGDDEKNQRTITVNPAHMGKAFKVMNELRSKQLLCDVMIVAEDVEIEAHRVVLAACSPYFCAMFTGDMSESKAKKIEIKDVDGQTLSKLIDYIYTAEIEVTEENVQVLLPAASLLQLMDVRQNCCDFLQSQLHPTNCLGIRAFADVHTCTDLLQQANAYAEQHFPEVMLGEEFLSLSLDQVCSLISSDKLTVSSEEKVFEAVISWINYEKETRLEHMAKLMEHVRLPLLPRDYLVQTVEEEALIKNNNTCKDFLIEAMKYHLLPLDQRLLIKNPRTKPRTPVSLPKVMIVVGGQAPKAIRSVECYDFEEDRWDQIAELPSRRCRAGVVFMAGHVYAVGGFNGSLRVRTVDVYDGVKDQWTSIASMQERRSTLGAAVLNDLLYAVGGFDGSTGLASVEAYSYKTNEWFFVAPMNTRRSSVGVGVVEGKLYAVGGYDGASRQCLSTVEQYNPATNEWIYVADMSTRRSGAGVGVLSGQLYATGGHDGPLVRKSVEVYDPGTNTWKQVADMNMCRRNAGVCAVNGLLYVVGGDDGSCNLASVEYYNPVTDKWTLLPTNMSTGRSYAGVAVIHKSL

SEQ ID NO: 11852 - DNA, 6804 bp, Homo sapiens
gattctttgcagcctagacagaggaggcaggagccccaggggcgggctaatcgcctgggctggggatgcctgggcagatgcagaggaagctggaaaggtggcagtgcacctgggtcgctggagctgccgccgttcctaggagaccaaggagcagcaagcctgcgggggagggggagcaagtgggttgctgcttttagcagctgaaagggctgcagggagctctgggtaagacattttctgttgctgctgcttttgcggtagaagctgctgcgagtaagtcagaggaaggaggattgagaagggaggaggcttcacttgcagccatgctgaatcactgttgctgatcagatttcccactggtctgctgggagaatcaagaacagaactaggatccccgagtgcatacacagttcagcagctaccaccctggctgggcctcacacaatggagggtgaaagtgtcaagctgagctcccagactctgatacaggctggggatgatgagaagaaccagaggacgatcactgtcaaccctgcccacatggggaaagcattcaaggttatgaatgaactgcggagtaaacagctgttgtgtgacgtgatgattgtggcagaagatgtcgagatagaagcccaccgtgtggtcctggcagcctgcagcccctacttctgtgcgatgttcacaggtgacatgtctgagagtaaagccaaaaagatagaaatcaaggacgtggatgggcagacgctgagtaagctgattgactacatctatactgctgaaatcgaggtgactgaagagaatgtccaggtgctgctcccggcagccagcttgctgcagctcatggatgttcggcagaactgctgtgacttcctgcagtctcagttgcatcccaccaattgcctgggcatccgtgcatttgcagatgtacacacctgcactgaccttctgcagcaggccaatgcctacgcagagcagcactttccagaggtgatgctaggagaagaatttcttagcctgagtctggaccaggtgtgcagcttgatatccagcgacaagctgaccgtttcttcagaagagaaggtgtttgaagctgtgatctcatggatcaattatgagaaagaaacccgtttagagcacatggcaaagctgatggaacatgtccgacttcctctcttacctagggactacctagtccaaacggttgaagaagaagctttgataaagaataacaacacctgtaaagacttcctcattgaggccatgaaataccatctcctccctctggatcagagactattgattaagaacccaaggaccaagcccaggactccagtcagccttcccaaggtcatgattgtggttggcggccaggcacccaaggcaatccgcagtgtggagtgctatgatttcgaggaggaccggtgggatcagattgctgagcttccttccagaagatgcagagcaggtgtggtgttcatggctggccacgtgtatgccgtgggagggtttaatggctcactgcgggtgcggacagtggatgtgtatgacggcgtgaaggaccagtggacgtccattgccagcatgcaggagcgccggagcacactgggcgcagcggtgctcaatgacttgctctacgcagtgggaggctttgatggcagtactggcctagcatcggtggaagcctacagctacaagaccaacgagtggttctttgtggccccgatgaacacgcggcggagcagtgtgggtgtgggcgttgtggaggggaagctatatgctgttgggggttatgatggagcttcccgccagtgtctgagcactgtggagcagtacaacccagcgaccaatgaatggatatacgtggcggacatgagcacccgccgcagtggcgcaggggttggagtgcttagcggacagctgtacgccacaggtgggcatgatgggcctttggtgaggaagagcgttgaggtttacgatcctggaacaaatacctggaagcaagtggcagacatgaacatgtgccggcgcaacgcaggggtctgtgcagtaaatgggctcctgtatgtggttggaggggatgatggatcctgcaacttggcttcggtggagtactacaatcctgtcactgacaaatggacgctgcttccaacgaacatgagcacggggcggagctatgcaggtgttgccgtgattcacaagtccttgtgacccaaactcctactgccaggaggtggaggaaggagcaggtgctgcctgtgactctgaacagcaggaccttggtgactggattcaacttgcttgggagggtctgtgctgctgtgagaaccgctctcctctgacttggcagactggtgttgttcatcgcagtgtggacaccattacccacccccgttcccctgaggtgctctggcctatgccctgagcaaggggggtcttgacatccccaggcagcacctttgggctttgttttggtgtttctacagggacaatacagaccctggagtgtgtgtgtgtgtgtgtgtgtgtgtagaccatggtgtttctctatgtttctctaagttggggggtgagcgtgtgtgacagtctactggatttctttactactgatcctttcgctgtgttaaaaatcaagtcacagagacctctcttctggatttgtcccatggggaccctgagactactaaagctgctttcttctgaaggtccagttggacagtctgggaatgtccagaaataaccagtgagaggggcagttctctggccacacccacttatgtactttaactactgtgactttgtctgcagaagagctggaaaattctcgaagctgcaccgtgtcctctgtgtgctagaataagggacaaatgggttccctgtgcttctcagctcactgtttttccttgagttctcctacaggaagcagatgagaactgcccagtcttcaggtttaggccattggtctttgatgtcatagattccaggcctgggaggtgttatgtctcttcagctgggaaaactagctcttcagagaagcctcgggtaacactgaaaaacaaaacaaaacaaaacaaaaacaggaaaaaaacaaaaaaccaaagtggtaaggattcagttcctgcctataatggtctcagagagggtcctacttttaggttttcccaggacaggacagtccccatttatacttattatcccagtttaattattcacagcaccccattttactcagaagtgttctggtctggaggataaataagaggtcaccctcctccagacccaaagatagatttgtgcctgtgttggatggggtcgtgtgtgattcagatggacattggatggcttcaaaggaatataccactagagctggcccttggcactttgtgacagtggtcaagtctgtctaatgtccttgtcttctttttcttgtgctttccccctattccagggtgtgcaccctctccccaacccccaagaaccccactactgctttccctgtgaggtaggagatatcagtgggccttggatttgaggcttcctaagatgtgcttgcattttaaaaagggagcttggtgagagctttgctaattcacaggtaaaaattattaacaatagaacttcaagcatcttgaggagcgggcatttgagggggcatggagtaatttgtatttaaaaaaccttaaagttgtgctgttcctaaactagcaaattgctcatgctgaaatttctggcataagcaggggaagtcttgtgtctggagaatagtctcataccttgcagtctgggacaccctccctactttgagaatccacctacaggaagccaaggaactttataaatcctgatgttggacttctgatacgactgggctacttccaagcaggtgctgcaggagattggcatcccccagcccctgcagttagaaaccccgaagtcttcccagccagtgagccactttgtgtatttactgtatatttattgtgccctaaatgtgcaactctcctaaagacaaaacttctctttctgatgttaagcacatgttacttcaacaagatgcttggagaacaacaaggtacccagaatttttagaagccttcagaagaggctaaaatatccagctttgggggacctggaagaaatgtctccaaaggaagcaaggcatgttttagttgagtgctctggtctcactatgaagtggggatgactgtggcttcataactctacctggctgtgggttggaagctgatggaatgagaaatgtcctttctccttctctgaggaaattttgagacttgtttcggtgtgtctgtgtgatggggatgaggctggggttgggatctgatgtatgccattcacagaagctctcaatttcagatgataggtgaattccctgcccctcccccaccactgagaagctagactttcatgcgggagaggctacttttatgtgtcgtcttccggggaagggtccctccactgaaagctagccagtcatgttttctgtttttggatttttgcaattggtttcacctcatgtctccctccctacaaagcactgcctctactgggcgtgctgccaaggccatgtgcactccatcctcatgtatcctttttcacggggaccagaacactggtacgtcatcaccaaagccaatctgctctagctgcccacagatgccaccaaaacctgctatctcttcatcaccaggtacgattctctttccacagtggacacagcaggctattttctagtttgtgctggtcacgtggtagatgaagcctcttactgccccacttagggtggccacggctgcttgtgaatgcagctttgccagtggcatatctgtcatctgattgcggtggtgaaatggaattgaggcccaaggttagaagcagccgagacgccacttggatactgatttgaacaatgtagaagtcagattctgaattccaaagttatttctcataagtacccaatggcatctctccatctacaaagttgcagtattatgcaaataaaactgacctcattttctgctatgcaataagaatacttaattctagttcccgacaagccagttgcaatatcccctaagatgctttttgagctgtcttactttgatatctgttgtgtaatgtttgtatatttctgagccagatcctttcaaagattgcctttttataaaattgaagctatagcttttaggctaaaattttaacgtagatatttttataagatatttttttcaagagtttgaatcgctttttattgtccatgataatgaaatgttgtgttctttgcatcattcactctcaaacgtagttcatgcctgtagctctcttccttttgtttctcacccttcagaaacatatttttcagtagctccaggtagatgagccttttttttttttttaaaaataccatattcaagggagtctgctgaattttaaaacgcagtcactggtgtttcttgaattgctagggactgatgttatgttcgactcagcacttgcccgtctgtattgattgtgtctttttttttttttttggagtctgctttctgtgggggtgaggccgggctgtctcgtggtggctcccactgacgggcactgagcctggtaccctgtggcatggagaagcctcagggaaaggcctgcccccccagcacatactcccatagtgtcctaggtccagccgaccattccttattctcttctatctccttgttgatctgaagcttccaatagcttgaggcctttgctgctggatgatgccctttttgggagcatcttgtctctaacctttaaaagaggggtcaatcctcatgatccctgtgtgttaagcatatgctttgcaggtgctcacactacacttacaacttgcttcttgagctatgtctctactccaggctctgttttgtgtatttatctgccatttgcatcatggtttttaaaatttattattattattattattgttgggacaggtgccatttaaattgcctccatgctccccatttgcacctagctggatcaagttgggaggctgagcaaactcatattccagttagttggagtttttaaaggctctgtttgcctggagaagcaaggaggttagaatgtaatttttttaagcgtttgcactatttagagtcctaagcccctcatgttcagctgtgctgtgtttctactgaccaagcaggagagccagcagcacttccagcatttgggaatggaagagatttcttctgtagtggataattacagcctcatagcccctgtgcagccttcgtcatgggactcagtgactcatggatatagcatcagccatggcaggaatgcacaggactgtggcatttgcagcatcaaatcaccctagtgccatgtttggttatgagattgtaaattattcgctcccccatcctcccctcccctcattttcagtggcaatagaggacccttgttgtacttcttgtttaatttgcatattatgtgtaaaatgctttcgttgaaagaaaactgaagacactgaatgtgtatgtctgtgtgggtgctctgtccctgtggttgtcatagccagtcagacttgatcactgacaccccgtacaacatattgcataggtaagatcctcgatctggtgttctctgcgtggctgttagggactgtatatcttgtaaaagaacacttgtcacatgcttgatcagttacagcaatagctgaagaaacatttcctcaaatgtattattttaacaggaatcatgttctaatttcccatcctttaattttaataaaagctgaactgtgtg

SEQ ID NO: 11853 - protein, 587 aa, Homo sapiens; identical to SEQ ID NO: 11851

SEQ ID NO: 11854 - DNA, 2772 bp, Homo sapiens
gagttgcctgagtgcctggaacgcagctcgcttcctcagcagggtgtgggcaatgccaccagatggttaggggaaaaaagaggccatctctcagggaatgcgtgttcctgctgagcatggaggaaaggaaggtgaggcagctttggaactcaacaaattttattaaacctgtcagttagagagagccattgttggtacaacagcaccatctgctgttagtttagagcaactgctaggagctactagcatacctgcataattgctgggagggattttattaatttatatttttgttattcaagcaatatctcttgagaacctactgctgtggagcacagggaagcagacgaggacaaggtaaaaacagtcctcatccatatggagttatagtctacaagtctggttcttgggtctgaaacctgactgcacatcccagtcacctgaggaactttctgcacatcccagtcacctgaggaactttttctgactcctgaccagtgtggaatctgtctttcaaaaagcttcccagtcgattgagatgcagcctgcccatggagtggagaagtctgtggtccatgtgaactactgatctagtacaactctttccctttacaaatagggaaactgaggcccagaaaggggaagggtcacccagtgagcaagtcagagagacaggtccagaacacaggtgtcctagctaccaggtcagttgcactttctagatactgtgctgtcttccttctttatggctttcatcttcttgttgtataaaaggattttaaaagattatactaaaacttgtaaacgaagcaattctagcactcagctcaggctgatcaacacggtgagtgatctgataatgccctctgcagtacaggaggagagaagtgggcagaaaggtcagcttctgcttacacgaccagcagggaggcctccctgatgataatttcagcacttttgctgtgtggctagtttcaatttttaactctttttactcaactaatataaggatgagtaagtaatacagcattgtaggaaaactaggcaatatagataggcaaaaaaggaaaatgaatgtaatttaccactcagaaataattattcttaatattttaatggatttatttcagtattttttgtctttttttctttgcttatgaacatcctctcccgtatgtatgtatgtatgtatgtatgtatgtatgtatgtatgtctgtctgtctgtgtgtgtgtatatatatatatatattttttaatgttttttaaaaacagaatttgggtcacatttgcattatatttcaaagttttgaggttgctagtcttatgaggaggcaggtagggtgtcattatatttgttttacagatgaggacactgaggtccagggagacaaaatggcactccccaagtcccctcactggtcagggctgtccaggactggatgccaggcctcctgatttctggttactgtagtcagcatgaggctgggatgctgtgctctgcctttcaggggttggagtgcttagcggacagctgtacgccacaggtgggcatgatgggcctttggtgaggaagagcgttgaggtttacgatcctggaacaaatacctggaagcaagtggcagacatgaacatgtgccggcgcaacgcaggggtctgtgcagtaaatgggctcctgtatgtggttggaggggatgatggatcctgcaacttggcttcggtggagtactacaatcctgtcactgacaaatggacgctgcttccaacgaacatgagcacggggcggagctatgcaggtgttgccgtgattcacaagtccttgtgacccaaactcctactgccaggaggtggaggaaggagcaggtgctgcctgtgactctgaacagcaggaccttggtgactggattcaacttgcttgggagggtctgtgctgctgtgagaaccgctctcctctgacttggcagactggtgttgttcatcgcagtgtggacaccattacccacccccgttcccctgaggtgctctggcctatgccctgagcaaggggggtcttgacatccccaggcagcacctttgggctttgttttggtgtttctacagggacaatacagaccctggagtgtgtgtgtgtgtgtgtgtgtgtgtagaccatggtgtttctctatgtttctctaagttggggggtgagcgtgtgtgacagtctactggatttctttactactgatcctttcgctgtgttaaaaatcaagtcacagagacctctcttctggatttgtcccatggggaccctgagactactaaagctgctttcttctgaaggtccagttggacagtctgggaatgtccagaaataaccagtgagaggggcagttctctggccacacccacttatgtactttaactactgtgactttgtctgcagaagagctggaaaattctcgaagctgcaccgtgtcctctgtgtgctagaataagggacaaatgggttccctgtgcttctcagctcactgtttttccttgagttctcctacaggaagcagatgagaactgcccagtcttcaggtttaggccattggtctttgatgtcatagattccaggcctgggaggtgttatgtctcttcagctgggaaaactagctcttcagagaagcctcgggtaacactgaaaaacaaaacaaaacaaaacaaaaacaggaaaaaaacaaaaaaccaaagtggtaaggattcagttcctgcctataatggtctcagagagggtcctacttttaggtttt

SEQ ID NO: 11855 - protein, 68 aa, Homo sapiens
MDAASNEHEHGAELCRCCRDSQVLVTQTPTARRWRKEQVLPVTLNSRTLVTGFNLLGRVCAAVRTALL

SEQ ID NO: 11856 - DNA, 1666 bp, Homo sapiens
gattctttgcagcctagacagaggaggcaggagccccaggggcgggctaatcgcctgggctggggatgcctgggcagatgcagaggaagctggaaaggtggcagtgcacctgggtcgctggagctgccgccgttcctaggagaccaaggagcagcaagcctgcgggggagggggagcaagtgggttgctgcttttagcagctgaaagggctgcagggagctctgggtaagacattttctgttgctgctgcttttgcggtagaagctgctgcgagtaagtcagaggaaggaggattgagaagggaggaggcttcacttgcagccatgctgaatcactgttgctgatcagatttcccactggtctgctgggagaatcaagaacagaactaggatccccgagtgcatacacagttcagcagctaccaccctggctgggcctcacacaatggagggtgaaagtgtcaagctgagctcccagactctgatacaggctggggatgatgagaagaaccagaggacgatcactgtcaaccctgcccacatggggaaagcattcaaggttatgaatgaactgcggagtaaacagctgttgtgtgacgtgatgattgtggcagaagatgtcgagatagaagcccaccgtgtggtcctggcagcctgcagcccctacttctgtgcgatgttcacaggtgacatgtctgagagtaaagccaaaaagatagaaatcaaggacgtggatgggcagacgctgagtaagctgattgactacatctatactgctgaaatcgaggtgactgaagagaatgtccaggtgctgctcccggcagccagcttgctgcagctcatggatgttcggcagaactgctgtgacttcctgcagtctcagttgcatcccaccaattgcctgggcatccgtgcatttgcagatgtacacacctgcactgaccttctgcagcaggccaatgcctacgcagagcagcactttccagaggtgatgctaggagaagaatttcttagcctgagtctggaccaggtgtgcagcttgatatccagcgacaagctgaccgtttcttcagaagagaaggtgtttgaagctgtgatctcatggatcaattatgagaaagaaacccgtttagagcacatggcaaagctgatggaacatgtccgacttcctctcttacctagggactacctagtccaaacggttgaagaagaagctttgataaagaataacaacacctgtaaagacttcctcattgaggccatgaaataccatctcctccctctggatcagagactattgattaagaacccaaggaccaagcccaggactccagtcagccttcccaagtagagacggggttttaccgtgttagccaggatggtctcaatctcctgacctcgtgatccgcctgcctcagcctcccaaagtgctgggattacagacgtgagccaccgcgcccggccactaattaattttttaattgacaaaagttatatgcatttatcatgtacaacatgaggttttgaaatatagatacattgtggaatggctaaatttagctaattaacatatgtattacatcatatacttatttttttgtggtaagaacacttaaaatccattctcttaactattttcaagaatataatacattgttattaactat

SEQ ID NO: 11857 - protein, 301 aa, Homo sapiens
MEGESVKLSSQTLIQAGDDEKNQRTITVNPAHMGKAFKVMNELRSKQLLCDVMIVAEDVEIEAHRVVLAACSPYFCAMFTGDMSESKAKKIEIKDVDGQTLSKLIDYIYTAEIEVTEENVQVLLPAASLLQLMDVRQNCCDFLQSQLHPTNCLGIRAFADVHTCTDLLQQANAYAEQHFPEVMLGEEFLSLSLDQVCSLISSDKLTVSSEEKVFEAVISWINYEKETRLEHMAKLMEHVRLPLLPRDYLVQTVEEEALIKNNNTCKDFLIEAMKYHLLPLDQRLLIKNPRTKPRTPVSLPK

SEQ ID NO: 11858 - DNA, 426 bp, Homo sapiens
caaaaagatagaaatcaaggacgtggatgggcagacgctgagtaagctgattgactacatctatactgctgaaatcgaggtgactgaagagaatgtccaggtgctgctcccggcagccagcttgctgcagctcatggatgttcggcagaactgctgtgacttcctgcagtctcagttgcatcccaccaattgcctgggcatccgtgcatttgcagatgtacacacctgcactgaccttctgcagcaggccaatgcctacgcagagcagcactttccagaggtgatgctaggagaagaatttcttagcctgagtctggaccaggtgtgcagcttgatatccagcgacaagctgaccgtttcttcagaagagaagatcttttcttttctttttttttgagatggagtcttgctctgtcggccaggctg

SEQ ID NO: 11859 - protein, 87 aa, Homo sapiens
MDVRQNCCDFLQSQLHPTNCLGIRAFADVHTCTDLLQQANAYAEQHFPEVMLGEEFLSLSLDQVCSLISSDKLTVSSEEKIFSFLFF

SEQ ID NO: 11860 - DNA, 735 bp, Homo sapiens
agctcgtggcacaaaatcctgatggactccacgaaagaatccgaaagtcatctgagttggctatctgcacgttctctctgtaccagtgaacttgaactgtggctgtggcctggattccgcattcaaacatgaccaactgacctctggttgtagggatgtcttgaagatgctgaagaacaaacacagagttcagaggatggaagaaactgttataccatctacaatgatttgaaatgccatttgcaactgcagttgaccgtgggttattgaaaccacagaaagtgaaactggataacgaagggaaacactatcccagcctcaacaaggagcttgatttgggcacagaaacaggagaaagagacctgccttgcctcccttatccaaccggaagatgcttcctcttctctcaatatattctcacttatgggtataaagtgtcaagctgagctcccagactctgatacaggctggggatgatgagaagaaccagaggacgatcactgtcaaccctgcccacatggggaaagcattcaaggttatgaatgaactgcggagtaaacagctgttgtgtgacgtgatgattgtggcagaagatgtcgagatagaagcccaccgtgtggtcctggcagcctgcagcccctacttctgtgcgatgttcacaggtaaaaaccagaaactgtgggcaagcaaaaagtaaaaaattacgtgtactacaacatctaggtaagagtatgg

SEQ ID NO: 11861 - protein, 70 aa, Homo sapiens
MPFATAVDRGLLKPQKVKLDNEGKHYPSLNKELDLGTETGERDLPCLPYPTGRCFLFSQYILTYGYKVSS

SEQ ID NO: 11862 - DNA, 638 bp, Homo sapiens
agacatgaagtcacttgtattggcagtagctgcagggtattatgcctgctgctcaaaagtggcaccaacagcagtaaacacatattagactggaaaattcttctctttttagctcgtggcacaaaatcctgatggactccacgaaagaatccgaaagtcatctgagttggctatctgcacgttctctctgtaccagtgaacttgaactgtggctgtggcctggattccgcattcaaacatgaccaactgacctctggttgtagggatgtcttgaagatgctgaagaacaaacacagagttcagaggatggaagaaactgttataccatctacaatgatttgaaatgccatttgcaactgcagttgaccgtgggttattgaaaccacagaaagtgaaactggataacgaatgtcaagctgagctcccagactctgatacaggctggggatgatgagaagaaccagaggacgatcactgtcaaccctgcccacatggggaaagcattcaaggttatgaatgaactgcggagtaaacagctgttgtgtgacgtgatgattgtggcagaagatgtcgagatagaagcccaccgtgtggtcctggcagcctgcagcccctacttctgtgcgatgttcacaggt

SEQ ID NO: 11863 - protein, 48 aa, Homo sapiens
MGKAFKVMNELRSKQLLCDVMIVAEDVEIEAHRVVLAACSPYFCAMFT

SEQ ID NO: 11864 - DNA, 3413 bp, Homo sapiens
cggactgcgtggtggtggtgaatccccagaccaagcgctcccgttgctttggcttcgtgacctactccaatgtggaggaggcggacgccgccatggccgcctcgccccatgccgtggacggcaacactgtggagctgaagcgggcggtgtcccgggaggattcggcgcggcccggtgcccacgccaaggttaagaagctctttgtcggaggccttaaaggagacgtggctgagggcgacctgatcgagcacttctcgcagtttggcaccgtggaaaaggccgagattattgccgacaagcagtccggcaagaagcgtggattcggcttcgtgtatttccagaatcacgacgcggcagacaaggccgcggtggtcaagttccatccgattcagggccatcgcgtggaggtgaagaaagcagtccccaaggaggatatctactccggtgggggtggaggcggctcccgatcctcccggggcggccgaggcggccgggggcgcggcggtggtcgagaccagaacggcctttccaagggcggcggcggcggttacaacagctacggtggttacggcggcggcggaggcggcggctacaatgcctacggaggcggcggcggcggttcgtcctacggtgggagcgactacggtaacggcttcggcggcttcggcagctacagccagcatcagtcctcctatgggcccatgaagagcggcggcggcggcggcggtggaggcagtagctggggcggtcgcagtaatagtggaccttacagaggcggctatggcggtgggggtggctatggaggcagctccttctaaaagaaaatttaaaatgcctgggagtggctataggggtagctctttccaacagcccaagtggggtcaactcctaagccccaccccctcacacaacatttttgtgttacagtcattgatggactctatttttttattattacttggaccttggtcgtttttatactagcaaaatgtcttgttttaatttgtgttttttggggggagggagggagtgaacttgctgattctgtagcaaaacctgggtgggggttggggtggggggtagtttactttgttgtaaggacttgataacctggctacagcgttttctatgaaatctacttggatcccatgcctgaaatttggaagcatatgtacaaaaatcatttttacgttttatttttaataaatcattgtgtttgaccgtacatgtctaacattttttttctaggatccattccgtaccgttttttaagggatatttgtttaagactttacgtgttaattctttattcttgatgtgtacttagagaaacttaagaggtcctgtggtttttttcccctctcctgttgccctgctagttgcgtgttgaattatatcccttacaggcaaaacttttgaagtggtggatgtggctttttaaactcttaagtttctgtgcatccatctcttgtactaagcgaattgtttatcatcttgacatggttggtcatttctatgacaatttacttcaaactgtgtactgtgtagttctatatagtttgtgttaagcatgtcattcatataaactgtttaaaatttttcagatggcctagtttcatccctcttactggtttgtctgtaatgaatggttaaaaataagggttatattttaccctcaaatgcgtttttgtactttcagagcaggtttaaacgttttttttttttttttcctatatccgaactgttggcctcatggaaatccctttcccgatctttgtagcaccatctactggcagaatggcagagtagctgcgaaacaatttgtttaaaaacttgcttaagacaattgcatcagatttggaagttttgccatcaaaattctttgcagaattggaagttaacacatttgcttgtaactgagatgggcttcacaggaatgtagttgccagttcatatcacaatagccctttctatatgaggtttgaaaatgtaaactgctatgcatagcttgggcaatagccctaaattgctatgacaactaatgaaccagctacgtatactggtattttaggtgcaagttgtaaagcaaaatatctgtgtattctgcttggttaacaaatgtatatttgtagccctttcctgcaatagcattcaagttgttgtttataagagaagaacaaaagtgataataggtgaaaattgcctttctggatagaaatagagaatagcaacgtttatggatatcacaaataaagaattcaattctttacatgattgagtgagagtatgtataacctggtgggtgggttcagagtaccttttaatctagtatgcttaacttgatgttaatatttaacttaaatatttgacttacatgttgacgttgaaggctcaaagctatactaagaagctttctgaaagattgggctttaaaataaaataatattttaatattgaaccattttttaacttcttgtcactgttcaattcctaaggtctagttcttgccagttttttttttttttttcctgattggcagggcttttaaagaagtaagaagaaaggttaagattattaggctaggttatagctgctcagtagtcattttgacaaagggtagcggatggttggtacaaatagtgttatatcctctatgacaaacggggtggatgtttttacacattgaggtaatacatagtcaaatcctttgctctcaaatagttgtacactttccatacatttctgtcttattttttaattctagtgatacacaaattacatgtgggctacttcatttggtaatttggtccagctttttggtggctgtagagtggcctctaggatacagaaaatgattctctgaaatttttcgttgtaattgttaaatactactctgcttgacttactcagttttggtgggaagatctgggtcaattggaatagtacacctttctcagggttttcagtttaataaggttgtcatattattcccaacatgggaatatagtggcttctaaagtttgcaaatgaattatgtaaaaggattttctgtgtattaggaaggcaacctgttctgttcatggtatattaacacttcattgtcatgtgtctacccttaaaattgctatttgtagtgaagaaaaaagcatagtggtatttagtcacttctgggttcctcttgtcagtttatatgcaaacattttggcatgtgggacttggggaggagggacaattggttgtatgttttgaccacttccacctatgaaaattatctgaacattattcagatttaagagttcatgggagcaggtggtacagaacctagtgttgaatataatttttgtgccatgcttgaatgtattttgacggattagcaaaataaaagtgaacctcctatttttcatcttaatgtg

SEQ ID NO: 11865 - protein, 67 aa, Homo sapiens [sequence omitted]

SEQ ID NO: 11866 - DNA, 3461 bp, Homo sapiens
ctttttcccttccccgtcggtgagcggcgggggtggctccagcaacggctgggcccaagctgtgtagaggccttaaccaacgataacggcggcgacggcgaaacctcggagctcgcagggcgggggcaaggcccgggccttggagatggagaattctcagttgtgtaagctgttcatcggcggcctcaatgtgcagacgagtgagtcgggcctgcgcggccactttgaggcctttgggactctgacggactgcgtggtggtggtgaatccccagaccaagcgctcccgttgctttggcttcgtgacctactccaatgtggaggaggcggacgccgccatggccgcctcgccccatgccgtggacggcaacactgtggagctgaagcgggcggtgtcccgggaggattcggcgcggcccggtgcccacgccaaggttaagaagctctttgtcggaggccttaaaggagacgtggctgagggcgacctgatcgagcacttctcgcagtttggcaccgtggaaaaggccgagattattgccgacaagcagtccggcaagaagcgtggattcggcttcgtgtatttccagaatcacgacgcggcagacaaggccgcggtggtcaagttccatccgattcagggccatcgcgtggaggtgaagaaagcagtccccaaggaggatatctactccggtgggggtggaggcggctcccgatcctcccggggcggccgaggcggccgggggcgcggcggtggtcgagaccagaacggcctttccaagggcggcggcggcggttacaacagctacggtggttacggcggcggcggaggcggcggctacaatgcctacggaggcggcggcggcggttcgtcctacggtgggagcgactacggtaacggcttcggcggcttcggcagctacagccagcatcagtcctcctatgggcccatgaagagcggcggcggcggcggcggtggaggcagtagctggggcggtcgcagtaatagtggaccttacagaggcggctatggcggtgggggtggctatggaggcagctccttctaaaagaaaatttaaaatgcctgggagtggctataggggtagctctttccaacagcccaagtggggggtagtttactttgttgtaaggacttgataacctggctacagcgttttctatgaaatctacttggatcccatgcctgaaatttggaagcatatgtacaaaaatcatttttacgttttatttttaataaatcattgtgtttgaccgtacatgtctaacattttttttctaggatccattccgtaccgttttttaagggatatttgtttaagactttacgtgttaattctttattcttgatgtgtacttagagaaacttaagaggtcctgtggtttttttcccctctcctgttgccctgctagttgcgtgttgaattatatcccttacaggcaaaacttttgaagtggtggatgtggctttttaaactcttaagtttctgtgcatccatctcttgtactaagcgaattgtttatcatcttgacatggttggtcatttctatgacaatttacttcaaactgtgtactgtgtagttctatatagtttgtgttaagcatgtcattcatataaactgtttaaaatttttcagatggcctagtttcatccctcttactggtttgtctgtaatgaatggttaaaaataagggttatattttaccctcaaatgcgtttttgtactttcagagcaggtttaaacgttttttttttttttttcctatatccgaactgttggcctcatggaaatccctttcccgatctttgtagcaccatctactggcagaatggcagagtagctgcgaaacaatttgtttaaaaacttgcttaagacaattgcatcagatttggaagttttgccatcaaaattctttgcagaattggaagttaacacatttgcttgtaactgagatgggcttcacaggaatgtagttgccagttcatatcacaatagccctttctatatgaggtttgaaaatgtaaactgctatgcatagcttgggcaatagccctaaattgctatgacaactaatgaaccagctacgtatactggtattttaggtgcaagttgtaaagcaaaatatctgtgtattctgcttggttaacaaatgtatatttgtagccctttcctgcaatagcattcaagttgttgtttataagagaagaacaaaagtgataataggtgaaaattgcctttctggatagaaatagagaatagcaacgtttatggatatcacaaataaagaattcaattctttacatgattgagtgagagtatgtataacctggtgggtgggttcagagtaccttttaatctagtatgcttaacttgatgttaatatttaacttaaatatttgacttacatgttgacgttgaaggctcaaagctatactaagaagctttctgaaagattgggctttaaaataaaataatattttaatattgaaccattttttaacttcttgtcactgttcaattcctaaggtctagttcttgccagttttttttttttttttcctgattggcagggcttttaaagaagtaagaagaaaggttaagattattaggctaggttatagctgctcagtagtcattttgacaaagggtagcggatggttggtacaaatagtgttatatcctctatgacaaacggggtggatgtttttacacattgaggtaatacatagtcaaatcctttgctctcaaatagttgtacactttccatacatttctgtcttattttttaattctagtgatacacaaattacatgtgggctacttcatttggtaatttggtccagctttttggtggctgtagagtggcctctaggatacagaaaatgattctctgaaatttttcgttgtaattgttaaatactactctgcttgacttactcagttttggtgggaagatctgggtcaattggaatagtacacctttctcagggttttcagtttaataaggttgtcatattattcccaacatgggaatatagtggcttctaaagtttgcaaatgaattatgtaaaaggattttctgtgtattaggaaggcaacctgttctgttcatggtatattaacacttcattgtcatgtgtctacccttaaaattgctatttgtagtgaagaaaaaagcatagtggtatttagtcacttctgggttcctcttgtcagtttatatgcaaacattttggcatgtgggacttggggaggagggacaattggttgtatgttttgaccacttccacctatgaaaattatctgaacattattcagatttaagagttcatgggagcaggtggtacagaacctagtgttgaatataatttttgtgccatgcttgaatgtattttgacggattagcaaaataaaagtgaacctcctatttttcatcttaatgtg

SEQ ID NO: 11867 - protein, 42 aa, Homo sapiens
MAVGVAMEAAPSKRKFKMPGSGYRGSSFQQPKWGVVYFVVRT

SEQ ID NO: 11868 - DNA, 2737 bp, Homo sapiens
ggtggcggcggcggcggtagcggtggccttggttgtcttccagtctcctcggctcgccctttagccggcaccgctccccttccctcccccttcctctcttccttccttccctccccttccctgttttgcccttgggggagccacttctaaggctgcttacccttgggggtgttcctctatttgcctgccacctctcttgtctctccctctgaagatggactcggccccacatacacatttttgtgttacagtcattgatggactctatttttttattattacttggaccttggtcgtttttatactagcaaaatgtcttgttttaatttgtgttttttggggggagggagggagtgaacttgctgattctgtagcaaaacctgggtgggggttggggtggggggtagtttactttgttgtaaggacttgataacctggctacagcgttttctatgaaatctacttggatcccatgcctgaaatttggaagcatatgtacaaaaatcatttttacgttttatttttaataaatcattgtgtttgaccgtacatgtctaacattttttttctaggatccattccgtaccgttttttaagggatatttgtttaagactttacgtgttaattctttattcttgatgtgtacttagagaaacttaagaggtcctgtggtttttttcccctctcctgttgccctgctagttgcgtgttgaattatatcccttacaggcaaaacttttgaagtggtggatgtggctttttaaactcttaagtttctgtgcatccatctcttgtactaagcgaattgtttatcatcttgacatggttggtcatttctatgacaatttacttcaaactgtgtactgtgtagttctatatagtttgtgttaagcatgtcattcatataaactgtttaaaatttttcagatggcctagtttcatccctcttactggtttgtctgtaatgaatggttaaaaataagggttatattttaccctcaaatgcgtttttgtactttcagagcaggtttaaacgttttttttttttttttcctatatccgaactgttggcctcatggaaatccctttcccgatctttgtagcaccatctactggcagaatggcagagtagctgcgaaacaatttgtttaaaaacttgcttaagacaattgcatcagatttggaagttttgccatcaaaattctttgcagaattggaagttaacacatttgcttgtaactgagatgggcttcacaggaatgtagttgccagttcatatcacaatagccctttctatatgaggtttgaaaatgtaaactgctatgcatagcttgggcaatagccctaaattgctatgacaactaatgaaccagctacgtatactggtattttaggtgcaagttgtaaagcaaaatatctgtgtattctgcttggttaacaaatgtatatttgtagccctttcctgcaatagcattcaagttgttgtttataagagaagaacaaaagtgataataggtgaaaattgcctttctggatagaaatagagaatagcaacgtttatggatatcacaaataaagaattcaattctttacatgattgagtgagagtatgtataacctggtgggtgggttcagagtaccttttaatctagtatgcttaacttgatgttaatatttaacttaaatatttgacttacatgttgacgttgaaggctcaaagctatactaagaagctttctgaaagattgggctttaaaataaaataatattttaatattgaaccattttttaacttcttgtcactgttcaattcctaaggtctagttcttgccagttttttttttttttttcctgattggcagggcttttaaagaagtaagaagaaaggttaagattattaggctaggttatagctgctcagtagtcattttgacaaagggtagcggatggttggtacaaatagtgttatatcctctatgacaaacggggtggatgtttttacacattgaggtaatacatagtcaaatcctttgctctcaaatagttgtacactttccatacatttctgtcttattttttaattctagtgatacacaaattacatgtgggctacttcatttggtaatttggtccagctttttggtggctgtagagtggcctctaggatacagaaaatgattctctgaaatttttcgttgtaattgttaaatactactctgcttgacttactcagttttggtgggaagatctgggtcaattggaatagtacacctttctcagggttttcagtttaataaggttgtcatattattcccaacatgggaatatagtggcttctaaagtttgcaaatgaattatgtaaaaggattttctgtgtattaggaaggcaacctgttctgttcatggtatattaacacttcattgtcatgtgtctacccttaaaattgctatttgtagtgaagaaaaaagcatagtggtatttagtcacttctgggttcctcttgtcagtttatatgcaaacattttggcatgtgggacttggggaggagggacaattggttgtatgttttgaccacttccacctatgaaaattatctgaacattattcagatttaagagttcatgggagcaggtggtacagaacctagtgttgaatataatttttgtgccatgcttgaatgtattttgacggattagcaaaataaaagtgaacctcctatttttcatcttaatgtg

SEQ ID NO: 11869 - protein, 71 aa, Homo sapiens [sequence omitted]

SEQ ID NO: 11870 - DNA, 3202 bp, Homo sapiens
tggtgcccagataggggagcggaggtggcggcggcggcggtagcggtggccttggttgtcttccagtctcctcggctcgccctttagccggcaccgctccccttccctcccccttcctctcttccttccttccctccccttccctttttcccttccccgtcggtgagcggcgggggtggctccagcaacggctgggcccaagctgtgtagaggccttaaccaacgataacggcggcgacggcgaaacctcggagctcgcagggcgggggcaaggcccgggccttggagatggagaattctcagttgtgtaagctgttcatcggcggcctcaatgtgcagacgagtgagtcgggcctgcgcggccactttgaggcctttgggactctgacggactgcgtggtggtggtgaatccccagaccaagcgctcccgttgctttggggctatggcggtgggggtggctatggaggcagctccttctaaaagaaaatttaaaatgcctgggagtggctataggggtagctctttccaacagcccaagtggggtcaactcctaagccccaccccctcacacacaccgccttccctgttttgcccttgggggagccacttctaaggctgcttacccttgggggtgttcctctatttgcctgccacctctcttgtctctccctctgaagatggactcggccccacatacacatttttgtgttacagtcattgatggactctatttttttattattacttggaccttggtcgtttttatactagcaaaatgtcttgttttaatttgtgttttttggggggagggagggagtgaacttgctgattctgtagcaaaacctgggtgggggttggggtggggggtagtttactttgttgtaaggacttgataacctggctacagcgttttctatgaaatctacttggatcccatgcctgaaatttggaagcatatgtacaaaaatcatttttacgttttatttttaataaatcattgtgtttgaccgtacatgtctaacattttttttctaggatccattccgtaccgttttttaagggatatttgtttaagactttacgtgttaattctttattcttgatgtgtacttagagaaacttaagaggtcctgtggtttttttcccctctcctgttgccctgctagttgcgtgttgaattatatcccttacaggcaaaacttttgaagtggtggatgtggctttttaaactcttaagtttctgtgcatccatctcttgtactaagcgaattgtttatcatcttgacatggttggtcatttctatgacaatttacttcaaactgtgtactgtgtagttctatatagtttgtgttaagcatgtcattcatataaactgtttaaaatttttcagatggcctagtttcatccctcttactggtttgtctgtaatgaatggttaaaaataagggttatattttaccctcaaatgcgtttttgtactttcagagcaggtttaaacgttttttttttttttttcctatatccgaactgttggcctcatggaaatccctttcccgatctttgtagcaccatctactggcagaatggcagagtagctgcgaaacaatttgtttaaaaacttgcttaagacaattgcatcagatttggaagttttgccatcaaaattctttgcagaattggaagttaacacatttgcttgtaactgagatgggcttcacaggaatgtagttgccagttcatatcacaatagccctttctatatgaggtttgaaaatgtaaactgctatgcatagcttgggcaatagccctaaattgctatgacaactaatgaaccagctacgtatactggtattttaggtgcaagttgtaaagcaaaatatctgtgtattctgcttggttaacaaatgtatatttgtagccctttcctgcaatagcattcaagttgttgtttataagagaagaacaaaagtgataataggtgaaaattgcctttctggatagaaatagagaatagcaacgtttatggatatcacaaataaagaattcaattctttacatgattgagtgagagtatgtataacctggtgggtgggttcagagtaccttttaatctagtatgcttaacttgatgttaatatttaacttaaatatttgacttacatgttgacgttgaaggctcaaagctatactaagaagctttctgaaagattgggctttaaaataaaataatattttaatattgaaccattttttaacttcttgtcactgttcaattcctaaggtctagttcttgccagttttttttttttttttcctgattggcagggcttttaaagaagtaagaagaaaggttaagattattaggctaggttatagctgctcagtagtcattttgacaaagggtagcggatggttggtacaaatagtgttatatcctctatgacaaacggggtggatgtttttacacattgaggtaatacatagtcaaatcctttgctctcaaatagttgtacactttccatacatttctgtcttattttttaattctagtgatacacaaattacatgtgggctacttcatttggtaatttggtccagctttttggtggctgtagagtggcctctaggatacagaaaatgattctctgaaatttttcgttgtaattgttaaatactactctgcttgacttactcagttttggtgggaagatctgggtcaattggaatagtacacctttctcagggttttcagtttaataaggttgtcatattattcccaacatgggaatatagtggcttctaaagtttgcaaatgaattatgtaaaaggattttctgtgtattaggaaggcaacctgttctgttcatggtatattaacacttcattgtcatgtgtctacccttaaaattgctatttgtagtgaagaaaaaagcatagtggtatttagtcacttctgggttcctcttgtcagtttatatgcaaacattttggcatgtgggacttggggaggagggacaattggttgtatgttttgaccacttccacctatgaaaattatctgaacattattcagatttaagagttcatgggagcaggtggtacagaacctagtgttgaatataatttttgtgccatgcttgaatgtattttgacggattagcaaaataaaagtgaacctcctatttttcatcttaatgtg

SEQ ID NO: 11871 - protein, 108 aa, Homo sapiens
MENSQLCKLFIGGLNVQTSESGLRGHFEAFGTLTDCVVVVNPQTKRSRCFGAMAVGVAMEAAPSKRKFKMPGSGYRGSSFQQPKWGQLLSPTPSHTPPSLFCPWGSHF

SEQ ID NO: 11872 - DNA, 3533 bp, Homo sapiens
ctctttgtgtggtgcccagataggggagcggaggtggcggcggcggcggtagcggtggccttggttgtcttccagtctcctcggctcgccctttagccggcaccgctccccttccctcccccttcctctcttccttccttccctccccttccctttttcccttccccgtcggtgagcggcgggggtggctccagcaacggctgggcccaagctgtgtagaggccttaaccaacgataacggcggcgacggcgaaacctcggagctcgcagggcgggggcaaggcccgggccttggagatggagaattctcagttgtgtaagctgttcatcggcggcctcaatgtgcagacgagtgagtcgggcctgcgcggccactttgaggcctttgggactctgacggactgcgtggtggtggtgaatccccagaccaagcgctcccgttgctttggcttcgtgacctactccaatgtggaggaggcggacgccgccatggccgcctcgccccatgccgtgaacggcctttccaagggcggcggcggcggttacaacagctacggtggttacggcggcggcggaggcggcggctacaatgcctacggaggcggcggcggcggttcgtcctacggtgggagcgactacggtaacggcttcggcggcttcggcagctacagccagcatcagtcctcctatgggcccatgaagagcggcggcggcggcggcggtggaggcagtagctggggcggtcgcagtaatagtggaccttacagaggcggctatggcggtgggggtggctatggaggcagctccttctaaaagaaaatttaaaatgcctgggagtggctataggggtagctctttccaacagcccaagtggggtcaactcctaagccccaccccctcacacacaccgccttccctgttttgcccttgggggagccacttctaaggctgcttacccttgggggtgttcctctatttgcctgccacctctcttgtctctccctctgaagatggactcggccccacatacacatttttgtgttacagtcattgatggactctatttttttattattacttggaccttggtcgtttttatactagcaaaatgtcttgttttaatttgtgttttttggggggagggagggagtgaacttgctgattctgtagcaaaacctgggtgggggttggggtggggggtagtttactttgttgtaaggacttgataacctggctacagcgttttctatgaaatctacttggatcccatgcctgaaatttggaagcatatgtacaaaaatcatttttacgttttatttttaataaatcattgtgtttgaccgtacatgtctaacattttttttctaggatccattccgtaccgttttttaagggatatttgtttaagactttacgtgttaattctttattcttgatgtgtacttagagaaacttaagaggtcctgtggtttttttcccctctcctgttgccctgctagttgcgtgttgaattatatcccttacaggcaaaacttttgaagtggtggatgtggctttttaaactcttaagtttctgtgcatccatctcttgtactaagcgaattgtttatcatcttgacatggttggtcatttctatgacaatttacttcaaactgtgtactgtgtagttctatatagtttgtgttaagcatgtcattcatataaactgtttaaaatttttcagatggcctagtttcatccctcttactggtttgtctgtaatgaatggttaaaaataagggttatattttaccctcaaatgcgtttttgtactttcagagcaggtttaaacgttttttttttttttttcctatatccgaactgttggcctcatggaaatccctttcccgatctttgtagcaccatctactggcagaatggcagagtagctgcgaaacaatttgtttaaaaacttgcttaagacaattgcatcagatttggaagttttgccatcaaaattctttgcagaattggaagttaacacatttgcttgtaactgagatgggcttcacaggaatgtagttgccagttcatatcacaatagccctttctatatgaggtttgaaaatgtaaactgctatgcatagcttgggcaatagccctaaattgctatgacaactaatgaaccagctacgtatactggtattttaggtgcaagttgtaaagcaaaatatctgtgtattctgcttggttaacaaatgtatatttgtagccctttcctgcaatagcattcaagttgttgtttataagagaagaacaaaagtgataataggtgaaaattgcctttctggatagaaatagagaatagcaacgtttatggatatcacaaataaagaattcaattctttacatgattgagtgagagtatgtataacctggtgggtgggttcagagtaccttttaatctagtatgcttaacttgatgttaatatttaacttaaatatttgacttacatgttgacgttgaaggctcaaagctatactaagaagctttctgaaagattgggctttaaaataaaataatattttaatattgaaccattttttaacttcttgtcactgttcaattcctaaggtctagttcttgccagttttttttttttttttcctgattggcagggcttttaaagaagtaagaagaaaggttaagattattaggctaggttatagctgctcagtagtcattttgacaaagggtagcggatggttggtacaaatagtgttatatcctctatgacaaacggggtggatgtttttacacattgaggtaatacatagtcaaatcctttgctctcaaatagttgtacactttccatacatttctgtcttattttttaattctagtgatacacaaattacatgtgggctacttcatttggtaatttggtccagctttttggtggctgtagagtggcctctaggatacagaaaatgattctctgaaatttttcgttgtaattgttaaatactactctgcttgacttactcagttttggtgggaagatctgggtcaattggaatagtacacctttctcagggttttcagtttaataaggttgtcatattattcccaacatgggaatatagtggcttctaaagtttgcaaatgaattatgtaaaaggattttctgtgtattaggaaggcaacctgttctgttcatggtatattaacacttcattgtcatgtgtctacccttaaaattgctatttgtagtgaagaaaaaagcatagtggtatttagtcacttctgggttcctcttgtcagtttatatgcaaacattttggcatgtgggacttggggaggagggacaattggttgtatgttttgaccacttccacctatgaaaattatctgaacattattcagatttaagagttcatgggagcaggtggtacagaacctagtgttgaatataatttttgtgccatgcttgaatgtattttgacggattagcaaaataaaagtgaacctcctatttttcatcttaatgtg

SEQ ID NO: 11873 - protein, 171 aa, Homo sapiens
MENSQLCKLFIGGLNVQTSESGLRGHFEAFGTLTDCVVVVNPQTKRSRCFGFVTYSNVEEADAAMAASPHAVNGLSKGGGGGYNSYGGYGGGGGGGYNAYGGGGGGSSYGGSDYGNGFGGFGSYSQHQSSYGPMKSGGGGGGGGSSWGGRSNSGPYRGGYGGGGGYGGSSF

SEQ ID NO: 11874 - DNA, 3874 bp, Homo sapiens
gcggcctctttgtgtggtgcccagataggggagcggaggtggcggcggcggcggtagcggtggccttggttgtcttccagtctcctcggctcgccctttagccggcaccgctccccttccctcccccttcctctcttccttccttccctccccttccctttttcccttccccgtcggtgagcggcgggggtggctccagcaacggctgggcccaagctgtgtagaggccttaaccaacgataacggcggcgacggcgaaacctcggagctcgcagggcgggggcaaggcccgggccttggagatggagaattctcagttgtgtaagctgttcatcggcggcctcaatgtgcagacgagtgagtcgggcctgcgcggccactttgaggcctttgggactctgacggactgcgtggtggtggtgaatccccagaccaagcgctcccgttgctttggcttcgtgacctactccaatgtggaggaggcggacgccgccatggccgcctcgccccatgccgtggacggcaacactgtggagctgaagcgggcggtgtcccgggaggattcggcgcggcccggtgcccacgccaaggttaagaagctctttgtcggaggccttaaaggagacgtggctgagggcgacctgatcgagcacttctcgcagtttggcaccgtggaaaaggccgagattattgccgacaagcagtccggcaagaagcgtggattcggcttcgtgtatttccagaatcacgacgcggcagacaaggccgcggtggtcaagttccatccgattcagggccatcgcgtggaggtgaagaaagcagtccccaaggaggatatctactccggtgggggtggaggcggctcccgatcctcccggggcggccgaggcggccgggggcgcggcggtggtcgagaccagaacggcctttccaagggcggcggcggcggttacaacagctacggtggttacggcggcggcggaggcggcggctacaatgcctacggaggcggcggcggcggttcgtcctacggtgggagcgactacggtaacggcttcggcggcttcggcagctacagccagcatcagtcctcctatgggcccatgaagagcggctatggcggtgggggtggctatggaggcagctccttctaaaagaaaatttaaaatgcctgggagtggctataggggtagctctttccaacagcccaagtggggtcaactcctaagccccaccccctcacacacaccgccttccctgttttgcccttgggggagccacttctaaggctgcttacccttgggggtgttcctctatttgcctgccacctctcttgtctctccctctgaagatggactcggccccacatacacatttttgtgttacagtcattgatggactctatttttttattattacttggaccttggtcgtttttatactagcaaaatgtcttgttttaatttgtgttttttggggggagggagggagtgaacttgctgattctgtagcaaaacctgggtgggggttggggtggggggtagtttactttgttgtaaggacttgataacctggctacagcgttttctatgaaatctacttggatcccatgcctgaaatttggaagcatatgtacaaaaatcatttttacgttttatttttaataaatcattgtgtttgaccgtacatgtctaacattttttttctaggatccattccgtaccgttttttaagggatatttgtttaagactttacgtgttaattctttattcttgatgtgtacttagagaaacttaagaggtcctgtggtttttttcccctctcctgttgccctgctagttgcgtgttgaattatatcccttacaggcaaaacttttgaagtggtggatgtggctttttaaactcttaagtttctgtgcatccatctcttgtactaagcgaattgtttatcatcttgacatggttggtcatttctatgacaatttacttcaaactgtgtactgtgtagttctatatagtttgtgttaagcatgtcattcatataaactgtttaaaatttttcagatggcctagtttcatccctcttactggtttgtctgtaatgaatggttaaaaataagggttatattttaccctcaaatgcgtttttgtactttcagagcaggtttaaacgttttttttttttttttcctatatccgaactgttggcctcatggaaatccctttcccgatctttgtagcaccatctactggcagaatggcagagtagctgcgaaacaatttgtttaaaaacttgcttaagacaattgcatcagatttggaagttttgccatcaaaattctttgcagaattggaagttaacacatttgcttgtaactgagatgggcttcacaggaatgtagttgccagttcatatcacaatagccctttctatatgaggtttgaaaatgtaaactgctatgcatagcttgggcaatagccctaaattgctatgacaactaatgaaccagctacgtatactggtattttaggtgcaagttgtaaagcaaaatatctgtgtattctgcttggttaacaaatgtatatttgtagccctttcctgcaatagcattcaagttgttgtttataagagaagaacaaaagtgataataggtgaaaattgcctttctggatagaaatagagaatagcaacgtttatggatatcacaaataaagaattcaattctttacatgattgagtgagagtatgtataacctggtgggtgggttcagagtaccttttaatctagtatgcttaacttgatgttaatatttaacttaaatatttgacttacatgttgacgttgaaggctcaaagctatactaagaagctttctgaaagattgggctttaaaataaaataatattttaatattgaaccattttttaacttcttgtcactgttcaattcctaaggtctagttcttgccagttttttttttttttttcctgattggcagggcttttaaagaagtaagaagaaaggttaagattattaggctaggttatagctgctcagtagtcattttgacaaagggtagcggatggttggtacaaatagtgttatatcctctatgacaaacggggtggatgtttttacacattgaggtaatacatagtcaaatcctttgctctcaaatagttgtacactttccatacatttctgtcttattttttaattctagtgatacacaaattacatgtgggctacttcatttggtaatttggtccagctttttggtggctgtagagtggcctctaggatacagaaaatgattctctgaaatttttcgttgtaattgttaaatactactctgcttgacttactcagttttggtgggaagatctgggtcaattggaatagtacacctttctcagggttttcagtttaataaggttgtcatattattcccaacatgggaatatagtggcttctaaagtttgcaaatgaattatgtaaaaggattttctgtgtattaggaaggcaacctgttctgttcatggtatattaacacttcattgtcatgtgtctacccttaaaattgctatttgtagtgaagaaaaaagcatagtggtatttagtcacttctgggttcctcttgtcagtttatatgcaaacattttggcatgtgggacttggggaggagggacaattggttgtatgttttgaccacttccacctatgaaaattatctgaacattattcagatttaagagttcatgggagcaggtggtacagaacctagtgttgaatataatttttgtgccatgcttgaatgtattttgacggattagcaaaataaaagtgaacctcctatttttcatcttaatgtg

SEQ ID NO: 11875 - protein, 283 aa, Homo sapiens
MENSQLCKLFIGGLNVQTSESGLRGHFEAFGTLTDCVVVVNPQTKRSRCFGFVTYSNVEEADAAMAASPHAVDGNTVELKRAVSREDSARPGAHAKVKKLFVGGLKGDVAEGDLIEHFSQFGTVEKAEIIADKQSGKKRGFGFVYFQNHDAADKAAVVKFHPIQGHRVEVKKAVPKEDIYSGGGGGGSRSSRGGRGGRGRGGGRDQNGLSKGGGGGYNSYGGYGGGGGGGYNAYGGGGGGSSYGGSDYGNGFGGFGSYSQHQSSYGPMKSGYGGGGGYGGSSF

SEQ ID NO: 11876 - DNA, 3869 bp, Homo sapiens
acgcctcggggagggtgcgcgcgcgttcagcggcctctttgtgtggtgcccagataggggagcggaggtggcggcggcggcggtagcggtggccttggttgtcttccagtctcctcggctcgccctttagccggcaccgctccccttccctcccccttcctctcttccttccttccctccccttccctttttcccttccccgtcggtgagcggcgggggtggctccagcaacggctgggcccaagctgtgtagaggccttaaccaacgataacggcggcgacggcgaaacctcggagctcgcagggcgggggcaaggcccgggccttggagatggagaattctcagttgtgtaagctgttcatcggcggcctcaatgtgcagacgagtgagtcgggcctgcgcggccactttgaggcctttgggactctgacggactgcgtggtggtggtgaatccccagaccaagcgctcccgttgctttggcttcgtgacctactccaatgtggaggaggcggacgccgccatggccgcctcgccccatgccgtggacggcaacactgtggagctgaagcgggcggtgtcccgggaggattcggcgcggcccggtgcccacgccaaggttaagaagctctttgtcggaggccttaaaggagacgtggctgagggcgacctgatcgagcacttctcgcagtttggcaccgtggaaaaggccgagattattgccgacaagcagtccggcaagaagcgtggattcggcttcgtgtatttccagaatcacgacgcggcagacaaggccgcggtggtcaagttccatccgattcagggccatcgcgtggaggtgaagaaagcagtccccaaggaggatatctactccggtgggggtggaggcggctcccgatcctcccggggcggccgaggcggccgggggcgcggcggtggtcgagaccagaacggcctttccaagggcggcggcggcggttacaacagctacggtggttacggcggcggcggaggcggcggctacaatgcctacggaggcgcggcggcggcggcggcggtggaggcagtagctggggcggtcgcagtaatagtggaccttacagaggcggctatggcggtgggggtggctatggaggcagctccttctaaaagaaaatttaaaatgcctgggagtggctataggggtagctctttccaacagcccaagtggggtcaactcctaagccccaccccctcacacacaccgccttccctgttttgcccttgggggagccacttctaaggctgcttacccttgggggtgttcctctatttgcctgccacctctcttgtctctccctctgaagatggactcggccccacatacacatttttgtgttacagtcattgatggactctatttttttattattacttggaccttggtcgtttttatactagcaaaatgtcttgttttaatttgtgttttttggggggagggagggagtgaacttgctgattctgtagcaaaacctgggtgggggttggggtggggggtagtttactttgttgtaaggacttgataacctggctacagcgttttctatgaaatctacttggatcccatgcctgaaatttggaagcatatgtacaaaaatcatttttacgttttatttttaataaatcattgtgtttgaccgtacatgtctaacattttttttctaggatccattccgtaccgttttttaagggatatttgtttaagactttacgtgttaattctttattcttgatgtgtacttagagaaacttaagaggtcctgtggtttttttcccctctcctgttgccctgctagttgcgtgttgaattatatcccttacaggcaaaacttttgaagtggtggatgtggctttttaaactcttaagtttctgtgcatccatctcttgtactaagcgaattgtttatcatcttgacatggttggtcatttctatgacaatttacttcaaactgtgtactgtgtagttctatatagtttgtgttaagcatgtcattcatataaactgtttaaaatttttcagatggcctagtttcatccctcttactggtttgtctgtaatgaatggttaaaaataagggttatattttaccctcaaatgcgtttttgtactttcagagcaggtttaaacgttttttttttttttttcctatatccgaactgttggcctcatggaaatccctttcccgatctttgtagcaccatctactggcagaatggcagagtagctgcgaaacaatttgtttaaaaacttgcttaagacaattgcatcagatttggaagttttgccatcaaaattctttgcagaattggaagttaacacatttgcttgtaactgagatgggcttcacaggaatgtagttgccagttcatatcacaatagccctttctatatgaggtttgaaaatgtaaactgctatgcatagcttgggcaatagccctaaattgctatgacaactaatgaaccagctacgtatactggtattttaggtgcaagttgtaaagcaaaatatctgtgtattctgcttggttaacaaatgtatatttgtagccctttcctgcaatagcattcaagttgttgtttataagagaagaacaaaagtgataataggtgaaaattgcctttctggatagaaatagagaatagcaacgtttatggatatcacaaataaagaattcaattctttacatgattgagtgagagtatgtataacctggtgggtgggttcagagtaccttttaatctagtatgcttaacttgatgttaatatttaacttaaatatttgacttacatgttgacgttgaaggctcaaagctatactaagaagctttctgaaagattgggctttaaaataaaataatattttaatattgaaccattttttaacttcttgtcactgttcaattcctaaggtctagttcttgccagttttttttttttttttcctgattggcagggcttttaaagaagtaagaagaaaggttaagattattaggctaggttatagctgctcagtagtcattttgacaaagggtagcggatggttggtacaaatagtgttatatcctctatgacaaacggggtggatgtttttacacattgaggtaatacatagtcaaatcctttgctctcaaatagttgtacactttccatacatttctgtcttattttttaattctagtgatacacaaattacatgtgggctacttcatttggtaatttggtccagctttttggtggctgtagagtggcctctaggatacagaaaatgattctctgaaatttttcgttgtaattgttaaatactactctgcttgacttactcagttttggtgggaagatctgggtcaattggaatagtacacctttctcagggttttcagtttaataaggttgtcatattattcccaacatgggaatatagtggcttctaaagtttgcaaatgaattatgtaaaaggattttctgtgtattaggaaggcaacctgttctgttcatggtatattaacacttcattgtcatgtgtctacccttaaaattgctatttgtagtgaagaaaaaagcatagtggtatttagtcacttctgggttcctcttgtcagtttatatgcaaacattttggcatgtgggacttggggaggagggacaattggttgtatgttttgaccacttccacctatgaaaattatctgaacattattcagatttaagagttcatgggagcaggtggtacagaacctagtgttgaatataatttttgtgccatgcttgaatgtattttgacggattagcaaaataaaagtgaacctcctatttttcatcttaatgtg

SEQ ID NO: 11877 - protein, 316 aa, Homo sapiens
MENSQLCKLFIGGLNVQTSESGLRGHFEAFGTLTDCVVVVNPQTKRSRCFGFVTYSNVEEADAAMAASPHAVDGNTVELKRAVSREDSARPGAHAKVKKLFVGGLKGDVAEGDLIEHFSQFGTVEKAEIIADKQSGKKRGFGFVYFQNHDAADKAAVVKFHPIQGHRVEVKKAVPKEDIYSGGGGGGSRSSRGGRGGRGRGGGRDQNGLSKGGGGGYNSYGGYGGGGGGGYNAYGGAAAAAAVEAVAGAVAVIVDLTEAAMAVGVAMEAAPSKRKFKMPGSGYRGSSFQQPKWGQLLSPTPSHTPPSLFCPWGSHF

SEQ ID NO: 11878 - DNA, 2456 bp, Homo sapiens
cggactgcgtggtggtggtgaatccccagaccaagcgctcccgttgctttggcttcgtgacctactccaatgtggaggaggcggacgccgccatggccgcctcgccccatgccgtggacggcaacactgtggagctgaagcgggcggtgtcccgggaggattcggcgcggcccggtgcccacgccaaggttaagaagctctttgtcggaggccttaaaggagacgtggctgagggcgacctgatcgagcacttctcgcagtttggcaccgtggaaaaggccgagattattgccgacaagcagtccggcaagaagcgtggattcggcttcgtgtatttccagaatcacgacgcggcagacaaggccgcggtggtcaagttccatccgattcagggccatcgcgtggaggtgaagaaagcagtccccaaggaggatatctactccggtgggggtggaggcggctcccgatcctcccggggcggccgaggcggccgggggcgcggcggtggtcgagaccagaacggcctttccaagggcggcggcggcggttacaacagctacggtggttacggcggcggcggaggcggcggctacaatgcctacggaggcggcggcggcggttcgtcctacggtgggagcgactacggtaacggcttcggcggcttcggcagctacagccagcatcagtcctcctatgggcccatgaagagcggcggcggcggcggcggtggaggcagtagctggggcggtcgcagtaatagtggaccttacagaggcggctatggcggtgggggtggctatggaggcagctccttctaaaagaaaatttaaaatgcctgggagtggctataggggtagctctttccaacagcccaagtggggtcaactcctaagccccaccccctcacacaacatttttgtgttacagtcattgatggactctatttttttattattacttggaccttggtcgtttttatactagcaaaatgtcttgttttaatttgtgttttttggggggagggagggagtgaacttgctgattctgtagcaaaacctgggtgggggttggggtggggggtagtttactttgttgtaaggacttgataacctggctacagcgttttctatgaaatctacttggatcccatgcctgaaatttggaagcatatgtacaaaaatcatttttacgttttatttttaataaatcattgtgtttgaccgtacatgtctaacattttttttctaggatccattccgtaccgttttttaagggatatttgtttaagactttacgtgttaattctttattcttgatgtgtacttagagaaacttaagaggtcctgtggtttttttcccctctcctgttgccctgctagttgcgtgttgaattatatcccttacaggcaaaacttttgaagtggtggatgtggctttttaaactcttaagtttctgtgcatccatctcttgtactaagcgaattgtttatcatcttgacatggttggtcatttctatgacaatttacttcaaactgtgtactgtgtagttctatatagtttgtgttaagcatgtcattcatataaactgtttaaaatttttcagatggcctagtttcatccctcttactggtttgtctgtaatgaatggttaaaaataagggttatattttaccctcaaatgcgtttttgtactttcagagcaggtttaaacgttttttttttttttttcctatatccgaactgttggcctcatggaaatccctttcccgatctttgtagcaccatctactggcagaatggcagagtagctgcgaaacaatttgtttaaaaacttgcttaagacaattgcatcagatttggaagttttgccatcaaaattctttgcagaattggaagttaacacatttgcttgtaactgagatgggcttcacaggaatgtagttgccagttcatatcacaatagccctttctatatgaggtttgaaaatgtaaactgctatgcatagcttgggcaatagccctaaattgctatgacaactaatgaaccagctacgtatactggtattttaggtgcaagttgtaaagcaaaatatctgtgtattctgcttggttaacaaatgtatatttgtagccctttcctgcaatagcattcaagttgttgtttataagagaagaacaaaagtgataataggtgaaaattgcctttctggatagaaatagagaatagcaacgtttatggatatcacaaataaagaattcaattctttacatgattgagtgagagtatgtataacctggtgggtgggttcagagtaccttttaatctagtatgcttaacttgatgttaatatttaacttaaatatttgacttacatgttgacgttgaaggctcaaagctatactaagaagctttctgaaagattgggctttaaaataaaataatattttaatattg

SEQ ID NO: 11879 - protein, 67 aa, Homo sapiens [sequence omitted]

SEQ ID NO: 11880 - DNA, 2504 bp, Homo sapiens
ctttttcccttccccgtcggtgagcggcgggggtggctccagcaacggctgggcccaagctgtgtagaggccttaaccaacgataacggcggcgacggcgaaacctcggagctcgcagggcgggggcaaggcccgggccttggagatggagaattctcagttgtgtaagctgttcatcggcggcctcaatgtgcagacgagtgagtcgggcctgcgcggccactttgaggcctttgggactctgacggactgcgtggtggtggtgaatccccagaccaagcgctcccgttgctttggcttcgtgacctactccaatgtggaggaggcggacgccgccatggccgcctcgccccatgccgtggacggcaacactgtggagctgaagcgggcggtgtcccgggaggattcggcgcggcccggtgcccacgccaaggttaagaagctctttgtcggaggccttaaaggagacgtggctgagggcgacctgatcgagcacttctcgcagtttggcaccgtggaaaaggccgagattattgccgacaagcagtccggcaagaagcgtggattcggcttcgtgtatttccagaatcacgacgcggcagacaaggccgcggtggtcaagttccatccgattcagggccatcgcgtggaggtgaagaaagcagtccccaaggaggatatctactccggtgggggtggaggcggctcccgatcctcccggggcggccgaggcggccgggggcgcggcggtggtcgagaccagaacggcctttccaagggcggcggcggcggttacaacagctacggtggttacggcggcggcggaggcggcggctacaatgcctacggaggcggcggcggcggttcgtcctacggtgggagcgactacggtaacggcttcggcggcttcggcagctacagccagcatcagtcctcctatgggcccatgaagagcggcggcggcggcggcggtggaggcagtagctggggcggtcgcagtaatagtggaccttacagaggcggctatggcggtgggggtggctatggaggcagctccttctaaaagaaaatttaaaatgcctgggagtggctataggggtagctctttccaacagcccaagtggggggtagtttactttgttgtaaggacttgataacctggctacagcgttttctatgaaatctacttggatcccatgcctgaaatttggaagcatatgtacaaaaatcatttttacgttttatttttaataaatcattgtgtttgaccgtacatgtctaacattttttttctaggatccattccgtaccgttttttaagggatatttgtttaagactttacgtgttaattctttattcttgatgtgtacttagagaaacttaagaggtcctgtggtttttttcccctctcctgttgccctgctagttgcgtgttgaattatatcccttacaggcaaaacttttgaagtggtggatgtggctttttaaactcttaagtttctgtgcatccatctcttgtactaagcgaattgtttatcatcttgacatggttggtcatttctatgacaatttacttcaaactgtgtactgtgtagttctatatagtttgtgttaagcatgtcattcatataaactgtttaaaatttttcagatggcctagtttcatccctcttactggtttgtctgtaatgaatggttaaaaataagggttatattttaccctcaaatgcgtttttgtactttcagagcaggtttaaacgttttttttttttttttcctatatccgaactgttggcctcatggaaatccctttcccgatctttgtagcaccatctactggcagaatggcagagtagctgcgaaacaatttgtttaaaaacttgcttaagacaattgcatcagatttggaagttttgccatcaaaattctttgcagaattggaagttaacacatttgcttgtaactgagatgggcttcacaggaatgtagttgccagttcatatcacaatagccctttctatatgaggtttgaaaatgtaaactgctatgcatagcttgggcaatagccctaaattgctatgacaactaatgaaccagctacgtatactggtattttaggtgcaagttgtaaagcaaaatatctgtgtattctgcttggttaacaaatgtatatttgtagccctttcctgcaatagcattcaagttgttgtttataagagaagaacaaaagtgataataggtgaaaattgcctttctggatagaaatagagaatagcaacgtttatggatatcacaaataaagaattcaattctttacatgattgagtgagagtatgtataacctggtgggtgggttcagagtaccttttaatctagtatgcttaacttgatgttaatatttaacttaaatatttgacttacatgttgacgttgaaggctcaaagctatactaagaagctttctgaaagattgggctttaaaataaaataatattttaatattg

SEQ ID NO: 11881 - protein, 42 aa, Homo sapiens; identical to SEQ ID NO: 11867

SEQ ID NO: 11882 - DNA, 1780 bp, Homo sapiens
ggtggcggcggcggcggtagcggtggccttggttgtcttccagtctcctcggctcgccctttagccggcaccgctccccttccctcccccttcctctcttccttccttccctccccttccctgttttgcccttgggggagccacttctaaggctgcttacccttgggggtgttcctctatttgcctgccacctctcttgtctctccctctgaagatggactcggccccacatacacatttttgtgttacagtcattgatggactctatttttttattattacttggaccttggtcgtttttatactagcaaaatgtcttgttttaatttgtgttttttggggggagggagggagtgaacttgctgattctgtagcaaaacctgggtgggggttggggtggggggtagtttactttgttgtaaggacttgataacctggctacagcgttttctatgaaatctacttggatcccatgcctgaaatttggaagcatatgtacaaaaatcatttttacgttttatttttaataaatcattgtgtttgaccgtacatgtctaacattttttttctaggatccattccgtaccgttttttaagggatatttgtttaagactttacgtgttaattctttattcttgatgtgtacttagagaaacttaagaggtcctgtggtttttttcccctctcctgttgccctgctagttgcgtgttgaattatatcccttacaggcaaaacttttgaagtggtggatgtggctttttaaactcttaagtttctgtgcatccatctcttgtactaagcgaattgtttatcatcttgacatggttggtcatttctatgacaatttacttcaaactgtgtactgtgtagttctatatagtttgtgttaagcatgtcattcatataaactgtttaaaatttttcagatggcctagtttcatccctcttactggtttgtctgtaatgaatggttaaaaataagggttatattttaccctcaaatgcgtttttgtactttcagagcaggtttaaacgttttttttttttttttcctatatccgaactgttggcctcatggaaatccctttcccgatctttgtagcaccatctactggcagaatggcagagtagctgcgaaacaatttgtttaaaaacttgcttaagacaattgcatcagatttggaagttttgccatcaaaattctttgcagaattggaagttaacacatttgcttgtaactgagatgggcttcacaggaatgtagttgccagttcatatcacaatagccctttctatatgaggtttgaaaatgtaaactgctatgcatagcttgggcaatagccctaaattgctatgacaactaatgaaccagctacgtatactggtattttaggtgcaagttgtaaagcaaaatatctgtgtattctgcttggttaacaaatgtatatttgtagccctttcctgcaatagcattcaagttgttgtttataagagaagaacaaaagtgataataggtgaaaattgcctttctggatagaaatagagaatagcaacgtttatggatatcacaaataaagaattcaattctttacatgattgagtgagagtatgtataacctggtgggtgggttcagagtaccttttaatctagtatgcttaacttgatgttaatatttaacttaaatatttgacttacatgttgacgttgaaggctcaaagctatactaagaagctttctgaaagattgggctttaaaataaaataatattttaatattg

SEQ ID NO: 11883 - protein, 71 aa, Homo sapiens [sequence omitted]

SEQ ID NO: 11884 - DNA, 2245 bp, Homo sapiens
tggtgcccagataggggagcggaggtggcggcggcggcggtagcggtggccttggttgtcttccagtctcctcggctcgccctttagccggcaccgctccccttccctcccccttcctctcttccttccttccctccccttccctttttcccttccccgtcggtgagcggcgggggtggctccagcaacggctgggcccaagctgtgtagaggccttaaccaacgataacggcggcgacggcgaaacctcggagctcgcagggcgggggcaaggcccgggccttggagatggagaattctcagttgtgtaagctgttcatcggcggcctcaatgtgcagacgagtgagtcgggcctgcgcggccactttgaggcctttgggactctgacggactgcgtggtggtggtgaatccccagaccaagcgctcccgttgctttggggctatggcggtgggggtggctatggaggcagctccttctaaaagaaaatttaaaatgcctgggagtggctataggggtagctctttccaacagcccaagtggggtcaactcctaagccccaccccctcacacacaccgccttccctgttttgcccttgggggagccacttctaaggctgcttacccttgggggtgttcctctatttgcctgccacctctcttgtctctccctctgaagatggactcggccccacatacacatttttgtgttacagtcattgatggactctatttttttattattacttggaccttggtcgtttttatactagcaaaatgtcttgttttaatttgtgttttttggggggagggagggagtgaacttgctgattctgtagcaaaacctgggtgggggttggggtggggggtagtttactttgttgtaaggacttgataacctggctacagcgttttctatgaaatctacttggatcccatgcctgaaatttggaagcatatgtacaaaaatcatttttacgttttatttttaataaatcattgtgtttgaccgtacatgtctaacattttttttctaggatccattccgtaccgttttttaagggatatttgtttaagactttacgtgttaattctttattcttgatgtgtacttagagaaacttaagaggtcctgtggtttttttcccctctcctgttgccctgctagttgcgtgttgaattatatcccttacaggcaaaacttttgaagtggtggatgtggctttttaaactcttaagtttctgtgcatccatctcttgtactaagcgaattgtttatcatcttgacatggttggtcatttctatgacaatttacttcaaactgtgtactgtgtagttctatatagtttgtgttaagcatgtcattcatataaactgtttaaaatttttcagatggcctagtttcatccctcttactggtttgtctgtaatgaatggttaaaaataagggttatattttaccctcaaatgcgtttttgtactttcagagcaggtttaaacgttttttttttttttttcctatatccgaactgttggcctcatggaaatccctttcccgatctttgtagcaccatctactggcagaatggcagagtagctgcgaaacaatttgtttaaaaacttgcttaagacaattgcatcagatttggaagttttgccatcaaaattctttgcagaattggaagttaacacatttgcttgtaactgagatgggcttcacaggaatgtagttgccagttcatatcacaatagccctttctatatgaggtttgaaaatgtaaactgctatgcatagcttgggcaatagccctaaattgctatgacaactaatgaaccagctacgtatactggtattttaggtgcaagttgtaaagcaaaatatctgtgtattctgcttggttaacaaatgtatatttgtagccctttcctgcaatagcattcaagttgttgtttataagagaagaacaaaagtgataataggtgaaaattgcctttctggatagaaatagagaatagcaacgtttatggatatcacaaataaagaattcaattctttacatgattgagtgagagtatgtataacctggtgggtgggttcagagtaccttttaatctagtatgcttaacttgatgttaatatttaacttaaatatttgacttacatgttgacgttgaaggctcaaagctatactaagaagctttctgaaagattgggctttaaaataaaataatattttaatattg

SEQ ID NO: 11885 - protein, 108 aa, Homo sapiens; identical to SEQ ID NO: 11871

SEQ ID NO: 11886 - DNA, 2576 bp, Homo sapiens
ctctttgtgtggtgcccagataggggagcggaggtggcggcggcggcggtagcggtggccttggttgtcttccagtctcctcggctcgccctttagccggcaccgctccccttccctcccccttcctctcttccttccttccctccccttccctttttcccttccccgtcggtgagcggcgggggtggctccagcaacggctgggcccaagctgtgtagaggccttaaccaacgataacggcggcgacggcgaaacctcggagctcgcagggcgggggcaaggcccgggccttggagatggagaattctcagttgtgtaagctgttcatcggcggcctcaatgtgcagacgagtgagtcgggcctgcgcggccactttgaggcctttgggactctgacggactgcgtggtggtggtgaatccccagaccaagcgctcccgttgctttggcttcgtgacctactccaatgtggaggaggcggacgccgccatggccgcctcgccccatgccgtgaacggcctttccaagggcggcggcggcggttacaacagctacggtggttacggcggcggcggaggcggcggctacaatgcctacggaggcggcggcggcggttcgtcctacggtgggagcgactacggtaacggcttcggcggcttcggcagctacagccagcatcagtcctcctatgggcccatgaagagcggcggcggcggcggcggtggaggcagtagctggggcggtcgcagtaatagtggaccttacagaggcggctatggcggtgggggtggctatggaggcagctccttctaaaagaaaatttaaaatgcctgggagtggctataggggtagctctttccaacagcccaagtggggtcaactcctaagccccaccccctcacacacaccgccttccctgttttgcccttgggggagccacttctaaggctgcttacccttgggggtgttcctctatttgcctgccacctctcttgtctctccctctgaagatggactcggccccacatacacatttttgtgttacagtcattgatggactctatttttttattattacttggaccttggtcgtttttatactagcaaaatgtcttgttttaatttgtgttttttggggggagggagggagtgaacttgctgattctgtagcaaaacctgggtgggggttggggtggggggtagtttactttgttgtaaggacttgataacctggctacagcgttttctatgaaatctacttggatcccatgcctgaaatttggaagcatatgtacaaaaatcatttttacgttttatttttaataaatcattgtgtttgaccgtacatgtctaacattttttttctaggatccattccgtaccgttttttaagggatatttgtttaagactttacgtgttaattctttattcttgatgtgtacttagagaaacttaagaggtcctgtggtttttttcccctctcctgttgccctgctagttgcgtgttgaattatatcccttacaggcaaaacttttgaagtggtggatgtggctttttaaactcttaagtttctgtgcatccatctcttgtactaagcgaattgtttatcatcttgacatggttggtcatttctatgacaatttacttcaaactgtgtactgtgtagttctatatagtttgtgttaagcatgtcattcatataaactgtttaaaatttttcagatggcctagtttcatccctcttactggtttgtctgtaatgaatggttaaaaataagggttatattttaccctcaaatgcgtttttgtactttcagagcaggtttaaacgttttttttttttttttcctatatccgaactgttggcctcatggaaatccctttcccgatctttgtagcaccatctactggcagaatggcagagtagctgcgaaacaatttgtttaaaaacttgcttaagacaattgcatcagatttggaagttttgccatcaaaattctttgcagaattggaagttaacacatttgcttgtaactgagatgggcttcacaggaatgtagttgccagttcatatcacaatagccctttctatatgaggtttgaaaatgtaaactgctatgcatagcttgggcaatagccctaaattgctatgacaactaatgaaccagctacgtatactggtattttaggtgcaagttgtaaagcaaaatatctgtgtattctgcttggttaacaaatgtatatttgtagccctttcctgcaatagcattcaagttgttgtttataagagaagaacaaaagtgataataggtgaaaattgcctttctggatagaaatagagaatagcaacgtttatggatatcacaaataaagaattcaattctttacatgattgagtgagagtatgtataacctggtgggtgggttcagagtaccttttaatctagtatgcttaacttgatgttaatatttaacttaaatatttgacttacatgttgacgttgaaggctcaaagctatactaagaagctttctgaaagattgggctttaaaataaaataatattttaatattg

SEQ ID NO: 11887 - protein, 171 aa, Homo sapiens; identical to SEQ ID NO: 11873

SEQ ID NO: 11888 - DNA, 2917 bp, Homo sapiens
gcggcctctttgtgtggtgcccagataggggagcggaggtggcggcggcggcggtagcggtggccttggttgtcttccagtctcctcggctcgccctttagccggcaccgctccccttccctcccccttcctctcttccttccttccctccccttccctttttcccttccccgtcggtgagcggcgggggtggctccagcaacggctgggcccaagctgtgtagaggccttaaccaacgataacggcggcgacggcgaaacctcggagctcgcagggcgggggcaaggcccgggccttggagatggagaattctcagttgtgtaagctgttcatcggcggcctcaatgtgcagacgagtgagtcgggcctgcgcggccactttgaggcctttgggactctgacggactgcgtggtggtggtgaatccccagaccaagcgctcccgttgctttggcttcgtgacctactccaatgtggaggaggcggacgccgccatggccgcctcgccccatgccgtggacggcaacactgtggagctgaagcgggcggtgtcccgggaggattcggcgcggcccggtgcccacgccaaggttaagaagctctttgtcggaggccttaaaggagacgtggctgagggcgacctgatcgagcacttctcgcagtttggcaccgtggaaaaggccgagattattgccgacaagcagtccggcaagaagcgtggattcggcttcgtgtatttccagaatcacgacgcggcagacaaggccgcggtggtcaagttccatccgattcagggccatcgcgtggaggtgaagaaagcagtccccaaggaggatatctactccggtgggggtggaggcggctcccgatcctcccggggcggccgaggcggccgggggcgcggcggtggtcgagaccagaacggcctttccaagggcggcggcggcggttacaacagctacggtggttacggcggcggcggaggcggcggctacaatgcctacggaggcggcggcggcggttcgtcctacggtgggagcgactacggtaacggcttcggcggcttcggcagctacagccagcatcagtcctcctatgggcccatgaagagcggctatggcggtgggggtggctatggaggcagctccttctaaaagaaaatttaaaatgcctgggagtggctataggggtagctctttccaacagcccaagtggggtcaactcctaagccccaccccctcacacacaccgccttccctgttttgcccttgggggagccacttctaaggctgcttacccttgggggtgttcctctatttgcctgccacctctcttgtctctccctctgaagatggactcggccccacatacacatttttgtgttacagtcattgatggactctatttttttattattacttggaccttggtcgtttttatactagcaaaatgtcttgttttaatttgtgttttttggggggagggagggagtgaacttgctgattctgtagcaaaacctgggtgggggttggggtggggggtagtttactttgttgtaaggacttgataacctggctacagcgttttctatgaaatctacttggatcccatgcctgaaatttggaagcatatgtacaaaaatcatttttacgttttatttttaataaatcattgtgtttgaccgtacatgtctaacattttttttctaggatccattccgtaccgttttttaagggatatttgtttaagactttacgtgttaattctttattcttgatgtgtacttagagaaacttaagaggtcctgtggtttttttcccctctcctgttgccctgctagttgcgtgttgaattatatcccttacaggcaaaacttttgaagtggtggatgtggctttttaaactcttaagtttctgtgcatccatctcttgtactaagcgaattgtttatcatcttgacatggttggtcatttctatgacaatttacttcaaactgtgtactgtgtagttctatatagtttgtgttaagcatgtcattcatataaactgtttaaaatttttcagatggcctagtttcatccctcttactggtttgtctgtaatgaatggttaaaaataagggttatattttaccctcaaatgcgtttttgtactttcagagcaggtttaaacgttttttttttttttttcctatatccgaactgttggcctcatggaaatccctttcccgatctttgtagcaccatctactggcagaatggcagagtagctgcgaaacaatttgtttaaaaacttgcttaagacaattgcatcagatttggaagttttgccatcaaaattctttgcagaattggaagttaacacatttgcttgtaactgagatgggcttcacaggaatgtagttgccagttcatatcacaatagccctttctatatgaggtttgaaaatgtaaactgctatgcatagcttgggcaatagccctaaattgctatgacaactaatgaaccagctacgtatactggtattttaggtgcaagttgtaaagcaaaatatctgtgtattctgcttggttaacaaatgtatatttgtagccctttcctgcaatagcattcaagttgttgtttataagagaagaacaaaagtgataataggtgaaaattgcctttctggatagaaatagagaatagcaacgtttatggatatcacaaataaagaattcaattctttacatgattgagtgagagtatgtataacctggtgggtgggttcagagtaccttttaatctagtatgcttaacttgatgttaatatttaacttaaatatttgacttacatgttgacgttgaaggctcaaagctatactaagaagctttctgaaagattgggctttaaaataaaataatattttaatattg

SEQ ID NO: 11889 - protein, 283 aa, Homo sapiens; identical to SEQ ID NO: 11875

SEQ ID NO: 11890 - DNA, 2912 bp, Homo sapiens
acgcctcggggagggtgcgcgcgcgttcagcggcctctttgtgtggtgcccagataggggagcggaggtggcggcggcggcggtagcggtggccttggttgtcttccagtctcctcggctcgccctttagccggcaccgctccccttccctcccccttcctctcttccttccttccctccccttccctttttcccttccccgtcggtgagcggcgggggtggctccagcaacggctgggcccaagctgtgtagaggccttaaccaacgataacggcggcgacggcgaaacctcggagctcgcagggcgggggcaaggcccgggccttggagatggagaattctcagttgtgtaagctgttcatcggcggcctcaatgtgcagacgagtgagtcgggcctgcgcggccactttgaggcctttgggactctgacggactgcgtggtggtggtgaatccccagaccaagcgctcccgttgctttggcttcgtgacctactccaatgtggaggaggcggacgccgccatggccgcctcgccccatgccgtggacggcaacactgtggagctgaagcgggcggtgtcccgggaggattcggcgcggcccggtgcccacgccaaggttaagaagctctttgtcggaggccttaaaggagacgtggctgagggcgacctgatcgagcacttctcgcagtttggcaccgtggaaaaggccgagattattgccgacaagcagtccggcaagaagcgtggattcggcttcgtgtatttccagaatcacgacgcggcagacaaggccgcggtggtcaagttccatccgattcagggccatcgcgtggaggtgaagaaagcagtccccaaggaggatatctactccggtgggggtggaggcggctcccgatcctcccggggcggccgaggcggccgggggcgcggcggtggtcgagaccagaacggcctttccaagggcggcggcggcggttacaacagctacggtggttacggcggcggcggaggcggcggctacaatgcctacggaggcgcggcggcggcggcggcggtggaggcagtagctggggcggtcgcagtaatagtggaccttacagaggcggctatggcggtgggggtggctatggaggcagctccttctaaaagaaaatttaaaatgcctgggagtggctataggggtagctctttccaacagcccaagtggggtcaactcctaagccccaccccctcacacacaccgccttccctgttttgcccttgggggagccacttctaaggctgcttacccttgggggtgttcctctatttgcctgccacctctcttgtctctccctctgaagatggactcggccccacatacacatttttgtgttacagtcattgatggactctatttttttattattacttggaccttggtcgtttttatactagcaaaatgtcttgttttaatttgtgttttttggggggagggagggagtgaacttgctgattctgtagcaaaacctgggtgggggttggggtggggggtagtttactttgttgtaaggacttgataacctggctacagcgttttctatgaaatctacttggatcccatgcctgaaatttggaagcatatgtacaaaaatcatttttacgttttatttttaataaatcattgtgtttgaccgtacatgtctaacattttttttctaggatccattccgtaccgttttttaagggatatttgtttaagactttacgtgttaattctttattcttgatgtgtacttagagaaacttaagaggtcctgtggtttttttcccctctcctgttgccctgctagttgcgtgttgaattatatcccttacaggcaaaacttttgaagtggtggatgtggctttttaaactcttaagtttctgtgcatccatctcttgtactaagcgaattgtttatcatcttgacatggttggtcatttctatgacaatttacttcaaactgtgtactgtgtagttctatatagtttgtgttaagcatgtcattcatataaactgtttaaaatttttcagatggcctagtttcatccctcttactggtttgtctgtaatgaatggttaaaaataagggttatattttaccctcaaatgcgtttttgtactttcagagcaggtttaaacgttttttttttttttttcctatatccgaactgttggcctcatggaaatccctttcccgatctttgtagcaccatctactggcagaatggcagagtagctgcgaaacaatttgtttaaaaacttgcttaagacaattgcatcagatttggaagttttgccatcaaaattctttgcagaattggaagttaacacatttgcttgtaactgagatgggcttcacaggaatgtagttgccagttcatatcacaatagccctttctatatgaggtttgaaaatgtaaactgctatgcatagcttgggcaatagccctaaattgctatgacaactaatgaaccagctacgtatactggtattttaggtgcaagttgtaaagcaaaatatctgtgtattctgcttggttaacaaatgtatatttgtagccctttcctgcaatagcattcaagttgttgtttataagagaagaacaaaagtgataataggtgaaaattgcctttctggatagaaatagagaatagcaacgtttatggatatcacaaataaagaattcaattctttacatgattgagtgagagtatgtataacctggtgggtgggttcagagtaccttttaatctagtatgcttaacttgatgttaatatttaacttaaatatttgacttacatgttgacgttgaaggctcaaagctatactaagaagctttctgaaagattgggctttaaaataaaataatattttaatattg

SEQ ID NO: 11891 - protein, 316 aa, Homo sapiens; identical to SEQ ID NO: 11877

SEQ ID NO: 11892 - DNA, 2273 bp, Homo sapiens
cggactgcgtggtggtggtgaatccccagaccaagcgctcccgttgctttggcttcgtgacctactccaatgtggaggaggcggacgccgccatggccgcctcgccccatgccgtggacggcaacactgtggagctgaagcgggcggtgtcccgggaggattcggcgcggcccggtgcccacgccaaggttaagaagctctttgtcggaggccttaaaggagacgtggctgagggcgacctgatcgagcacttctcgcagtttggcaccgtggaaaaggccgagattattgccgacaagcagtccggcaagaagcgtggattcggcttcgtgtatttccagaatcacgacgcggcagacaaggccgcggtggtcaagttccatccgattcagggccatcgcgtggaggtgaagaaagcagtccccaaggaggatatctactccggtgggggtggaggcggctcccgatcctcccggggcggccgaggcggccgggggcgcggcggtggtcgagaccagaacggcctttccaagggcggcggcggcggttacaacagctacggtggttacggcggcggcggaggcggcggctacaatgcctacggaggcggcggcggcggttcgtcctacggtgggagcgactacggtaacggcttcggcggcttcggcagctacagccagcatcagtcctcctatgggcccatgaagagcggcggcggcggcggcggtggaggcagtagctggggcggtcgcagtaatagtggaccttacagaggcggctatggcggtgggggtggctatggaggcagctccttctaaaagaaaatttaaaatgcctgggagtggctataggggtagctctttccaacagcccaagtggggtcaactcctaagccccaccccctcacacaacatttttgtgttacagtcattgatggactctatttttttattattacttggaccttggtcgtttttatactagcaaaatgtcttgttttaatttgtgttttttggggggagggagggagtgaacttgctgattctgtagcaaaacctgggtgggggttggggtggggggtagtttactttgttgtaaggacttgataacctggctacagcgttttctatgaaatctacttggatcccatgcctgaaatttggaagcatatgtacaaaaatcatttttacgttttatttttaataaatcattgtgtttgaccgtacatgtctaacattttttttctaggatccattccgtaccgttttttaagggatatttgtttaagactttacgtgttaattctttattcttgatgtgtacttagagaaacttaagaggtcctgtggtttttttcccctctcctgttgccctgctagttgcgtgttgaattatatcccttacaggcaaaacttttgaagtggtggatgtggctttttaaactcttaagtttctgtgcatccatctcttgtactaagcgaattgtttatcatcttgacatggttggtcatttctatgacaatttacttcaaactgtgtactgtgtagttctatatagtttgtgttaagcatgtcattcatataaactgtttaaaatttttcagatggcctagtttcatccctcttactggtttgtctgtaatgaatggttaaaaataagggttatattttaccctcaaatgcgtttttgtactttcagagcaggtttaaacgttttttttttttttttcctatatccgaactgttggcctcatggaaatccctttcccgatctttgtagcaccatctactggcagaatggcagagtagctgcgaaacaatttgtttaaaaacttgcttaagacaattgcatcagatttggaagttttgccatcaaaattctttgcagaattggaagttaacacatttgcttgtaactgagatgggcttcacaggaatgtagttgccagttcatatcacaatagccctttctatatgaggtttgaaaatgtaaactgctatgcatagcttgggcaatagccctaaattgctatgacaactaatgaaccagctacgtatactggtattttaggtgcaagttgtaaagcaaaatatctgtgtattctgcttggttaacaaatgtatatttgtagccctttcctgcaatagcattcaagttgttgtttataagagaagaacaaaagtgataataggtgaaaattgcctttctggatagaaatagagaatagcaacgtttatggatatcacaaataaagaattcaattctttacatg

SEQ ID NO: 11893 - protein, 67 aa, Homo sapiens [sequence omitted]

SEQ ID NO: 11894 - DNA, 2321 bp, Homo sapiens
ctttttcccttccccgtcggtgagcggcgggggtggctccagcaacggctgggcccaagctgtgtagaggccttaaccaacgataacggcggcgacggcgaaacctcggagctcgcagggcgggggcaaggcccgggccttggagatggagaattctcagttgtgtaagctgttcatcggcggcctcaatgtgcagacgagtgagtcgggcctgcgcggccactttgaggcctttgggactctgacggactgcgtggtggtggtgaatccccagaccaagcgctcccgttgctttggcttcgtgacctactccaatgtggaggaggcggacgccgccatggccgcctcgccccatgccgtggacggcaacactgtggagctgaagcgggcggtgtcccgggaggattcggcgcggcccggtgcccacgccaaggttaagaagctctttgtcggaggccttaaaggagacgtggctgagggcgacctgatcgagcacttctcgcagtttggcaccgtggaaaaggccgagattattgccgacaagcagtccggcaagaagcgtggattcggcttcgtgtatttccagaatcacgacgcggcagacaaggccgcggtggtcaagttccatccgattcagggccatcgcgtggaggtgaagaaagcagtccccaaggaggatatctactccggtgggggtggaggcggctcccgatcctcccggggcggccgaggcggccgggggcgcggcggtggtcgagaccagaacggcctttccaagggcggcggcggcggttacaacagctacggtggttacggcggcggcggaggcggcggctacaatgcctacggaggcggcggcggcggttcgtcctacggtgggagcgactacggtaacggcttcggcggcttcggcagctacagccagcatcagtcctcctatgggcccatgaagagcggcggcggcggcggcggtggaggcagtagctggggcggtcgcagtaatagtggaccttacagaggcggctatggcggtgggggtggctatggaggcagctccttctaaaagaaaatttaaaatgcctgggagtggctataggggtagctctttccaacagcccaagtggggggtagtttactttgttgtaaggacttgataacctggctacagcgttttctatgaaatctacttggatcccatgcctgaaatttggaagcatatgtacaaaaatcatttttacgttttatttttaataaatcattgtgtttgaccgtacatgtctaacattttttttctaggatccattccgtaccgttttttaagggatatttgtttaagactttacgtgttaattctttattcttgatgtgtacttagagaaacttaagaggtcctgtggtttttttcccctctcctgttgccctgctagttgcgtgttgaattatatcccttacaggcaaaacttttgaagtggtggatgtggctttttaaactcttaagtttctgtgcatccatctcttgtactaagcgaattgtttatcatcttgacatggttggtcatttctatgacaatttacttcaaactgtgtactgtgtagttctatatagtttgtgttaagcatgtcattcatataaactgtttaaaatttttcagatggcctagtttcatccctcttactggtttgtctgtaatgaatggttaaaaataagggttatattttaccctcaaatgcgtttttgtactttcagagcaggtttaaacgttttttttttttttttcctatatccgaactgttggcctcatggaaatccctttcccgatctttgtagcaccatctactggcagaatggcagagtagctgcgaaacaatttgtttaaaaacttgcttaagacaattgcatcagatttggaagttttgccatcaaaattctttgcagaattggaagttaacacatttgcttgtaactgagatgggcttcacaggaatgtagttgccagttcatatcacaatagccctttctatatgaggtttgaaaatgtaaactgctatgcatagcttgggcaatagccctaaattgctatgacaactaatgaaccagctacgtatactggtattttaggtgcaagttgtaaagcaaaatatctgtgtattctgcttggttaacaaatgtatatttgtagccctttcctgcaatagcattcaagttgttgtttataagagaagaacaaaagtgataataggtgaaaattgcctttctggatagaaatagagaatagcaacgtttatggatatcacaaataaagaattcaattctttacatg

SEQ ID NO: 11895 - protein, 42 aa, Homo sapiens; identical to SEQ ID NO: 11867

SEQ ID NO: 11896 - DNA, 1597 bp, Homo sapiens
ggtggcggcggcggcggtagcggtggccttggttgtcttccagtctcctcggctcgccctttagccggcaccgctccccttccctcccccttcctctcttccttccttccctccccttccctgttttgcccttgggggagccacttctaaggctgcttacccttgggggtgttcctctatttgcctgccacctctcttgtctctccctctgaagatggactcggccccacatacacatttttgtgttacagtcattgatggactctatttttttattattacttggaccttggtcgtttttatactagcaaaatgtcttgttttaatttgtgttttttggggggagggagggagtgaacttgctgattctgtagcaaaacctgggtgggggttggggtggggggtagtttactttgttgtaaggacttgataacctggctacagcgttttctatgaaatctacttggatcccatgcctgaaatttggaagcatatgtacaaaaatcatttttacgttttatttttaataaatcattgtgtttgaccgtacatgtctaacattttttttctaggatccattccgtaccgttttttaagggatatttgtttaagactttacgtgttaattctttattcttgatgtgtacttagagaaacttaagaggtcctgtggtttttttcccctctcctgttgccctgctagttgcgtgttgaattatatcccttacaggcaaaacttttgaagtggtggatgtggctttttaaactcttaagtttctgtgcatccatctcttgtactaagcgaattgtttatcatcttgacatggttggtcatttctatgacaatttacttcaaactgtgtactgtgtagttctatatagtttgtgttaagcatgtcattcatataaactgtttaaaatttttcagatggcctagtttcatccctcttactggtttgtctgtaatgaatggttaaaaataagggttatattttaccctcaaatgcgtttttgtactttcagagcaggtttaaacgttttttttttttttttcctatatccgaactgttggcctcatggaaatccctttcccgatctttgtagcaccatctactggcagaatggcagagtagctgcgaaacaatttgtttaaaaacttgcttaagacaattgcatcagatttggaagttttgccatcaaaattctttgcagaattggaagttaacacatttgcttgtaactgagatgggcttcacaggaatgtagttgccagttcatatcacaatagccctttctatatgaggtttgaaaatgtaaactgctatgcatagcttgggcaatagccctaaattgctatgacaactaatgaaccagctacgtatactggtattttaggtgcaagttgtaaagcaaaatatctgtgtattctgcttggttaacaaatgtatatttgtagccctttcctgcaatagcattcaagttgttgtttataagagaagaacaaaagtgataataggtgaaaattgcctttctggatagaaatagagaatagcaacgtttatggatatcacaaataaagaattcaattctttacatg

SEQ ID NO: 11897 - protein, 71 aa, Homo sapiens [sequence omitted]

SEQ ID NO: 11898 - DNA, 2062 bp, Homo sapiens
tggtgcccagataggggagcggaggtggcggcggcggcggtagcggtggccttggttgtcttccagtctcctcggctcgccctttagccggcaccgctccccttccctcccccttcctctcttccttccttccctccccttccctttttcccttccccgtcggtgagcggcgggggtggctccagcaacggctgggcccaagctgtgtagaggccttaaccaacgataacggcggcgacggcgaaacctcggagctcgcagggcgggggcaaggcccgggccttggagatggagaattctcagttgtgtaagctgttcatcggcggcctcaatgtgcagacgagtgagtcgggcctgcgcggccactttgaggcctttgggactctgacggactgcgtggtggtggtgaatccccagaccaagcgctcccgttgctttggggctatggcggtgggggtggctatggaggcagctccttctaaaagaaaatttaaaatgcctgggagtggctataggggtagctctttccaacagcccaagtggggtcaactcctaagccccaccccctcacacacaccgccttccctgttttgcccttgggggagccacttctaaggctgcttacccttgggggtgttcctctatttgcctgccacctctcttgtctctccctctgaagatggactcggccccacatacacatttttgtgttacagtcattgatggactctatttttttattattacttggaccttggtcgtttttatactagcaaaatgtcttgttttaatttgtgttttttggggggagggagggagtgaacttgctgattctgtagcaaaacctgggtgggggttggggtggggggtagtttactttgttgtaaggacttgataacctggctacagcgttttctatgaaatctacttggatcccatgcctgaaatttggaagcatatgtacaaaaatcatttttacgttttatttttaataaatcattgtgtttgaccgtacatgtctaacattttttttctaggatccattccgtaccgttttttaagggatatttgtttaagactttacgtgttaattctttattcttgatgtgtacttagagaaacttaagaggtcctgtggtttttttcccctctcctgttgccctgctagttgcgtgttgaattatatcccttacaggcaaaacttttgaagtggtggatgtggctttttaaactcttaagtttctgtgcatccatctcttgtactaagcgaattgtttatcatcttgacatggttggtcatttctatgacaatttacttcaaactgtgtactgtgtagttctatatagtttgtgttaagcatgtcattcatataaactgtttaaaatttttcagatggcctagtttcatccctcttactggtttgtctgtaatgaatggttaaaaataagggttatattttaccctcaaatgcgtttttgtactttcagagcaggtttaaacgttttttttttttttttcctatatccgaactgttggcctcatggaaatccctttcccgatctttgtagcaccatctactggcagaatggcagagtagctgcgaaacaatttgtttaaaaacttgcttaagacaattgcatcagatttggaagttttgccatcaaaattctttgcagaattggaagttaacacatttgcttgtaactgagatgggcttcacaggaatgtagttgccagttcatatcacaatagccctttctatatgaggtttgaaaatgtaaactgctatgcatagcttgggcaatagccctaaattgctatgacaactaatgaaccagctacgtatactggtattttaggtgcaagttgtaaagcaaaatatctgtgtattctgcttggttaacaaatgtatatttgtagccctttcctgcaatagcattcaagttgttgtttataagagaagaacaaaagtgataataggtgaaaattgcctttctggatagaaatagagaatagcaacgtttatggatatcacaaataaagaattcaattctttacatg

SEQ ID NO: 11899 - protein, 108 aa, Homo sapiens; identical to SEQ ID NO: 11871

SEQ ID NO: 11900 - DNA, 2393 bp, Homo sapiens
ctctttgtgtggtgcccagataggggagcggaggtggcggcggcggcggtagcggtggccttggttgtcttccagtctcctcggctcgccctttagccggcaccgctccccttccctcccccttcctctcttccttccttccctccccttccctttttcccttccccgtcggtgagcggcgggggtggctccagcaacggctgggcccaagctgtgtagaggccttaaccaacgataacggcggcgacggcgaaacctcggagctcgcagggcgggggcaaggcccgggccttggagatggagaattctcagttgtgtaagctgttcatcggcggcctcaatgtgcagacgagtgagtcgggcctgcgcggccactttgaggcctttgggactctgacggactgcgtggtggtggtgaatccccagaccaagcgctcccgttgctttggcttcgtgacctactccaatgtggaggaggcggacgccgccatggccgcctcgccccatgccgtgaacggcctttccaagggcggcggcggcggttacaacagctacggtggttacggcggcggcggaggcggcggctacaatgcctacggaggcggcggcggcggttcgtcctacggtgggagcgactacggtaacggcttcggcggcttcggcagctacagccagcatcagtcctcctatgggcccatgaagagcggcggcggcggcggcggtggaggcagtagctggggcggtcgcagtaatagtggaccttacagaggcggctatggcggtgggggtggctatggaggcagctccttctaaaagaaaatttaaaatgcctgggagtggctataggggtagctctttccaacagcccaagtggggtcaactcctaagccccaccccctcacacacaccgccttccctgttttgcccttgggggagccacttctaaggctgcttacccttgggggtgttcctctatttgcctgccacctctcttgtctctccctctgaagatggactcggccccacatacacatttttgtgttacagtcattgatggactctatttttttattattacttggaccttggtcgtttttatactagcaaaatgtcttgttttaatttgtgttttttggggggagggagggagtgaacttgctgattctgtagcaaaacctgggtgggggttggggtggggggtagtttactttgttgtaaggacttgataacctggctacagcgttttctatgaaatctacttggatcccatgcctgaaatttggaagcatatgtacaaaaatcatttttacgttttatttttaataaatcattgtgtttgaccgtacatgtctaacattttttttctaggatccattccgtaccgttttttaagggatatttgtttaagactttacgtgttaattctttattcttgatgtgtacttagagaaacttaagaggtcctgtggtttttttcccctctcctgttgccctgctagttgcgtgttgaattatatcccttacaggcaaaacttttgaagtggtggatgtggctttttaaactcttaagtttctgtgcatccatctcttgtactaagcgaattgtttatcatcttgacatggttggtcatttctatgacaatttacttcaaactgtgtactgtgtagttctatatagtttgtgttaagcatgtcattcatataaactgtttaaaatttttcagatggcctagtttcatccctcttactggtttgtctgtaatgaatggttaaaaataagggttatattttaccctcaaatgcgtttttgtactttcagagcaggtttaaacgttttttttttttttttcctatatccgaactgttggcctcatggaaatccctttcccgatctttgtagcaccatctactggcagaatggcagagtagctgcgaaacaatttgtttaaaaacttgcttaagacaattgcatcagatttggaagttttgccatcaaaattctttgcagaattggaagttaacacatttgcttgtaactgagatgggcttcacaggaatgtagttgccagttcatatcacaatagccctttctatatgaggtttgaaaatgtaaactgctatgcatagcttgggcaatagccctaaattgctatgacaactaatgaaccagctacgtatactggtattttaggtgcaagttgtaaagcaaaatatctgtgtattctgcttggttaacaaatgtatatttgtagccctttcctgcaatagcattcaagttgttgtttataagagaagaacaaaagtgataataggtgaaaattgcctttctggatagaaatagagaatagcaacgtttatggatatcacaaataaagaattcaattctttacatg

SEQ ID NO: 11901 - protein, 171 aa, Homo sapiens; identical to SEQ ID NO: 11873

SEQ ID NO: 11902 - DNA, 2734 bp, Homo sapiens
gcggcctctttgtgtggtgcccagataggggagcggaggtggcggcggcggcggtagcggtggccttggttgtcttccagtctcctcggctcgccctttagccggcaccgctccccttccctcccccttcctctcttccttccttccctccccttccctttttcccttccccgtcggtgagcggcgggggtggctccagcaacggctgggcccaagctgtgtagaggccttaaccaacgataacggcggcgacggcgaaacctcggagctcgcagggcgggggcaaggcccgggccttggagatggagaattctcagttgtgtaagctgttcatcggcggcctcaatgtgcagacgagtgagtcgggcctgcgcggccactttgaggcctttgggactctgacggactgcgtggtggtggtgaatccccagaccaagcgctcccgttgctttggcttcgtgacctactccaatgtggaggaggcggacgccgccatggccgcctcgccccatgccgtggacggcaacactgtggagctgaagcgggcggtgtcccgggaggattcggcgcggcccggtgcccacgccaaggttaagaagctctttgtcggaggccttaaaggagacgtggctgagggcgacctgatcgagcacttctcgcagtttggcaccgtggaaaaggccgagattattgccgacaagcagtccggcaagaagcgtggattcggcttcgtgtatttccagaatcacgacgcggcagacaaggccgcggtggtcaagttccatccgattcagggccatcgcgtggaggtgaagaaagcagtccccaaggaggatatctactccggtgggggtggaggcggctcccgatcctcccggggcggccgaggcggccgggggcgcggcggtggtcgagaccagaacggcctttccaagggcggcggcggcggttacaacagctacggtggttacggcggcggcggaggcggcggctacaatgcctacggaggcggcggcggcggttcgtcctacggtgggagcgactacggtaacggcttcggcggcttcggcagctacagccagcatcagtcctcctatgggcccatgaagagcggctatggcggtgggggtggctatggaggcagctccttctaaaagaaaatttaaaatgcctgggagtggctataggggtagctctttccaacagcccaagtggggtcaactcctaagccccaccccctcacacacaccgccttccctgttttgcccttgggggagccacttctaaggctgcttacccttgggggtgttcctctatttgcctgccacctctcttgtctctccctctgaagatggactcggccccacatacacatttttgtgttacagtcattgatggactctatttttttattattacttggaccttggtcgtttttatactagcaaaatgtcttgttttaatttgtgttttttggggggagggagggagtgaacttgctgattctgtagcaaaacctgggtgggggttggggtggggggtagtttactttgttgtaaggacttgataacctggctacagcgttttctatgaaatctacttggatcccatgcctgaaatttggaagcatatgtacaaaaatcatttttacgttttatttttaataaatcattgtgtttgaccgtacatgtctaacattttttttctaggatccattccgtaccgttttttaagggatatttgtttaagactttacgtgttaattctttattcttgatgtgtacttagagaaacttaagaggtcctgtggtttttttcccctctcctgttgccctgctagttgcgtgttgaattatatcccttacaggcaaaacttttgaagtggtggatgtggctttttaaactcttaagtttctgtgcatccatctcttgtactaagcgaattgtttatcatcttgacatggttggtcatttctatgacaatttacttcaaactgtgtactgtgtagttctatatagtttgtgttaagcatgtcattcatataaactgtttaaaatttttcagatggcctagtttcatccctcttactggtttgtctgtaatgaatggttaaaaataagggttatattttaccctcaaatgcgtttttgtactttcagagcaggtttaaacgttttttttttttttttcctatatccgaactgttggcctcatggaaatccctttcccgatctttgtagcaccatctactggcagaatggcagagtagctgcgaaacaatttgtttaaaaacttgcttaagacaattgcatcagatttggaagttttgccatcaaaattctttgcagaattggaagttaacacatttgcttgtaactgagatgggcttcacaggaatgtagttgccagttcatatcacaatagccctttctatatgaggtttgaaaatgtaaactgctatgcatagcttgggcaatagccctaaattgctatgacaactaatgaaccagctacgtatactggtattttaggtgcaagttgtaaagcaaaatatctgtgtattctgcttggttaacaaatgtatatttgtagccctttcctgcaatagcattcaagttgttgtttataagagaagaacaaaagtgataataggtgaaaattgcctttctggatagaaatagagaatagcaacgtttatggatatcacaaataaagaattcaattctttacatg

SEQ ID NO: 11903 - protein, 283 aa, Homo sapiens; identical to SEQ ID NO: 11875

SEQ ID NO: 11904 - DNA, 2729 bp, Homo sapiens
acgcctcggggagggtgcgcgcgcgttcagcggcctctttgtgtggtgcccagataggggagcggaggtggcggcggcggcggtagcggtggccttggttgtcttccagtctcctcggctcgccctttagccggcaccgctccccttccctcccccttcctctcttccttccttccctccccttccctttttcccttccccgtcggtgagcggcgggggtggctccagcaacggctgggcccaagctgtgtagaggccttaaccaacgataacggcggcgacggcgaaacctcggagctcgcagggcgggggcaaggcccgggccttggagatggagaattctcagttgtgtaagctgttcatcggcggcctcaatgtgcagacgagtgagtcgggcctgcgcggccactttgaggcctttgggactctgacggactgcgtggtggtggtgaatccccagaccaagcgctcccgttgctttggcttcgtgacctactccaatgtggaggaggcggacgccgccatggccgcctcgccccatgccgtggacggcaacactgtggagctgaagcgggcggtgtcccgggaggattcggcgcggcccggtgcccacgccaaggttaagaagctctttgtcggaggccttaaaggagacgtggctgagggcgacctgatcgagcacttctcgcagtttggcaccgtggaaaaggccgagattattgccgacaagcagtccggcaagaagcgtggattcggcttcgtgtatttccagaatcacgacgcggcagacaaggccgcggtggtcaagttccatccgattcagggccatcgcgtggaggtgaagaaagcagtccccaaggaggatatctactccggtgggggtggaggcggctcccgatcctcccggggcggccgaggcggccgggggcgcggcggtggtcgagaccagaacggcctttccaagggcggcggcggcggttacaacagctacggtggttacggcggcggcggaggcggcggctacaatgcctacggaggcgcggcggcggcggcggcggtggaggcagtagctggggcggtcgcagtaatagtggaccttacagaggcggctatggcggtgggggtggctatggaggcagctccttctaaaagaaaatttaaaatgcctgggagtggctataggggtagctctttccaacagcccaagtggggtcaactcctaagccccaccccctcacacacaccgccttccctgttttgcccttgggggagccacttctaaggctgcttacccttgggggtgttcctctatttgcctgccacctctcttgtctctccctctgaagatggactcggccccacatacacatttttgtgttacagtcattgatggactctatttttttattattacttggaccttggtcgtttttatactagcaaaatgtcttgttttaatttgtgttttttggggggagggagggagtgaacttgctgattctgtagcaaaacctgggtgggggttggggtggggggtagtttactttgttgtaaggacttgataacctggctacagcgttttctatgaaatctacttggatcccatgcctgaaatttggaagcatatgtacaaaaatcatttttacgttttatttttaataaatcattgtgtttgaccgtacatgtctaacattttttttctaggatccattccgtaccgttttttaagggatatttgtttaagactttacgtgttaattctttattcttgatgtgtacttagagaaacttaagaggtcctgtggtttttttcccctctcctgttgccctgctagttgcgtgttgaattatatcccttacaggcaaaacttttgaagtggtggatgtggctttttaaactcttaagtttctgtgcatccatctcttgtactaagcgaattgtttatcatcttgacatggttggtcatttctatgacaatttacttcaaactgtgtactgtgtagttctatatagtttgtgttaagcatgtcattcatataaactgtttaaaatttttcagatggcctagtttcatccctcttactggtttgtctgtaatgaatggttaaaaataagggttatattttaccctcaaatgcgtttttgtactttcagagcaggtttaaacgttttttttttttttttcctatatccgaactgttggcctcatggaaatccctttcccgatctttgtagcaccatctactggcagaatggcagagtagctgcgaaacaatttgtttaaaaacttgcttaagacaattgcatcagatttggaagttttgccatcaaaattctttgcagaattggaagttaacacatttgcttgtaactgagatgggcttcacaggaatgtagttgccagttcatatcacaatagccctttctatatgaggtttgaaaatgtaaactgctatgcatagcttgggcaatagccctaaattgctatgacaactaatgaaccagctacgtatactggtattttaggtgcaagttgtaaagcaaaatatctgtgtattctgcttggttaacaaatgtatatttgtagccctttcctgcaatagcattcaagttgttgtttataagagaagaacaaaagtgataataggtgaaaattgcctttctggatagaaatagagaatagcaacgtttatggatatcacaaataaagaattcaattctttacatg

SEQ ID NO: 11905 - protein, 316 aa, Homo sapiens; identical to SEQ ID NO: 11877

SEQ ID NO: 11906 - DNA, 2785 bp, Homo sapiens
ctctttgtgtggtgcccagataggggagcggaggtggcggcggcggcggtagcggtggccttggttgtcttccagtctcctcggctcgccctttagccggcaccgctccccttccctcccccttcctctcttccttccttccctccccttccctttttcccttccccgtcggtgagcggcgggggtggctccagcaacggctgggcccaagctgtgtagaggccttaaccaacgataacggcggcgacggcgaaacctcggagctcgcagggcgggggcaaggcccgggccttggagatggagaattctcagttgtgtaagctgttcatcggcggcctcaatgtgcagacgagtgagtcgggcctgcgcggccactttgaggcctttgggactctgacggactgcgtggtggtggtgaatccccagaccaagcgctcccgttgctttggcttcgtgacctactccaatgtggaggaggcggacgccgccatggccgcctcgccccatgccgtggacggcaacactgtggagctgaagcgggcggtgtcccgggaggattcggcgcggcccggtgcccacgccaaggttaagaagctctttgtcggaggccttaaaggagacgtggctgagggcgacctgatcgagcacttctcgcagtttggcaccgtggaaaaggccgagattattgccgacaagcagtccggcaagaagcgtggattcggcttcgtgtatttccagaatcacgacgcggcagacaaggccgcggtggtcaagttccatccgattcagggccatcgcgtggaggtgaagaaagcagtccccaaggaggatatctactccggtgggggtggaggcggctcccgatcctcccggggcggccgaggcggccgggggcgcggcggtggtcgagaccagaacggcctttccaagggcggcggcggcggttacaacagctacggtggttacggcggcggcggaggcggcggctacaatgcctacggaggcggcggcggcggttcgtcctacggtgggagcgactacggtaacggcttcggcggcttcggcagctacagccagcatcagtcctcctatgggcccatgaagagcggcggcggcggcggcggtggaggcagtagctggggcggtcgcagtaatagtggaccttacagaggcggctatggcggtgggggtggctatggaggcagctccttctaaaagaaaatttaaaatgcctgggagtggctataggggtagctctttccaacagcccaagtggggtcaactcctaagccccaccccctcacacacaccgccttccctgttttgcccttgggggagccacttctaaggctgcttacccttgggggtgttcctctatttgcctgccacctctcttgtctctccctctgaagatggactcggccccacatacacatttttgtgttacagtcattgatggactctatttttttattattacttggaccttggtcgtttttatactagcaaaatgtcttgttttaatttgtgttttttggggggagggagggagtgaacttgctgattctgtagcaaaacctgggtgggggttggggtggggggtagtttactttgttgtaaggacttgataacctggctacagcgttttctatgaaatctacttggatcccatgcctgaaatttggaagcatatgtacaaaaatcatttttacgttttatttttaataaatcattgtgtttgaccgtacatgtctaacattttttttctaggatccattccgtaccgttttttaagggatatttgtttaagactttacgtgttaattctttattcttgatgtgtacttagagaaacttaagaggtcctgtggtttttttcccctctcctgttgccctgctagttgcgtgttgaattatatcccttacaggcaaaacttttgaagtggtggatgtggctttttaaactcttaagtttctgtgcatccatctcttgtactaagcgaattgtttatcatcttgacatggttggtcatttctatgacaatttacttcaaactgtgtactgtgtagttctatatagtttgtgttaagcatgtcattcatataaactgtttaaaatttttcagatggcctagtttcatccctcttactggtttgtctgtaatgaatggttaaaaataagggttatattttaccctcaaatgcgtttttgtactttcagagcaggtttaaacgttttttttttttttttcctatatccgaactgttggcctcatggaaatccctttcccgatctttgtagcaccatctactggcagaatggcagagtagctgcgaaacaatttgtttaaaaacttgcttaagacaattgcatcagatttggaagttttgccatcaaaattctttgcagaattggaagttaacacatttgcttgtaactgagatgggcttcacaggaatgtagttgccagttcatatcacaatagccctttctatatgaggtttgaaaatgtaaactgctatgcatagcttgggcaatagccctaaattgctatgacaactaatgaaccagctacgtatactggtattttaggtgcaagttgtaaagcaaaatatctgtgtattctgcttggttaacaaatgtatatttgtagccctttcctgcaatagcattcaagttgttgtttataagagaagaacaaaagtgataataggtgaaaattgcctttctggatagaaatagagaatagcaacgtttatggatatcacaaataaagaattcaat

SEQ ID NO: 11907 - protein, 305 aa, Homo sapiens; identical to SEQ ID NO: 1128

SEQ ID NO: 11908 - DNA, 1224 bp, Homo sapiens
cggactgcgtggtggtggtgaatccccagaccaagcgctcccgttgctttggcttcgtgacctactccaatgtggaggaggcggacgccgccatggccgcctcgccccatgccgtggacggcaacactgtggagctgaagcgggcggtgtcccgggaggattcggcgcggcccggtgcccacgccaaggttaagaagctctttgtcggaggccttaaaggagacgtggctgagggcgacctgatcgagcacttctcgcagtttggcaccgtggaaaaggccgagattattgccgacaagcagtccggcaagaagcgtggattcggcttcgtgtatttccagaatcacgacgcggcagacaaggccgcggtggtcaagttccatccgattcagggccatcgcgtggaggtgaagaaagcagtccccaaggaggatatctactccggtgggggtggaggcggctcccgatcctcccggggcggccgaggcggccgggggcgcggcggtggtcgagaccagaacggcctttccaagggcggcggcggcggttacaacagctacggtggttacggcggcggcggaggcggcggctacaatgcctacggaggcggcggcggcggttcgtcctacggtgggagcgactacggtaacggcttcggcggcttcggcagctacagccagcatcagtcctcctatgggcccatgaagagcggcggcggcggcggcggtggaggcagtagctggggcggtcgcagtaatagtggaccttacagaggcggctatggcggtgggggtggctatggaggcagctccttctaaaagaaaatttaaaatgcctgggagtggctataggggtagctctttccaacagcccaagtggggtcaactcctaagccccaccccctcacacaacatttttgtgttacagtcattgatggactctatttttttattattacttggaccttggtcgtttttatactagcaaaatgtcttgttttaatttgtgttttttggggggagggagggagtgaacttgctgattctgtagcaaaacctgggtgggggttggggtggggggtagtttactttgttgtaaggacttgataacctggctacagcgttttctatgaaatctacttggatcccatgcctgaaatttggaagcatatgtacaaaaatcatttttacgttttatttttaataaatcattgtgtttgaccgt

SEQ ID NO: 11909 - protein, 67 aa, Homo sapiens [sequence omitted]

SEQ ID NO: 11910 - DNA, 988 bp, Homo sapiens
ggtgcccagataggggagcggaggtggcggcggcggcggtagcggtggccttggttgtcttccagtctcctcggctcgccctttagccggcaccgctccccttccctcccccttcctctcttccttccttccctccccttccctttttcccttccccgtcggtgagcggcgggggtggctccagcaacggctgggcccaagctgtgtagaggccttaaccaacgataacggcggcgacggcgaaacctcggagctcgcagggcgggggcaaggcccgggccttggagatggagaattctcagttgtgtaagctgttcatcggcggcctcaatgtgcagacgagtgagtcgggcctgcgcggccactttgaggcagtagctggggcggtcgcagtaatagtggaccttacagaggcggctatggcggtgggggtggctatggaggcagctccttctaaaagaaaatttaaaatgcctgggagtggctataggggtagctctttccaacagcccaagtggggtcaactcctaagccccaccccctcacacacaccgccttccctgttttgcccttgggggagccacttctaaggctgcttacccttgggggtgttcctctatttgcctgccacctctcttgtctctccctctgaagatggactcggccccacatacacatttttgtgttacagtcattgatggactctatttttttattattacttggaccttggtcgtttttatactagcaaaatgtcttgttttaatttgtgttttttggggggagggagggagtgaacttgctgattctgtagcaaaacctgggtgggggttggggtggggggtagtttactttgttgtaaggacttgataacctggctacagcgttttctatgaaatctacttggatcccatgcctgaaatttggaagcatatgtacaaaaatcatttttacgttttatttttaataaatcattgtgtttgaccgt

SEQ ID NO: 11911 - protein, 100 aa, Homo sapiens
MENSQLCKLFIGGLNVQTSESGLRGHFEAVAGAVAVIVDLTEAAMAVGVAMEAAPSKRKFKMPGSGYRGSSFQQPKWGQLLSPTPSHTPPSLFCPWGSHF

SEQ ID NO: 11912 - DNA, 1013 bp, Homo sapiens
tggtgcccagataggggagcggaggtggcggcggcggcggtagcggtggccttggttgtcttccagtctcctcggctcgccctttagccggcaccgctccccttccctcccccttcctctcttccttccttccctccccttccctttttcccttccccgtcggtgagcggcgggggtggctccagcaacggctgggcccaagctgtgtagaggccttaaccaacgataacggcggcgacggcgaaacctcggagctcgcagggcgggggcaaggcccgggccttggagatggagaattctcagttgtgtaagctgttcatcggcggcctcaatgtgcagacgagtgagtcgggcctgcgcggccactttgaggcctttgggactctgacggactgcgtggtggtggtgaatccccagaccaagcgctcccgttgctttggggctatggcggtgggggtggctatggaggcagctccttctaaaagaaaatttaaaatgcctgggagtggctataggggtagctctttccaacagcccaagtggggtcaactcctaagccccaccccctcacacacaccgccttccctgttttgcccttgggggagccacttctaaggctgcttacccttgggggtgttcctctatttgcctgccacctctcttgtctctccctctgaagatggactcggccccacatacacatttttgtgttacagtcattgatggactctatttttttattattacttggaccttggtcgtttttatactagcaaaatgtcttgttttaatttgtgttttttggggggagggagggagtgaacttgctgattctgtagcaaaacctgggtgggggttggggtggggggtagtttactttgttgtaaggacttgataacctggctacagcgttttctatgaaatctacttggatcccatgcctgaaatttggaagcatatgtacaaaaatcatttttacgttttatttttaataaatcattgtgtttgaccgt

SEQ ID NO: 11913 - protein, 108 aa, Homo sapiens; identical to SEQ ID NO: 11871

SEQ ID NO: 11914 - DNA, 1344 bp, Homo sapiens
ctctttgtgtggtgcccagataggggagcggaggtggcggcggcggcggtagcggtggccttggttgtcttccagtctcctcggctcgccctttagccggcaccgctccccttccctcccccttcctctcttccttccttccctccccttccctttttcccttccccgtcggtgagcggcgggggtggctccagcaacggctgggcccaagctgtgtagaggccttaaccaacgataacggcggcgacggcgaaacctcggagctcgcagggcgggggcaaggcccgggccttggagatggagaattctcagttgtgtaagctgttcatcggcggcctcaatgtgcagacgagtgagtcgggcctgcgcggccactttgaggcctttgggactctgacggactgcgtggtggtggtgaatccccagaccaagcgctcccgttgctttggcttcgtgacctactccaatgtggaggaggcggacgccgccatggccgcctcgccccatgccgtgaacggcctttccaagggcggcggcggcggttacaacagctacggtggttacggcggcggcggaggcggcggctacaatgcctacggaggcggcggcggcggttcgtcctacggtgggagcgactacggtaacggcttcggcggcttcggcagctacagccagcatcagtcctcctatgggcccatgaagagcggcggcggcggcggcggtggaggcagtagctggggcggtcgcagtaatagtggaccttacagaggcggctatggcggtgggggtggctatggaggcagctccttctaaaagaaaatttaaaatgcctgggagtggctataggggtagctctttccaacagcccaagtggggtcaactcctaagccccaccccctcacacacaccgccttccctgttttgcccttgggggagccacttctaaggctgcttacccttgggggtgttcctctatttgcctgccacctctcttgtctctccctctgaagatggactcggccccacatacacatttttgtgttacagtcattgatggactctatttttttattattacttggaccttggtcgtttttatactagcaaaatgtcttgttttaatttgtgttttttggggggagggagggagtgaacttgctgattctgtagcaaaacctgggtgggggttggggtggggggtagtttactttgttgtaaggacttgataacctggctacagcgttttctatgaaatctacttggatcccatgcctgaaatttggaagcatatgtacaaaaatcatttttacgttttatttttaataaatcattgtgtttgaccgt

SEQ ID NO: 11915 - protein, 171 aa, Homo sapiens; identical to SEQ ID NO: 11873

SEQ ID NO: 11916 - DNA, 1685 bp, Homo sapiens
gcggcctctttgtgtggtgcccagataggggagcggaggtggcggcggcggcggtagcggtggccttggttgtcttccagtctcctcggctcgccctttagccggcaccgctccccttccctcccccttcctctcttccttccttccctccccttccctttttcccttccccgtcggtgagcggcgggggtggctccagcaacggctgggcccaagctgtgtagaggccttaaccaacgataacggcggcgacggcgaaacctcggagctcgcagggcgggggcaaggcccgggccttggagatggagaattctcagttgtgtaagctgttcatcggcggcctcaatgtgcagacgagtgagtcgggcctgcgcggccactttgaggcctttgggactctgacggactgcgtggtggtggtgaatccccagaccaagcgctcccgttgctttggcttcgtgacctactccaatgtggaggaggcggacgccgccatggccgcctcgccccatgccgtggacggcaacactgtggagctgaagcgggcggtgtcccgggaggattcggcgcggcccggtgcccacgccaaggttaagaagctctttgtcggaggccttaaaggagacgtggctgagggcgacctgatcgagcacttctcgcagtttggcaccgtggaaaaggccgagattattgccgacaagcagtccggcaagaagcgtggattcggcttcgtgtatttccagaatcacgacgcggcagacaaggccgcggtggtcaagttccatccgattcagggccatcgcgtggaggtgaagaaagcagtccccaaggaggatatctactccggtgggggtggaggcggctcccgatcctcccggggcggccgaggcggccgggggcgcggcggtggtcgagaccagaacggcctttccaagggcggcggcggcggttacaacagctacggtggttacggcggcggcggaggcggcggctacaatgcctacggaggcggcggcggcggttcgtcctacggtgggagcgactacggtaacggcttcggcggcttcggcagctacagccagcatcagtcctcctatgggcccatgaagagcggctatggcggtgggggtggctatggaggcagctccttctaaaagaaaatttaaaatgcctgggagtggctataggggtagctctttccaacagcccaagtggggtcaactcctaagccccaccccctcacacacaccgccttccctgttttgcccttgggggagccacttctaaggctgcttacccttgggggtgttcctctatttgcctgccacctctcttgtctctccctctgaagatggactcggccccacatacacatttttgtgttacagtcattgatggactctatttttttattattacttggaccttggtcgtttttatactagcaaaatgtcttgttttaatttgtgttttttggggggagggagggagtgaacttgctgattctgtagcaaaacctgggtgggggttggggtggggggtagtttactttgttgtaaggacttgataacctggctacagcgttttctatgaaatctacttggatcccatgcctgaaatttggaagcatatgtacaaaaatcatttttacgttttatttttaataaatcattgtgtttgaccgt

SEQ ID NO: 11917 - protein, 283 aa, Homo sapiens; identical to SEQ ID NO: 11875

SEQ ID NO: 11918 - DNA, 1680 bp, Homo sapiens
acgcctcggggagggtgcgcgcgcgttcagcggcctctttgtgtggtgcccagataggggagcggaggtggcggcggcggcggtagcggtggccttggttgtcttccagtctcctcggctcgccctttagccggcaccgctccccttccctcccccttcctctcttccttccttccctccccttccctttttcccttccccgtcggtgagcggcgggggtggctccagcaacggctgggcccaagctgtgtagaggccttaaccaacgataacggcggcgacggcgaaacctcggagctcgcagggcgggggcaaggcccgggccttggagatggagaattctcagttgtgtaagctgttcatcggcggcctcaatgtgcagacgagtgagtcgggcctgcgcggccactttgaggcctttgggactctgacggactgcgtggtggtggtgaatccccagaccaagcgctcccgttgctttggcttcgtgacctactccaatgtggaggaggcggacgccgccatggccgcctcgccccatgccgtggacggcaacactgtggagctgaagcgggcggtgtcccgggaggattcggcgcggcccggtgcccacgccaaggttaagaagctctttgtcggaggccttaaaggagacgtggctgagggcgacctgatcgagcacttctcgcagtttggcaccgtggaaaaggccgagattattgccgacaagcagtccggcaagaagcgtggattcggcttcgtgtatttccagaatcacgacgcggcagacaaggccgcggtggtcaagttccatccgattcagggccatcgcgtggaggtgaagaaagcagtccccaaggaggatatctactccggtgggggtggaggcggctcccgatcctcccggggcggccgaggcggccgggggcgcggcggtggtcgagaccagaacggcctttccaagggcggcggcggcggttacaacagctacggtggttacggcggcggcggaggcggcggctacaatgcctacggaggcgcggcggcggcggcggcggtggaggcagtagctggggcggtcgcagtaatagtggaccttacagaggcggctatggcggtgggggtggctatggaggcagctccttctaaaagaaaatttaaaatgcctgggagtggctataggggtagctctttccaacagcccaagtggggtcaactcctaagccccaccccctcacacacaccgccttccctgttttgcccttgggggagccacttctaaggctgcttacccttgggggtgttcctctatttgcctgccacctctcttgtctctccctctgaagatggactcggccccacatacacatttttgtgttacagtcattgatggactctatttttttattattacttggaccttggtcgtttttatactagcaaaatgtcttgttttaatttgtgttttttggggggagggagggagtgaacttgctgattctgtagcaaaacctgggtgggggttggggtggggggtagtttactttgttgtaaggacttgataacctggctacagcgttttctatgaaatctacttggatcccatgcctgaaatttggaagcatatgtacaaaaatcatttttacgttttatttttaataaatcattgtgtttgaccgt

SEQ ID NO: 11919 - protein, 316 aa, Homo sapiens; identical to SEQ ID NO: 11877

SEQ ID NO: 11920 - DNA, 891 bp, Homo sapiens
cctcacaggactgaatatagtagtcctcccttatcattgagggatacgttccaagatccccagtggatgcctgaaattgtggatagtgctgaagcctgtgtacacagtgttttttttctggaccataatggatgggttgcatatgcagcatggatatactggacaaagcggtgattcataccctaggcgggacagagcacgatgaaaatgcatcaaagtaaaagaagaaaatttgcaacaacagtcatccataaatctaccacctggatagaatccctgaaccattatggcatattttctgacagtgctatataatgtgtttctttgttatgaagattttcaaacatacaaaagttaaaaggaggatgtgcaggggaatatgttatgtgcacttttgttgccaaccaacaccacaggtgcagaactattcaagactttgattacatatcagaaaaacggaattggtcattttgtgtcagtatatgcacagacagagtggctgatatgactggatggctttctggtttcactactcaggtcaaagaggtcacttctgaatgtgagtctatgcactgtgtcatctacagagaaatgccgggtagccgaaaattgtcacccgaacttaaggttttacaggatgtgattaaaattatcaatgacattaaagtgcatgcccttaactcaatgtctgtttgcgcaactctgtgagatgtgtataagaaatgagatggctttctaaaggtagataactggccagaatttttgagttatgagagccactccagagatttcttttacaaaaacagtcaccactagcagcacatttcagtgacatagaatgggtggcaaaacttgtttacttgtgtgacacattcaacctgctcagtgaat

SEQ ID NO: 11921 - protein, 41 aa, Homo sapiens
MCFFVMKIFKHTKVKRRMCRGICYVHFCCQPTPQVQNYSRL

SEQ ID NO: 11922 - DNA, 838 bp, Homo sapiens
aatcctctgtgcaatgattccaactccagggatcagtgtctgaagtgaagctacagattgtctggtggataaataatccaagaaggaacgggggatgttatgactttttgagagaaggctaacatgtcatccttgacagataaactttaaaaaattataataatggaaatgaagaaagaaaacaacagaagatgagaatagcaaaagagctagacatttccgacagggtctcaagagcacgctcaagtcattcacatgtttccatcaaatacagacacagatcagggaagattaaaccctactaatttctcgtcggatgcctcacaacaaggtgccttccaagaactaatggccaaaatatccacccacaacacaaataagcttagaaaatctcttcttacaatcctgacacaatggaagtttccctaaaccacccagcatctaatacaaccagcacaaagaacaacaactcggcatttttttactttgagtcctgtcaacccccttctccagctttactcctattatgcatagcctatactgtggtcttaattgtgggcctttttggaaacctctctctcatcatcatcatctttaagaagcagagaaaagctcagaatttcaccagcatactgattgccaatctctccctctctgataccttggtgtgtgtcatgtgcatccattttactatcatctacactctgatggaccactggatatttggggataccatgtgcagactcacatcctatgtgcagagtgtctcaatctctgtgtccatattctcacttgtattcactgctgtcgaaagatatcagctaattgtgaacccccg

SEQ ID NO: 11923 - protein, 37 aa, Homo sapiens
MRIAKELDISDRVSRARSSHSHVSIKYRHRSGKIKPY

SEQ ID NO: 11924 - DNA, 3508 bp, Homo sapiens
ttgatagggatagaaacacatttggctgcttctatagttaacaagatgctgttacattccttgcctcactagctctgaagactatactagcgggacaaagaaagcacctgagatgagctgagaggagggtaaaggtacacagagatcccctggatatttgttctatgtcctctcaggggctttgctaccactagagaattatccatattaagaacttgcattgatattctgggttctgtttcattttttagggtctcaagagcacgctcaagtcattcacatgtttccatcaaatacagacacagatcagggaagattaaaccctactaatttctcgtcggatgcctcacaacaaggtgccttccaagaactaatggccaaaatatccacccacaacacaaataagcttagaaaatctcttcttacaatcctgacacaatggaagtttccctaaaccacccagcatctaatacaaccagcacaaagaacaacaactcggcatttttttactttgagtcctgtcaacccccttctccagctttactcctattatgcatagcctatactgtggtcttaattgtgggcctttttggaaacctctctctcatcatcatcatctttaagaagcagagaaaagctcagaatttcaccagcatactgattgccaatctctccctctctgataccttggtgtgtgtcatgtgcatccattttactatcatctacactctgatggaccactggatatttggggataccatgtgcagactcacatcctatgtgcagagtgtctcaatctctgtgtccatattctcacttgtattcactgctgtcgaaagatatcagctaattgtgaacccccgtggctggaagcccagtgtgactcatgcctactggggcatcacactgatttggctgttttcccttctgctgtctattcccttcttcctgtcctaccacctcactgatgagcccttccgcaacctctctctccccactgacctctacacccaccaggtggcctgtgtggagaactggccctccaaaaaggaccggctgctcttcaccacctccctttttctgctgcagtattttgttcctctaggcttcatcctcatctgctacttgaagattgttatctgcctccgcaggagaaatgcaaaggtagataagaagaaggaaaatgagggccggctcaatgagaacaagaggatcaacacaatgttgatttccatcgtggtgacctttggagcctgctggctgccccgaatatcttcaatgtcatctttgactggtatcatgaggtgctgatgagctgccaccacgacctggtatttgtagtttgccacttggttgctatggtttccacatgtataaaccctctcttttatggctttctcaacaaaaatttccaaaaggacctggtagtgcttattcaccactgctggtgcttcacacctcaggaaagatgtgaaaatattgccatctccactatgcacacagactccaagaggtctttaagattggctcgtataacaacaggtatatgaaaattgataatgctgaagctcttcttgaatgggagctggacaggtaatggtgggaatagggcaagatgcagaaagaagaaaccagaaccaaaaatagcaactttatacccacttttcctttaggctaagactgcctgtctcatatgtctatccaacacaccctccaacatacacgaacacacataccaccccttttctcttaagaaaataactctaataattcaaacaacctgcccgccatcatttgtggcaaagaatgagaatgagaaagcagagagagaggcaaacagcagtgatggctggggaacaatgttcacagatacttttattcaatggaatatctacaaaagttatgactaatgatatgcctagtaaaaacactgctatacctccttagcactgaagcaagtctattctcagatatgaaaactgtaactttcaatcatataactattcaattaattagccaagtcagaaaatccccccttaaaattcattaattaattaacaaactaagtttggactaaagttgaagggctggttttaacttaacatttaaacgaagtgttgtaattacaattaattcccatgcttgaatcatatctccagtttatgataacagtacattttattcactaacaatgctattagaactggccacaaattctttagcatagcaattatgctagaaattgctctaacaaacttattaatggccaatgtagatacagctttcctcacaaagtggcttttaatccctaattctttatgtatattaaaaagaggtcattatgactctattactggatctcagagactttgtcagtagcatttttataattagcgccagatttttaaaaccttctcatatatcttgtggcttaaacatttttaaaagagccctcatccccacagagttgcttacacaggggaatcaactagactgttctcaaaagacactaagctactgttcaaattgctattaactgaagtcacttttattaaattgtgaccagctttaccacttcttagaacaaacctcccctatatctatcaaagttgaactgcagcttatttgtatgttaaaaatgtaactgtaggctggactcagcaacttacacctgtaatcccagccctttgggaggccaaggtggaggatcacttttgcccaggagttgaagaccagcctgagcaacacagtgagactccatctctactaaaaatacaaaaaattagccaggtgtggtcatgcatacctgcagtcccagctacttagatgagaggaaggatcacctgagcctgggagatcaagtgagtcatgatcacaccactgcactccaacctggatgaaagagtgagaccctgtctcaaaaaaaaattttaaaagtaactatattttcttttgaataaaaagtaatgtttctggaaacatctgtgatttttctattgtgctttttcttgcacattagctttcacattttcctctcctgaaaatctctttctctcttcctctttccctccttcccttattctctctttattcattctctttagggtttctattctctgttttatcattttggaataaatgaacaacaaaagcactgcagaacacacaaacgaaacaaaatctaaccatctcatggcagtagctgtaaatgtcactttacttacttggtaaagaaataccgattctaggccaggcatggtggctcacgcctgtaatcccagcactttgggaggccaaggtgggcagatcccttgaggtcaggagttcgagaccagcctggccaaaatggtgaaaccccatctctactaaaaatacaaaaattagccaggtatggtggtgagcacctgtaatcccaactactcaggaggctgaggcagaagaatctcttgaactgaggaggcagaggttgcagtgagtggagatcatgccactgaactccagcctgggc

SEQ ID NO: 11925 - protein, 290 aa, Homo sapiens
MEVSLNHPASNTTSTKNNNSAFFYFESCQPPSPALLLLCIAYTVVLIVGLFGNLSLIIIIFKKQRKAQNFTSILIANLSLSDTLVCVMCIHFTIIYTLMDHWIFGDTMCRLTSYVQSVSISVSIFSLVFTAVERYQLIVNPRGWKPSVTHAYWGITLIWLFSLLLSIPFFLSYHLTDEPFRNLSLPTDLYTHQVACVENWPSKKDRLLFTTSLFLLQYFVPLGFILICYLKIVICLRRRNAKVDKKKENEGRLNENKRINTMLISIVVTFGACWLPRISSMSSLTGIMRC

SEQ ID NO: 11926 - DNA, 843 bp, Homo sapiens
ggagcccgggaggcctttcgcccgaggcgggctgcgggctgctggggtctggtgcggagggccaacttctgggaataacctggctgtgggcttaaaaatcgtagtcattcattatcacgggcttctctctctcgaatacctttaacatttatcgccttgttagtctccacatccacctccgtgaaagagatggagtctcgctatatttcccagtctggcctcaaactcctgatcttaagggatccccagctcaacctctcccagcagctgggactaccgggctgtcaaatttacattaactatgagaattaagcagaatccgaaagtcatctgagttggctatctgcacgttctctctgtaccagtgaacttgaactgtggctgtggcctggattccgcattcaaacatgaccaactgacctctggttgtagggatgtcttgaagatgctgaagaacaaacacagagttcagaggatggaagaaactgttataccatctacaatgatttgaaatgccatttgcaactgcagttgaccgtgggttattgaaaccacagaaagtgaaactggataacgaagggaaacactatcccagcctcaacaaggagcttgatttgggcacagaaacaggagaaagagacctgccttgcctcccttatccaaccggaagtattcttcttcttctgtcttcaatttattgcatgatcacatttattgcatgggtggcttcaggaaggattttagggattcctggaaataatcagtcttgaaatactcccctcttcttccttcatctaggatgcttcctcttctctcaatatattctcacttatgggtataaag

SEQ ID NO: 11927 - protein, 85 aa, Homo sapiens [sequence omitted]

SEQ ID NO: 11928 - DNA, 737 bp, Homo sapiens
cggcgagctactcgacaagtcgtcagcgcggctgcgccgcaggagcccgggaggcctttcgcccgaggcgggctgcgggctgctggggtctggtgcggagggccaacttctgggaataacctggctgtgggcttaaaaatcgtagtcattcattatcacgggcttctctctctcgaatacctttaacatttatcgccttgttagtctccacatccacctccgtgaaagagatggagtctcgctatatttcccagtctggcctcaaactcctgatcttaagggatccccagctcaacctctcccagcagctgggactaccgggctgtcaaatttacattaactatgagaattaagcagagtctcgctcttttgcccaggctggagcgcagtggcgtgatcttggttcactgcaacctccgcctcccaggttcaaggaagtctcctgccacagcctcctgagtagctgggattacagaatccgaaagtcatctgagttggctatctgcacgttctctctgtaccagtgaacttgaactgtggctgtggcctggattccgcattcaaacatgaccaactgacctctggttgtagggatgtcttgaagatgctgaagaacaaacacagagttcagaggatggaagaaactgttataccatctacaatgatttgaaatgccatttgcaactgcagttgaccgtgggttattgaaaccacagaaagtgaaactggataacgaa

SEQ ID NO: 11929 - protein, 38 aa, Homo sapiens
MRIKQSLALLPRLERSGVILVHCNLRLPGSRKSPATAS

SEQ ID NO: 11930 - DNA, 1096 bp, Homo sapiens
ggacaggcaagcacatcagatgtcactgtttggcagctgataaaagtcagtggtgctataatactaagcacagagccactagattagtctgtgagggaaggagatgcctcttccttcccttcaatagtgggttaaacccagctggcaccctctggaactacgggaacaatattcttcaagagaaggtcactctaccaaagccaggagcacagtattctcaggatctcaacaaggaagagcagaccaaggttgcttctgattccttacaaccttccgtaattccaggcttgtggccccaaattcagggccccacccttccaggaacaaatcattatagtaataatttgccttcatcttccatataccaactaagcatgtttaactacgaacgtccaaaacacttcatccagtcccaaaacccatgtggctccagattgcagcctcctggaccagaaacctccagcttctctagccagaccaaacagtcttccattatcatccagccccgccagtgtacagagcaaattttagagggagattcagtgaaactagaatgccagatctcggctatacctccaccaaagcttttctggaaaagaaataatgaaatggtacaattcaacactgaccgaataaggtaggatatgtatttctagacttactatagtttatttgggtgaatccagttatactttttaacatgcattataaatggcatgcatttatctcaatttgtctagtttttaaaacactaaagaataatataataaaatatatattagataaaaatgtaagaaaacttcagtaagccagattccactaatcagaaatgtaaggcataaagtagactaggatttatctttttatcaacgatgatgaaagatggcccaaggaaataaatgacataaacaagattaaagggggatgttttcttttcttttctttctttacaaaaagcttcagcctttattaaacaaaggaggaggtaggagacagataacggaacaggtcaggacccctccattcccctatacatacgcataaatacaaacacagacacacccgagtgaatgacagggaccatcaggggacagat

SEQ ID NO: 11931 - protein, 88 aa, Homo sapiens
MFNYERPKHFIQSQNPCGSRLQPPGPETSSFSSQTKQSSIIIQPRQCTEQILEGDSVKLECQISAIPPPKLFWKRNNEMVQFNTDRIR

SEQ ID NO: 11932 - DNA, 547 bp, Homo sapiens
gcacagagccactagattagtctgtgagggaaggagatgcctcttccttcccttcaatagtgggttaaacccagctggcaccctctggaactacgggaacaatattcttcaagagaaggtcactctaccaaagccaggagcacagtattctcaggatctcaacaaggaagagcagaccaagctatcaacagtcctcagctggccaacctataaatgcaaagccatcccaaactgcaaatgctaagcccataccaagaactcctgatcatgaaatacaaggatcaaaagaagctttgattcaagatttggaaagaaagctgaaatgcaaggacacccttcttcataatggaaatcaagtgggcaagatgtctattttgtacaaaaggccaattaaactataaaatctaattttaataaggaagttctagctcacagatctaggtccatatatcaacaaggaataagattatctaaaaagaaggaatatttgggccctattccatttctctctgcatgaaatcacctcttggtttacagtagtaaaaga

SEQ ID NO: 11933 - protein, 80 aa, Homo sapiens
HRATRLVCEGRRCLFLPFNSGLNPAGTLWNYGNNILQEKVTLPKPGAQYSQDLNKEEQTKLSTVLSWPTYKCKAIPNCKC

SEQ ID NO: 11934 - DNA, 2271 bp, Homo sapiens
gcacagagccactagattagtctgtgagggaaggagatgcctcttccttcccttcaatagtgggttaaacccagctggcaccctctggaactacgggaacaatattcttcaagagaaggtcactctaccaaagccaggagcacagtattctcaggatctcaacaaggaagagcagaccaaggttgcttctgattccttacaaccttccgtaattccaggcttgtggccccaaattcagggccccacccttccaggaacaaatcattatagtaataatttgccttcatcttccatataccaactaagcatgtttaactacgaacgtccaaaacacttcatccagtcccaaaacccatgtggctccagattgcagcctcctggaccagaaacctccagcttctctagccagaccaaacagtcttccattatcatccagccccgccagtgtacagagcaaagattttctgcctcctcaacactgagctctcacatcaccatgtcctcctctgctttccctgcttctcccaagcagcatgctggctccaacccaggccaaagggttacaaccacctataaccagtccccagccagcttcctcagctccatattaccatcacagcctgattacaatagcagtaaaatcccttccgctatggattccaactatcaacagtcctcagctggccaacctataaatgcaaagccatcccaaactgcaaatgctaagcccataccaagaactcctgatcatgaaatacaaggatcaaaagaagctttgattcaagatttggaaagaaagctgaaatgcaaggacacccttcttcataatggaaatcaacgtctaacatatgaagagaagatggctcgcagattgctaggaccacagaatgcagctgctgtgtttcaagctcaggatgacagtggtgcacaagactcgcagcaacacaactcagaacatgcgcgactgcaagttcctacatcacaagtaagaagtagatcaacctcaaggggagatgtgaatgatcaggatgcaatccaggagaaattttacccaccacgtttcattcaagtgccagagaacatgtcgattgatgaaggaagattctgcagaatggacttcaaagtgagtggactgccagctcctgatgtgtcatggtatctaaatggaagaacagttcaatcagatgatttgcacaaaatgatagtgtctgagaagggtcttcattcactcatctttgaagtagtcagagcttcagatgcaggggcttatgcatgtgttgccaagaatagagcaggagaagccaccttcactgtgcagctggatgtccttgcaaaagaacataaaagagcaccaatgtttatctacaaaccacagagcaaaaaagttttagagggagattcagtgaaactagaatgccagatctcggctatacctccaccaaagcttttctggaaaagaaataatgaaatggtacaattcaacactgaccgaataagcttatatcaagataacactggaagagttactttactgataaaagatgtaaacaagaaagatgctgggtggtatactgtgtcagcagttaatgaagctggagtgactacatgtaacacaagattagacgttacggcacgtccaaaccaaactcttccagctcctaagcagttacgggttcgaccaacattcagcaaatatttagcacttaatgggaaaggtttgaatgtaaaacaagcttttaacccagaaggagaatttcagcgtttggcagctcaatctggactctatgaaagtgaagaactttaataactttaccaacattggaaaacagccaactacaccattagtaatatatttgattacatttttttgaaattaatccatagctgtattaacagattatggttttaattaggtaatatagttaatatatatttataatattatttatcctttgactcttgcacattctatgtacccctccgatttgtgaagcctacaggaaatctgggtatatggatttgtaactgcagaagactatcttaaaatacaggattttaacatttaagtcatgcacatttaacaattacaggttataaattagtatcaactttttaaacacatctaatgcttgtaataacgtttactggtactgctttctaaatactgttttacccgttttctcttgtaggaatactaacatggtatagattatctgagtgttccacagttgtatgtcaaaagaaaataaaattcaaatatttaaaacggac

SEQ ID NO: 11935 - protein, 498 aa, Homo sapiens
MFNYERPKHFIQSQNPCGSRLQPPGPETSSFSSQTKQSSIIIQPRQCTEQRFSASSTLSSHITMSSSAFPASPKQHAGSNPGQRVTTTYNQSPASFLSSILPSQPDYNSSKIPSAMDSNYQQSSAGQPINAKPSQTANAKPIPRTPDHEIQGSKEALIQDLERKLKCKDTLLHNGNQRLTYEEKMARRLLGPQNAAAVFQAQDDSGAQDSQQHNSEHARLQVPTSQVRSRSTSRGDVNDQDAIQEKFYPPRFIQVPENMSIDEGRFCRMDFKVSGLPAPDVSWYLNGRTVQSDDLHKMIVSEKGLHSLIFEVVRASDAGAYACVAKNRAGEATFTVQLDVLAKEHKRAPMFIYKPQSKKVLEGDSVKLECQISAIPPPKLFWKRNNEMVQFNTDRISLYQDNTGRVTLLIKDVNKKDAGWYTVSAVNEAGVTTCNTRLDVTARPNQTLPAPKQLRVRPTFSKYLALNGKGLNVKQAFNPEGEFQRLAAQSGLYESEEL

SEQ ID NO: 11936 - DNA, 749 bp, Homo sapiens
acagagccactagattagtctgtgagggaaggagatgcctcttccttcccttcaatagtgggttaaacccagctggcaccctctggaactacgggaacaatattcttcaagagaaggtcactctaccaaagccaggagcacagtattctcaggatctcaacaaggaagagcagaccaaggttgcttctgattccttacaaccttccgtaattccaggcttgtggccccaaattcagggccccacccttccaggaacaaatcattatagtaataatttgccttcatcttccatataccaactaagcatgtttaactacgaacgtccaaaacacttcatccagtcccaaaacccatgtggctccagattgcagcctcctggaccagaaacctccagcttctctagccagaccaaacagtcttccattatcatccagccccgccagtgtacagagcaaagattttctgcctcctcaacactgagctctcacatcaccatgtcctcctctgctttccctgcttctcccaagcagcatgctggctccaacccaggccaaagggttacaaccacctataaccagtccccagccagcttcctcagctccatattaccatcacagcttgtagaagtagatcaacctcaaggggagatgtgaatgatcaggatgcaatccaggagaaattttacccaccacgtttcattcaagtgccagagaacatgtcgattgatgaaggaagattctgcagaatgg

SEQ ID NO: 11937 - protein, 115 aa, Homo sapiens
MFNYERPKHFIQSQNPCGSRLQPPGPETSSFSSQTKQSSIIIQPRQCTEQRFSASSTLSSHITMSSSAFPASPKQHAGSNPGQRVTTTYNQSPASFLSSILPSQLVEVDQPQGEM

SEQ ID NO: 11938 - DNA, 723 bp, Homo sapiens
acagagccactagattagtctgtgagggaaggagatgcctcttccttcccttcaatagtgggttaaacccagctggcaccctctggaactacgggaacaatattcttcaagagaaggtcactctaccaaagccaggagcacagtattctcaggatctcaacaaggaagagcagaccaaggttgcttctgattccttacaaccttccgtaattccaggcttgtggccccaaattcagggccccacccttccaggaacaaatcattatagtaataatttgccttcatcttccatataccaactaagcatgtttaactacgaacgtccaaaacacttcatccagtcccaaaacccatgtggctccagattgcagcctcctggaccagaaacctccagcttctctagccagaccaaacagtcttccattatcatccagccccgccagtgtacagagcaaagattttctgcctcctcaacactgagctctcacatcaccatgtcctcctctggtgtcatggtatctaaatggaagaacagttcaatcagatgatttgcacaaaatgatagtgtctgagaagggtcttcattcactcatctttgaagtagtcagagcttcagatgcaggggcttatgcatgtgttgccaagaatagagcaggagaagccaccttcactgtgcagctggatgtccttggtaagcctccaaagagacccttgagaattcct

SEQ ID NO: 11939 - protein, 80 aa, Homo sapiens
MFNYERPKHFIQSQNPCGSRLQPPGPETSSFSSQTKQSSIIIQPRQCTEQRFSASSTLSSHITMSSSGVMVSKWKNSSIR

SEQ ID NO: 11940 - DNA, 962 bp, Homo sapiens
agtctgtgagggaaggagatgcctcttccttcccttcaatagtgggttaaacccagctggcaccctctggaactacgggaacaatattcttcaagagaaggtcactctaccaaagccaggagcacagtattctcaggatctcaacaaggaagagcagaccaagtacaattcaacactgaccgaataagcttatatcaagataacactggaagagttactttactgataaaagatgtaaacaagaaagatgctgggtggtatactgtgtcagcagttaatgaagctggagtgactacatgtaacacaagattagacgttacggcacgtccaaaccaaactcttccagctcctaagcagttacgggttcgaccaacattcagcaaatatttagcacttaatgggaaaggtttgaatgtaaaacaagcttttaacccagaaggagaatttcagcgtttggcagctcaatctggactctatgaaagtgaagaactttaataactttaccaacattggaaaacagccaactacaccattagtaatatatttgattacatttttttgaaattaatccatagctgtattaacagattatggttttaattaggtaatatagttaatatatatttataatattatttatcctttgactcttgcacattctatgtacccctccgatttgtgaagcctacaggaaatctgggtatatggatttgtaactgcagaagactatcttaaaatacaggattttaacatttaagtcatgcacatttaacaattacaggttataaattagtatcaactttttaaacacatctaatgcttgtaataacgtttactggtactgctttctaaatactgttttacccgttttctcttgtaggaatactaacatggtatagattatctgagtgttccacagttgtatgtcaaaagaaaataaaattcaaatatttaaaacggac

SEQ ID NO: 11941 - protein, 150 aa, Homo sapiens
WVKPSWHPLELREQYSSREGHSTKARSTVFSGSQQGRADQVQFNTDRISLYQDNTGRVTLLIKDVNKKDAGWYTVSAVNEAGVTTCNTRLDVTARPNQTLPAPKQLRVRPTFSKYLALNGKGLNVKQAFNPEGEFQRLAAQSGLYESEEL

SEQ ID NO: 11942 - DNA, 939 bp, Homo sapiens
agtctgtgagggaaggagatgcctcttccttcccttcaatagtgggttaaacccagctggcaccctctggaactacgggaacaatattcttcaagagaaggtcactctaccaaagccaggagcacagtattctcaggatctcaacaaggaagagcagaccaagagcttatatcaagataacactggaagagttactttactgataaaagatgtaaacaagaaagatgctgggtggtatactgtgtcagcagttaatgaagctggagtgactacatgtaacacaagattagacgttacggcacgtccaaaccaaactcttccagctcctaagcagttacgggttcgaccaacattcagcaaatatttagcacttaatgggaaaggtttgaatgtaaaacaagcttttaacccagaaggagaatttcagcgtttggcagctcaatctggactctatgaaagtgaagaactttaataactttaccaacattggaaaacagccaactacaccattagtaatatatttgattacatttttttgaaattaatccatagctgtattaacagattatggttttaattaggtaatatagttaatatatatttataatattatttatcctttgactcttgcacattctatgtacccctccgatttgtgaagcctacaggaaatctgggtatatggatttgtaactgcagaagactatcttaaaatacaggattttaacatttaagtcatgcacatttaacaattacaggttataaattagtatcaactttttaaacacatctaatgcttgtaataacgtttactggtactgctttctaaatactgttttacccgttttctcttgtaggaatactaacatggtatagattatctgagtgttccacagttgtatgtcaaaagaaaataaaattcaaatatttaaaacggac

SEQ ID NO: 11943 - protein, 156 aa, Homo sapiens
VCEGRRCLFLPFNSGLNPAGTLWNYGNNILQEKVTLPKPGAQYSQDLNKEEQTKSLYQDNTGRVTLLIKDVNKKDAGWYTVSAVNEAGVTTCNTRLDVTARPNQTLPAPKQLRVRPTFSKYLALNGKGLNVKQAFNPEGEFQRLAAQSGLYESEEL

SEQ ID NO: 11944 - DNA, 1167 bp, Homo sapiens
agtctgtgagggaaggagatgcctcttccttcccttcaatagtgggttaaacccagctggcaccctctggaactacgggaacaatattcttcaagagaaggtcactctaccaaagccaggagcacagtattctcaggatctcaacaaggaagagcagaccaagcatgctggctccaacccaggccaaagggttacaaccaccttcactgtgcagctggatgtccttgcaaaagaacataaaagagcaccaatgtttatctacaaaccacagagcaaaaaagttttagagggagattcagtgaaactagaatgccagatctcggctatacctccaccaaagcttttctggaaaagaaataatgaaatggtacaattcaacactgaccgaataagcttatatcaagataacactggaagagttactttactgataaaagatgtaaacaagaaagatgctgggtggtatactgtgtcagcagttaatgaagctggagtgactacatgtaacacaagattagacgttacggcacgtccaaaccaaactcttccagctcctaagcagttacgggttcgaccaacattcagcaaatatttagcacttaatgggaaaggtttgaatgtaaaacaagcttttaacccagaaggagaatttcagcgtttggcagctcaatctggactctatgaaagtgaagaactttaataactttaccaacattggaaaacagccaactacaccattagtaatatatttgattacatttttttgaaattaatccatagctgtattaacagattatggttttaattaggtaatatagttaatatatatttataatattatttatcctttgactcttgcacattctatgtacccctccgatttgtgaagcctacaggaaatctgggtatatggatttgtaactgcagaagactatcttaaaatacaggattttaacatttaagtcatgcacatttaacaattacaggttataaattagtatcaactttttaaacacatctaatgcttgtaataacgtttactggtactgctttctaaatactgttttacccgttttctcttgtaggaatactaacatggtatagattatctgagtgttccacagttgtatgtcaaaagaaaataaaattcaaatatttaaaacggac

SEQ ID NO: 11945 - protein, 149 aa, Homo sapiens
MFIYKPQSKKVLEGDSVKLECQISAIPPPKLFWKRNNEMVQFNTDRISLYQDNTGRVTLLIKDVNKKDAGWYTVSAVNEAGVTTCNTRLDVTARPNQTLPAPKQLRVRPTFSKYLALNGKGLNVKQAFNPEGEFQRLAAQSGLYESEEL

SEQ ID NO: 11946 - DNA, 880 bp, Homo sapiens
agtctgtgagggaaggagatgcctcttccttcccttcaatagtgggttaaacccagctggcaccctctggaactacgggaacaatattcttcaagagaaggtcactctaccaaagccaggagcacagtattctcaggatctcaacaaggaagagcagaccaagcatgctggctccaacccaggccaaagggttacaaccacctataaccagtccccagccagcttcctcagctccatattaccatcacagcctgattacaatagcagtaaaatcccttccgctatggattccaagtaacaaatatttagcacttaatgggaaaggtttgaatgtaaaacaagcttttaacccagaaggagaatttcagcgtttggcagctcaatctggactctatgaaagtgaagaactttaataactttaccaacattggaaaacagccaactacaccattagtaatatatttgattacatttttttgaaattaatccatagctgtattaacagattatggttttaattaggtaatatagttaatatatatttataatattatttatcctttgactcttgcacattctatgtacccctccgatttgtgaagcctacaggaaatctgggtatatggatttgtaactgcagaagactatcttaaaatacaggattttaacatttaagtcatgcacatttaacaattacaggttataaattagtatcaactttttaaacacatctaatgcttgtaataacgtttactggtactgctttctaaatactgttttacccgttttctcttgtaggaatactaacatggtatagattatctgagtgttccacagttgtatgtcaaaagaaaataaaattcaaatatttaaaacggac

SEQ ID NO: 11947 - protein, 82 aa, Homo sapiens
MLAPTQAKGLQPPITSPQPASSAPYYHHSLITIAVKSLPLWIPSNKYLALNGKGLNVKQAFNPEGEFQRLAAQSGLYESEEL

SEQ ID NO: 11948 - DNA, 1080 bp, Homo sapiens
ggcagaattttaaagtattgcatcactgaaacctatttgtccatatatgaatttaaacagttcccgtatctgagtgggtttgcgattgaaatgcaaagcaagagctcaaaagtatttataattttttaaacaaaacattggaaataagatccttgaaattaacatagtatttttagactgtctcaaaccataactcttttacatgcaacctcagtctctttatgaactcttaatttctatatttagaacattaatttatgttacattggtttccataaggaatatagaagtcattgcttttctggctaaatgtgactgcaaatgaagtcccagaggcacatatatatgaggcttcctgatctaatgcgtaatttttctaaaacagagtgttcttgagctatagtttggcatataaatggcaatttgttaagtgtttttacataaactgttaacagtggaatccaaagctttaacactaacttgagttcataaggaatctggaaaaaaaattttataaggaaaagttctccaaaataaggataataaaaatataacctcttctaaagagcttttctagtctgagggactcttttaggccaagagaaagcagggtggcttgaatttcttgatagaggagaattggagagacattatactttaaggctgggcacagtggctcacgcctgtaatcccagcactttgggaagccaaggtgagtggatcgccttgaacccaggagttctagactagctgggcatggtggcacgctcgctgcactccagcctggatgacagagtgagagtctgtctcaaagataaataaataaataaaaatatccaaattaagtttttgacgtttttctatagtggtggtgtgaacatgtatatagttatattcagagatgtggtatttcagttataccaacctccgcttcttgggttcaagtgattctcttacctcagcctcccgagtagctgggattacaggcatgtgccactacgcctggctaattttgtatttttagtagagatggggtttcactatgttggtcagcctggtcttgaactcctgacctcaggt

SEQ ID NO: 11949 - protein, 40 aa, Homo sapiens
MWYFSYTNLRFLGSSDSLTSASRVAGITGMCHYAWLILYF

SEQ ID NO: 11950 - DNA, 987 bp, Homo sapiens
gggctgtcaaatttacattaactatgagaattaagcagagtctcgctcttttgcccaggctggagcgcagtggcgtgatcttggttcactgcaacctccgcctcccaggttcaaggaagtctcctgccacagcctcctgagtagctgggattacaggaattctcaagggtctctttggaggcttaccaaggacatccagctgcacagtgaaggtggcttctcctgctctattcttggcaacacatgcataagcccctgcatctgaagctctgactacttcaaagatgagtgaatgaagacccttctcagacactatcattttgtgcaaatcatctgattgaactgttcttccatttagataccatgacacatcaggagctggcagtccactcacctagaaagaaaaacacaaggagatggcagaattttaaagtattgcatcactgaaacctatttgtccatatatgaatttaaacagttcccgtatctgagtgggtttgcgattgaaatgcaaagcaagagctcaaaagtatttataattttttaaacaaaacattggaaataagatccttgaaattaacatagtatttttagactgtctcaaaccataactcttttacatgcaacctcagtctctttatgaactcttaatttctatatttagaacattaatttatgttacattggtttccataaggaatatagaagtcattgcttttctggctaaatgtgactgcaaatgaagtcccagaggcacatatatatgaggcttcctgatctaatgcgtaatttttctaaaacagagtgttcttgagctatagtttggcatataaatggcaatttgttaagtgtttttacataaactgttaacagtggaatccaaagctttaacactaacttgagttcataaggaatctggaaaaaaaattttataaggaaaagttctccaaaataaggataataaaaatataacctcttctaaagagc

SEQ ID NO: 11951 - protein, 38 aa, Homo sapiens; identical to SEQ ID NO: 11929

SEQ ID NO: 11952 - DNA, 1133 bp, Homo sapiens
ctttcgcccgaggcgggctgcgggctgctggggtctggtgcggagggccaacttctgggaataacctggctgtgggcttaaaaatcgtagtcattcattatcacgggcttctctctctcgaatacctttaacatttatcgccttgttagtctccacatccacctccgtgaaagagatggagtctcgctatatttcccagtctggcctcaaactcctgatcttaagggatccccagctcaacctctcccagcagctgggactaccgggctgtcaaatttacattaactatgagaattaagcaggaattctcaagggtctctttggaggcttaccaaggacatccagctgcacagtgaaggtggcttctcctgctctattcttggcaacacatgcataagcccctgcatctgaagctctgactacttcaaagatgagtgaatgaagacccttctcagacactatcattttgtgcaaatcatctgattgaactgttcttccatttagataccatgacacatcaggagctggcagtccactcacctagaaagaaaaacacaaggagatggcagaattttaaagtattgcatcactgaaacctatttgtccatatatgaatttaaacagttcccgtatctgagtgggtttgcgattgaaatgcaaagcaagagctcaaaagtatttataattttttaaacaaaacattggaaataagatccttgaaattaacatagtatttttagactgtctcaaaccataactcttttacatgcaacctcagtctctttatgaactcttaatttctatatttagaacattaatttatgttacattggtttccataaggaatatagaagtcattgcttttctggctaaatgtgactgcaaatgaagtcccagaggcacatatatatgaggcttcctgatctaatgcgtaatttttctaaaacagagtgttcttgagctatagtttggcatataaatggcaatttgttaagtgtttttacataaactgttaacagtggaatccaaagctttaacactaacttgagttcataaggaatctggaaaaaaaattttataaggaaaagttctccaaaataaggataataaaaatataacctcttctaaagagc

SEQ ID NO: 11953 - protein, 40 aa, Homo sapiens
MESRYISQSGLKLLILRDPQLNLSQQLGLPGCQIYINYEN

SEQ ID NO: 11954 - DNA, 938 bp, Homo sapiens
ggggggatgtttaattcaagaaaaccaatagctatttggcaataaatagatacagctttggaattttcaaatgtttttttcttcctagtctgactgttggtcagagacatccacttcacagaaataattcctgtactttcatttcttaaaaatttttatttcagcttatatcaagataacactggaagagttactttactgataaaagatgtaaacaagaaagatgctgggtggtatactgtgtcagcagttaatgaagctggagtgactacatgtaacacaagattagacgttacggcacgtccaaaccaaactcttccagctcctaagcagttacgggttcgaccaacattcagcaaatatttagcacttaatgggaaaggtttgaatgtaaaacaagcttttaacccagaaggagaatttcagcgtttggcagctcaatctggactctatgaaagtgaagaactttaataactttaccaacattggaaaacagccaactacaccattagtaatatatttgattacatttttttgaaattaatccatagctgtattaacagattatggttttaattaggtaatatagttaatatatatttataatattatttatcctttgactcttgcacattctatgtacccctccgatttgtgaagcctacaggaaatctgggtatatggatttgtaactgcagaagactatcttaaaatacaggattttaacatttaagtcatgcacatttaacaattacaggttataaattagtatcaactttttaaacacatctaatgcttgtaataacgtttactggtactgctttctaaatactgttttacccgttttctcttgtaggaatactaacatggtatagattatctgagtgttccacagttgtatgtcaaaagaaaataaaattcaaatatttaaaacggac

SEQ ID NO: 11955 - protein, 125 aa, Homo sapiens
LLVRDIHFTEIIPVLSFLKNFYFSLYQDNTGRVTLLIKDVNKKDAGWYTVSAVNEAGVTTCNTRLDVTARPNQTLPAPKQLRVRPTFSKYLALNGKGLNVKQAFNPEGEFQRLAAQSGLYESEEL

SEQ ID NO: 11956 - DNA, 1970 bp, Homo sapiens
acagctcagccaattcctctagaaactaagctagacttgccatggtttgcacttcaaaggcaatcacaagaacttaaatcatgactgaatctactgaatttgtgattttgttttaaccaaacaggtttctaattcttcaggatttttcagtctgttatgctcaaaggaataagaatagtctctagagattacctgcttaattctcatagttaatgtaaatttgacagcccggtagtcccagctgctgggagaggttgagctggggatcccttaagatcaggagtttgaggccagactgggaaatatagcgagactccatctctaaaaaaaaaaaaattatgtaaatttgattacctatatatgggtgtttttcctctaataatttcaatttcagataatctgttactttagaaagcataattttgtgaacagctgagagtcccagtacaggaaagcccaaatccttttgttaaaactattctaaagctttttttcctctcgggcttctagttcactggctgtcagccttttgcgaggcctctcctgttcctctcatcgatggtagtttttgaccctcactactgtgtggccgttttgctttttatctacacataaaacagcatttatcgacagcagtctacatctctttcagggaaataacaaaagtggctttatcttttactttcaaaactggttagtggttttctttgcaggtttccctggggcctttggactggattccattttattttcctttttatcaacacgagaatccgtcctggtcttacatcctggagggcttttggctgccttaatttacagccaaattagtttggccttttctatagctggtttaccaaccttctcatctttgcaaagcttctgggtcagatgtgggtctgggccccaggactcctgtgtcggcctgacctttcacataatcactgcagagtttttcatctatttttacatcacgggggcaggggagtggaagctacttccagcaacagctctcggttaataaccagtttctgcaagtagcagcagcagcagcagcgtagggtcacggttaggaatttgggcttgggcatccaagacttggccccaacttccagtgaattacttcatttctcagcttctcggtttcttcaggcctaaaatgaggacaaaaatacctacctttcacggaggtggatgtggagactaacaaggcgataaatgttaaaggggcttcgaaacataagttgcattacagaaaggaagtagaaattacaaccacacttcaggaattgttactctactttatttttttaataaacctatgtatataaagaaccaactttaagtccattcgcagcataactgatttttggaagtttatggaaggaccccttttggaaggtctgtactgggattcatggtacaataaccagcagctgtataatttaaagaacagcagtcgcatctactatgaaaatatacttctaggagttcccagagttcgtcaactaaaagtccgcaacaacacatgcaaagtctattcatcttttcagtctttgatgagtgaatgttatggcaaatatacttctgcaaatgaagacctctctaattttggccttcaaattaatactgaatggagatattctacttctaataccaactccccttggcactggggatttcttggtgtttaccgaaatgggggatacattttcactttatcaaaatcgaaatctgaaaccaaaaacaagttcattgaccttcgactgaacagctggatcacaagagggactagagttatttttattgatttttccttatataatgctaatgtaaatctattttgtattatcagattggtggcagaattccctgcaactggaggaatacttacttcatggcagttttactctgtgaagctcctcagatatgttagctactatgactattttattgcttcctgtgaaatc

SEQ ID NO: 11957 - protein, 196 aa, Homo sapiens
MEGPLLEGLYWDSWYNNQQLYNLKNSSRIYYENILLGVPRVRQLKVRNNTCKVYSSFQSLMSECYGKYTSANEDLSNFGLQINTEWRYSTSNTNSPWHWGFLGVYRNGGYIFTLSKSKSETKNKFIDLRLNSWITRGTRVIFIDFSLYNANVNLFCIIRLVAEFPATGGILTSWQFYSVKLLRYVSYYDYFIASCE

SEQ ID NO: 11958 - DNA, 2218 bp, Homo sapiens
gcgcgcaagcgccgcggcctcaggcgaacgaacgggcggtgtagtgcaggtccgccatggctgaggcgtcacggtggcaccgaggcggggcttcgaaacataagttgcattacagaaaggaagtagaaattacaaccacacttcaggaattgttactctactttatttttttaataaacctatgtatattgacttttgggatggtaaacccacatatgtattacttaaacaaggttatgtcatctctatttttggacacttctgtgcctggtgaagaaagaaccaactttaagtccattcgcagcataactgatttttggaagtttatggaaggaccccttttggaaggtctgtactgggattcatggtacaataaccagcagctgtataatttaaagaacagcagtcgcatctactatgaaaatatacttctaggagttcccagagttcgtcaactaaaagtccgcaacaacacatgcaaagtctattcatcttttcagtctttgatgagtgaatgttatggcaaatatacttctgcaaatgaagacctctctaattttggccttcaaattaatactgaatggagatattctacttctaataccaactccccttggcactggggatttcttggtgtttaccgaaatgggggatacattttcactttatcaaaatcgaaatctgaaaccaaaaacaagttcattgaccttcgactgaacagctggatcacaagagggactagagttatttttattgatttttccttatataatgctaatgtaaatctattttgtattatcagattggtggcagaattccctgcaactggaggaatacttacttcatggcagttttactctgtgaagctcctcagatatgttagctactatgactattttattgcttcctgtgaaatcacattctgtatttttctttttgtcttcacaacacaagaagtcaaaaaaataaaagaatttaagtctgcctatttcaaaagtatttggaactggctagaattgctacttttgctgttgtgttttgtggctgtttccttcaacacatactataatgtacaaatttttctcttacttggacagctgttgaaaagtactgaaaaatattcagatttctattttcttgcatgctggcacatttattacaataatataattgctattaccatcttttttgcatggataaagatattcaaattcataagctttaacaagacaatgtctcagctgtcatcaaccttgtcccgttgtgttaaagacatagtaggatttgccatcatgttttttataatattctttgcttatgcccagttaggatttcttgtttttggatcacaagttgatgacttttccacttttcagaattccatatttgcacaatttcgaattgttcttggagattttaattttgctggtattcagcaagccaatcctatcttgggacccatttacttcatcactttcatcttttttgtgttctttgtcctgctgaatatgttcttggcaattattaatgatacctattctgaagtgaaagctgactattcaataggcagaaggctagattttgaacttggcaaaatgattaaacagagttacaaaaatgttctcgagaaattcagactgaagaaagctcaaaaagatgaagacaagaaaaccaaaggcagcggagatttggctgaacaagccagaagagaaggctttgacgaaaatgagattcaaaacgcagagcagatgaaaaaatggaaagagaggcttgagaaaaagtattattctatggaaattcaagatgactaccagcctgtcactcaagaagaatttcgagatggcaccacaaccaagtacaaaatgagattctctgagtgcctgacaaaacgaatttaagtaccagccaagtacacacgatgatagcttcaaggaatacaactgactttatgatatgaattttcaaggaacgtatcttatatggattttgaagaatcttgtttgcttataagaacttcaagaagcctaagcttggctttaattttcttgtactctctgtactcctcaagcactggaacacgatcctctttctgggcattcctaggggagaaaataaaatttgtaatgttctagagatcatttggaaaaaaagatccaaaagttgtcttaatatgagacatactgttactaaacataagttcaaataaaaagttgttctg

SEQ ID NO: 11959 - protein, 613 aa, Homo sapiens
MAEASRWHRGGASKHKLHYRKEVEITTTLQELLLYFIFLINLCILTFGMVNPHMYYLNKVMSSLFLDTSVPGEERTNFKSIRSITDFWKFMEGPLLEGLYWDSWYNNQQLYNLKNSSRIYYENILLGVPRVRQLKVRNNTCKVYSSFQSLMSECYGKYTSANEDLSNFGLQINTEWRYSTSNTNSPWHWGFLGVYRNGGYIFTLSKSKSETKNKFIDLRLNSWITRGTRVIFIDFSLYNANVNLFCIIRLVAEFPATGGILTSWQFYSVKLLRYVSYYDYFIASCEITFCIFLFVFTTQEVKKIKEFKSAYFKSIWNWLELLLLLLCFVAVSFNTYYNVQIFLLLGQLLKSTEKYSDFYFLACWHIYYNNIIAITIFFAWIKIFKFISFNKTMSQLSSTLSRCVKDIVGFAIMFFIIFFAYAQLGFLVFGSQVDDFSTFQNSIFAQFRIVLGDFNFAGIQQANPILGPIYFITFIFFVFFVLLNMFLAIINDTYSEVKADYSIGRRLDFELGKMIKQSYKNVLEKFRLKKAQKDEDKKTKGSGDLAEQARREGFDENEIQNAEQMKKWKERLEKKYYSMEIQDDYQPVTQEEFRDGTTTKYKMRFSECLTKRI

SEQ ID NO: 11960 - DNA, 2319 bp, Homo sapiens
gcgcgcaagcgccgcggcctcaggcgaacgaacgggcggtgtagtgcaggtccgccatggctgaggcgtcacggtggcaccgaggcggggcttcgaaacataagttgcattacagaaaggaagtagaaattacaaccacacttcaggaattgttactctactttatttttttaataaacctatgtatattgacttttgggatggtaaacccacatatgtattacttaaacaaggttatgtcatctctatttttggacacttctgtgcctggtgaagaaagaaccaactttaagtccattcgcagcataactgatttttggaagtttatggaaggaccccttttggaaggtctgtactgggattcatggtacaataaccagcagctgtataatttaaagaacagcagtcgcatctactatgaaaatatacttctaggagttcccagagttcgtcaactaaaagtccgcaacaacacatgcaaagtctattcatcttttcagtctttgatgagtgaatgttatggcaaatatacttctgcaaatgaagacctctctaattttggccttcaaattaatactgaatggagatattctacttctaataccaactccccttggcactggggatttcttggtgtttaccgaaatgggggatacattttcactttatcaaaatcgaaatctgaaaccaaaaacaagttcattgaccttcgactgaacagctggatcacaagagggactagagttatttttattgatttttccttatataatgctaatgtaaatctattttgtattatcagattggtggcagaattccctgcaactggaggaatacttacttcatggcagttttactctgtgaagctcctcagatatgttagctactatgactattttattgcttcctgtgaaatcacattctgtatttttctttttgtcttcacaacacaagaagtcaaaaaaataaaagaatttaagtctgcctatttcaaaagtatttggaactggctagaattgctacttttgctgttgtgttttgtggctgtttccttcaacacatactataatgtacaaatttttctcttacttggacagctgttgaaaagtactgaaaaatattcagatttctattttcttgcatgctggcacatttattacaataatataattgctattaccatcttttttgcatggataaagaatatgttcttggcaattattaatgatacctattctgaagtgaaagctgactattcaataggcagaaggctagattttgaacttggcaaaatgattaaacagagttacaaaaatgttctcgagaaattcagactgaagaaagctcaaaaagatgaagacaagaaaaccaaaggcagcggagatttggctgaacaagccagaagagaaggctttgacgaaaatgagattcaaaacgcagagcagatgaaaaaatggaaagagaggcttgagaaaaagtattattctatggaaattcaagatgactaccagcctgtcactcaagaagaatttcgagaactttttttatatgctgtggagctggagaaggaattacactacatcaatttgaagctaaatcaagtggtgagaaaggtttcagctctatagtattgagacaagtggagtcattctgtaagaaaaaggcaacagaagaattcagtatgaagattttcctccaattttcttcagtaatgagaaacaaaaagttggtaataacaaaaagcttgcatttccaaagttcttgaagttgaaaggataaaattccagtcttttgctaaaaggatgtatctgtagtacaaaacaatgaagtaaaccatatgtttgctaaaggtggagaggacagtctgtggttaatatggaacatcacttacgctcccttgagagggcctacttactctcccatcatttgttttgtttagtggcaccacaaccaagtacaaaatgagattctctgagtgcctgacaaaacgaatttaagtaccagccaagtacacacgatgatagcttcaaggaatacaactgactttatgatatgaattttcaaggaacgtatcttatatggattttgaagaatcttgtttgcttataagaacttcaagaagcctaagcttggctttaattttcttgtactctctgtactcctcaagcactggaacacgatcctctttctgggcattcctaggggagaaaataaaatttgtaatgttctagagatcatttggaaaaaaagatccaaaagttgtcttaatatgagacatactgttactaaacataagttcaaataaaaagttgttctgtt

SEQ ID NO: 11961 - protein, 523 aa, Homo sapiens
MAEASRWHRGGASKHKLHYRKEVEITTTLQELLLYFIFLINLCILTFGMVNPHMYYLNKVMSSLFLDTSVPGEERTNFKSIRSITDFWKFMEGPLLEGLYWDSWYNNQQLYNLKNSSRIYYENILLGVPRVRQLKVRNNTCKVYSSFQSLMSECYGKYTSANEDLSNFGLQINTEWRYSTSNTNSPWHWGFLGVYRNGGYIFTLSKSKSETKNKFIDLRLNSWITRGTRVIFIDFSLYNANVNLFCIIRLVAEFPATGGILTSWQFYSVKLLRYVSYYDYFIASCEITFCIFLFVFTTQEVKKIKEFKSAYFKSIWNWLELLLLLLCFVAVSFNTYYNVQIFLLLGQLLKSTEKYSDFYFLACWHIYYNNIIAITIFFAWIKNMFLAIINDTYSEVKADYSIGRRLDFELGKMIKQSYKNVLEKFRLKKAQKDEDKKTKGSGDLAEQARREGFDENEIQNAEQMKKWKERLEKKYYSMEIQDDYQPVTQEEFRELFLYAVELEKELHYINLKLNQVVRKVSAL

SEQ ID NO: 11962 - DNA, 2308 bp, Homo sapiens
gcgcgcaagcgccgcggcctcaggcgaacgaacgggcggtgtagtgcaggtccgccatggctgaggcgtcacggtggcaccgaggcggggcttcgaaacataagttgcattacagaaaggaagtagaaattacaaccacacttcaggaattgttactctactttatttttttaataaacctatgtatattgacttttgggatggtaaacccacatatgtattacttaaacaaggttatgtcatctctatttttggacacttctgtgcctggtgaagaaagaaccaactttaagtccattcgcagcataactgatttttggaagtttatggaaggaccccttttggaaggtctgtactgggattcatggtacaataaccagcagctgtataatttaaagaacagcagtcgcatctactatgaaaatatacttctaggagttcccagagttcgtcaactaaaagtccgcaacaacacatgcaaagtctattcatcttttcagtctttgatgagtgaatgttatggcaaatatacttctgcaaatgaagacctctctaattttggccttcaaattaatactgaatggagatattctacttctaataccaactccccttggcactggggatttcttggtgtttaccgaaatgggggatacattttcactttatcaaaatcgaaatctgaaaccaaaaacaagttcattgaccttcgactgaacagctggatcacaagagggactagagttatttttattgatttttccttatataatgctaatgtaaatctattttgtattatcagattggtggcagaattccctgcaactggaggaatacttacttcatggcagttttactctgtgaagctcctcagatatgttagctactatgactattttattgcttcctgtgaaatcacattctgtatttttctttttgtcttcacaacacaagaagtcaaaaaaataaaagaatttaagtctgcctatttcaaaagtatttggaactggctagaattgctacttttgctgttgtgttttgtggctgtttccttcaacacatactataatgtacaaatttttctcttacttggacagctgttgaaaagtactgaaaaatattcagatttctattttcttgcatgctggcacatttattacaataatataattgctattaccatcttttttgcatggataaagatattcaaattcataagctttaacaagacaatgtctcagctgtcatcaaccttgtcccgttgtgttaaagacatagtaggatttgccatcatgttttttataatattctttgcttatgcccagttaggatttcttgtttttggatcacaagttgatgacttttccacttttcagaattccatatttgcacaatttcgaattgttcttggagattttaattttgctggtattcagcaagccaatcctatcttgggacccatttacttcatcactttcatcttttttgtgttctttgtcctgctgaatatgttcttggcaattattaatgatacctattctgaagtgaaagctgactattcaataggcagaaggctagattttgaacttggcaaaatgattaaacagagttacaaaaatgttctcgagaaattcagactgaagaaagctcaaaaagatgaagacaagaaaaccaaaggcagcggagatttggctgaacaagccagaagagaaggctttgacgaaaatgagattcaaaacgcagagcagatgaaaaaatggaaagagaggcttgagaaaaagtattattctatggaaattcaagatgactaccagcctgtcactcaagaagaatttcgagaactttttttatatgctgtggagctggagaaggaattacactacatcaatttgaagctaaatcaagtggtgagaaaggtttcagctctatagtattgagacaagtggagagacagagtctcactctgtcgcccaggctggaacagcggtgcgacagtggcctcaacatcctccaaacagagaatcaagtgatcctcttgcctcagcctcccaagtatctgggactacacgcgaacaccaccacccctggctaatttaaacaaaatttttatacagtctgggtcccactatattgcccaggctggtcttgaactcctggcctcaagggatcctcctgcctcagcttcaaaaactgctgggattataggcatgagccactgtgcctggctagatttttttttaatttttgaaatacagtaatgttttatttaaaaatgggaatgacaataaatatttgcaaatcacacttg

SEQ ID NO: 11963 - protein, 624 aa, Homo sapiens
MAEASRWHRGGASKHKLHYRKEVEITTTLQELLLYFIFLINLCILTFGMVNPHMYYLNKVMSSLFLDTSVPGEERTNFKSIRSITDFWKFMEGPLLEGLYWDSWYNNQQLYNLKNSSRIYYENILLGVPRVRQLKVRNNTCKVYSSFQSLMSECYGKYTSANEDLSNFGLQINTEWRYSTSNTNSPWHWGFLGVYRNGGYIFTLSKSKSETKNKFIDLRLNSWITRGTRVIFIDFSLYNANVNLFCIIRLVAEFPATGGILTSWQFYSVKLLRYVSYYDYFIASCEITFCIFLFVFTTQEVKKIKEFKSAYFKSIWNWLELLLLLLCFVAVSFNTYYNVQIFLLLGQLLKSTEKYSDFYFLACWHIYYNNIIAITIFFAWIKIFKFISFNKTMSQLSSTLSRCVKDIVGFAIMFFIIFFAYAQLGFLVFGSQVDDFSTFQNSIFAQFRIVLGDFNFAGIQQANPILGPIYFITFIFFVFFVLLNMFLAIINDTYSEVKADYSIGRRLDFELGKMIKQSYKNVLEKFRLKKAQKDEDKKTKGSGDLAEQARREGFDENEIQNAEQMKKWKERLEKKYYSMEIQDDYQPVTQEEFRELFLYAVELEKELHYINLKLNQVVRKVSAL

SEQ ID NO: 11964 - DNA, 923 bp, Homo sapiens
gaacgaacgggcggtgtagtgcaggtccgccatggctgaggcgtcacggtggcaccgaggcggggcttcgaaacataagttgcattacagaaaggaagtagaaattacaaccacacttcaggaattgttactctactttatttttttaataaacctatgtatatgttatgtcatctctatttttggacacttctgtgcctggtgaagaaagaaccaactttaagtccattcgcagcataactgatttttggaagtttatggaaggaccccttttggaaggtctgtactgggattcatggtacaataaccagcagctgtataatttaaagaacagcagtcgcatctactatgaaaatatacttctaggagttcccagagttcgtcaactaaaagtccgcaacaacacatgcaaagtctattcatcttttcagtctttgatgagtgaatgttatggcaaatatacttctgcaaatgaagacctctctaattttggccttcaaattaatactgaatggagatattctacttctaataccaactccccttggcactggggatttcttggtgtttaccgaaatgggggatacattttcactttatcaaaatcgaaatctgaaaccaaaaacaagttcattgaccttcgactgaacagctggatcacaagagggactagagttatttttattgatttttccttatataatgctaatgtaaatctattttgtattatcagattggtggcagaattccctgcaactggaggaatacttacttcatggcagttttactctgtgaagctcctcagatatgttagctactatgactattttattgcttcctgtgaaatcacattctgtatttttctttttgtcttcacaacacaagaagtcaaaaaaataaaagaatttaagtctgcctatttc

SEQ ID NO: 11965 - protein, 251 aa, Homo sapiens
MSSLFLDTSVPGEERTNFKSIRSITDFWKFMEGPLLEGLYWDSWYNNQQLYNLKNSSRIYYENILLGVPRVRQLKVRNNTCKVYSSFQSLMSECYGKYTSANEDLSNFGLQINTEWRYSTSNTNSPWHWGFLGVYRNGGYIFTLSKSKSETKNKFIDLRLNSWITRGTRVIFIDFSLYNANVNLFCIIRLVAEFPATGGILTSWQFYSVKLLRYVSYYDYFIASCEITFCIFLFVFTTQEVKKIKEFKSAY

SEQ ID NO: 11966 - DNA, 419 bp, Homo sapiens
caagaagaatttcgagaactttttttatatgctgtggagctggagaaggaattacactacatcaatttgaagctaaatcaagtggtgagaaaggtttcagctctatagtattgagacaagtggagtggcaccacaaccaagtacaaaatgagattctctgagtgcctgacaaaacgaatttaagtaccagccaagtacacacgatgatagcttcaaggaatacaactgactttatgatatgaattttcaaggaacgtatcttatatggattttgaagaatcttgtttgcttataagaacttcaagaagcctaagcttggctttaattttcttgtactctctgtactcctcaagcactggaacacgatcctctttctgggcattcctaggggagaaaataaaatttgtaatgttctagag

SEQ ID NO: 11967 - protein, 50 aa, Homo sapiens
MDFEESCLLIRTSRSLSLALIFLYSLYSSSTGTRSSFWAFLGEKIKFVMF

SEQ ID NO: 11968 - DNA, 5569 bp, Homo sapiens
ccgccagccgctctcctcccgctcgccgttagggaggctctgcacctcagccgccgcctctgtcgccactctctccccctgttccgcgtctgcgtcgccaccaccgccgggggtatccggggggtcgcttaccgggctggccccgcgccacagccgtagctttaacctcccgtcagcggccgccccaggaagaggcttctcggccgcggagccacttggggcctcagttctcgccctcttgccgtcgccgcgggtcctggagaagcggccgcggccagggaacggggcatcgcggttccaacgattaactgctgaagtactgatcgagttctgcatttcttcaatgaggaactacaggctgatcttctgccataatctcaaacagccataaatgacaaaagaatgcttgctcagtgagggtagctggtgcagaagccattttttaaacttaggtatttaagtactgaaagaaaagacagctttgatttctggctgcaaaaaagatatgaggaagagctcctccccttccttgagtaactgcaactccgttcttgctaacaaaatatttggaattccacttgatgagctgcagcagggaggacatccagacaatgaggttccattcatagtccgccacgttgtggactatattgaggaacatggaggtctggagcaacaaggactttttcaagtcaatggaaatgctgagacagtggagtggcttcggcagagatacgacagcggagaagaggtggatttggttaaggaagcagatgttccctcagctattagccttcttagattttttcttcaagaacttcctgaacctgttatccctggcagtttacatattcacttgatgcagctttctcaagattataataatgaagatgaatttggaagaaagttgaggttcctcttgcaacagcttccacctgttaattatagtttgttaaagtttctgtgtagatttttagccaatgtagcatcacatcatgaagaaatttggtccgcaaattctttggctgctgtctttggtccagatgtcttccacatttacacagatgtggaagacatgaaagagcaagaaatagtgagcaggataatggctggacttctggaaaactactatgagttttttgagaatgaagaggaagatttttcatctaatgatttgagttcaattactgaacaggttaatgaactttctgaggaagaagaggaagatgaaaagctggaacatattgaagaacttccagaagagggtgcagaaaaatcaaatgacatgccagaggtggtacaattaaggatgactgaaaacatcctggaatcaaatagtgttacggcaacaagcacccatatatctcccatcagcatcctaccagcctctacagatattttagaaagaacaattagagcagctgtggaacagcacctttttgatcttcagagcagcatagatcatgatcttaagaatttacaacagcaaagtgtggtgtgtaataatgaagcagaaagtattcattgtgatggggaaggatctaataaccagattgatattgctgatgatattattaatgccagtgaaagtaacagagactgttcaaaacctgtggctagcactaatttagacaatgaagctatgcagcaagattgtgtatttgagaatgaagaaaatacccagtctgtaggtatattgttagagccatgcagtgaccgtggtgatagtgaagatggctgtcttgagagggaagaatatttgttatttgacagtgataaattgtcacacttgattctggattctagtagcaagatatgtgatttgaatgccaacactgaatcagaagtaccaggaggtcagagtgttggtgttcaaggggaagcagcgtgtgtcagtattccacatttagatctgaagaatgtttctgatggtgataaatgggaagagccatttcctgcttttaagtcttggcaggaggactctgagtctggagaagctcagctgtctccacaagctggaagaatgaatcatcaccccttggaagaggactgtcctccagtattatcacaccgcagtttagattttggtcaaagccagcgtttcctacatgatccagaaaagttggattcctcatctaaagcactgtcttttactagaattcgaagatcatcctttagttcaaaagatgaaaagagagaggacagaacaccttatcagctggtcaagaaacttcagaagaaaatcagacaatttgaggaacagtttgaaagggaaagaaatagcaagccctcctacagtgatattgctgccaatccaaaggtattaaaatggatgacagagcttacaaaactgcggaagcaaattaaagatgcaaaacacaaaaattctgatggagaatttgtacctcagacacgtccacgtagtaacacacttccaaaaagctttggctcttctctagaccatgaagatgaagagaatgaagatgaacccaaggtcattcagaaggagaaaaaaccatctaaagaagcaacccttgaacttattcttaaaagactgaaagaaaaacgtattgagaggtgtcttccagaagatatcaagaaaatgaccaaagatcatttggtagaagagaaagcttctcttcagaaaagtcttctttactatgaaagtcaacatggaaggccggtgaccaaggaagaaaggcacattgttaaacctctctatgatagatacaggcttgtaaaacaaatgctgacaagagctagcatcactcctgtccttggatctccatccaccaagcgaaggggtcagatgttacagccaatcatagaaggagaaactgcacatttttttgaagaaatcaaggaggaagaagaagatggtgttaatctgtcctctgagttaggtgatatgttgaaaactgcagtacaggtacagtcttcattagaaaactctgaatctgatgttgaagaaaatcaagaaaaactggctctggatctccgattgtcaagttctcgagcagcttctatgcctgaattattggaacaactttggaaagccagagctgaaaaaaagaaactacgcaaaacgttgcgggaatttgaagaagcattttatcaacaaaatggaaggaatgcccagaaagaggatcgtgttccagtgcttgaggagtacagagagtacaagaaaattaaagccaagcttaggcttcttgaagttcttataagcaaacaagattcttcaaaatccatataagatacgttccttgaaaattcatatcataaagtcagttgtattccttgaagctatcatcgtgtgtacttggctggtacttaaattcgttttgtcaggcactcagagaatctcattttgtacttggttgtggtgccactaaacaaaacaaatgatgggagagtaagtaggccctctcaagggagcgtaagtgatgttccatattaaccacagactgtcctctccacctttagcaaacatatggtttacttcattgttttgtactacagatacatccttttagcaaaagactggaattttatcctttcaacttcaagaactttggaaatgcaagctttttgttattaccaactttttgtttctcattactgaagaaaattggaggaaaatcttcatactgaattcttctgttgcctttttcttacagaatgactgaaaatttgaaagaaaagcctataaaagtgcacatacgcaactgtgttctctgttttcctagaaaaccaaaatcaaactgagatttcaagtcgtactatggaacacctttctgtttaattcccaaagtgacatcttctcacaggtagtatgttagtaaaattttgcaattcgctggtcacacagctcccggatgaagataacagttggtagaccaaaaggtgacctcgcttagtatattgaaaacacacaccacacatcacacacagaactgaatcataccacatgctgcctatgggacttcagttactgtttcctgagttactgtttatccgctggcaatggtgtgatttgtctggatcagatccgcgctattccccaacccacctccagataatgtgagaaaatagccatgtcagtatgtaggaactctgatggtgctcagatttgtgtgttcaatcaatgggcttaaatcagcaaaatattatgcctaaagtaaatctgttcttaacaagggctctaccactgcattttcacatgtaccttcagggggttatctttttttttttcccctcctattttaatcagcaaaatccataccaaaacaacgacaacaacgccctcttaagggaccaccctttggtcaatcataacatgctgtttaaagcagctgtttacaggatgtgtagtggtatgccccttgtcatatactcttagcatatctttttttcctttggctttgcatggcttttcttcaggtactgtctcggtatcattctgctaatcattgttacagaatggtgacttcatttgtgctaacagtacaacagcagatttgggtcaggcttaatctaagtgttaacttttttttctggtgcttttttggattgatgactgtctcactttgactatacccatgttttgcatgcaatgactcatgcatggttttcttaactagctaatattaacaatttattccatataaaaatggaattttgcaacatcctttaataaggtgagggaagcatgaacctcagacttctggcactattacatagtaagcacatgaagtagtttgataataaatagcagttctagtacttcacatttcacccgtgtgtgcaatgcctttttctggggggtggggggtgagggaaaacctggtagtgaatgtgtagttggggaataaagaaaagcactaaatcctgccctttttgtgtggtttccttttgatacaactaggttattcataatgtatacctagaaaagtgaaattgaaaataccaaaagatgtatcatttttatttgaatccatcatgcagtgtacatttcagataatttccttcagtctccagataggagtgtatccaaacatctaattttatgtgcactgtgtatcttatatgaatgttttattttatataccacatgcaaaaatgtccatatgcactatttaaatgttttaaataatatattccttctttataatgctaaatctatatgagtaccatatttttataagtcagtggtctgactggtttcattttagaattaacagctgcttcaatatgttattcaatgttaatgtttggctgtgagtagaatatgtaaaagtggcatggcagcacttatgctctgtgacagtattgtgtgtcatagttgagcagtagctggtagaattaggcagttggtgatagttttactttggtacaaataaaaactgtatatctatatacaaataatatatagatatatatgtccaccagtataatggcattgctgtgtctggcacttcattgtacagacttttataataaaagaacttgaaagttctaagtcattgtaaatgtatgtttgtttttccactgggcttaaaaaaaaaaaaaa

SEQ ID NO: 11969 - protein, 915 aa, Homo sapiens
MRKSSSPSLSNCNSVLANKIFGIPLDELQQGGHPDNEVPFIVRHVVDYIEEHGGLEQQGLFQVNGNAETVEWLRQRYDSGEEVDLVKEADVPSAISLLRFFLQELPEPVIPGSLHIHLMQLSQDYNNEDEFGRKLRFLLQQLPPVNYSLLKFLCRFLANVASHHEEIWSANSLAAVFGPDVFHIYTDVEDMKEQEIVSRIMAGLLENYYEFFENEEEDFSSNDLSSITEQVNELSEEEEEDEKLEHIEELPEEGAEKSNDMPEVVQLRMTENILESNSVTATSTHISPISILPASTDILERTIRAAVEQHLFDLQSSIDHDLKNLQQQSVVCNNEAESIHCDGEGSNNQIDIADDIINASESNRDCSKPVASTNLDNEAMQQDCVFENEENTQSVGILLEPCSDRGDSEDGCLEREEYLLFDSDKLSHLILDSSSKICDLNANTESEVPGGQSVGVQGEAACVSIPHLDLKNVSDGDKWEEPFPAFKSWQEDSESGEAQLSPQAGRMNHHPLEEDCPPVLSHRSLDFGQSQRFLHDPEKLDSSSKALSFTRIRRSSFSSKDEKREDRTPYQLVKKLQKKIRQFEEQFERERNSKPSYSDIAANPKVLKWMTELTKLRKQIKDAKHKNSDGEFVPQTRPRSNTLPKSFGSSLDHEDEENEDEPKVIQKEKKPSKEATLELILKRLKEKRIERCLPEDIKKMTKDHLVEEKASLQKSLLYYESQHGRPVTKEERHIVKPLYDRYRLVKQMLTRASITPVLGSPSTKRRGQMLQPIIEGETAHFFEEIKEEEEDGVNLSSELGDMLKTAVQVQSSLENSESDVEENQEKLALDLRLSSSRAASMPELLEQLWKARAEKKKLRKTLREFEEAFYQQNGRNAQKEDRVPVLEEYREYKKIKAKLRLLEVLISKQDSSKSI

SEQ ID NO: 11970 - DNA, 5516 bp, Homo sapiens
ccgccagccgctctcctcccgctcgccgttagggaggctctgcacctcagccgccgcctctgtcgccactctctccccctgttccgcgtctgcgtcgccaccaccgccgggggtatccggggggtcgcttaccgggctggccccgcgccacagccgtagctttaacctcccgtcagcggccgccccaggaagaggcttctcggccgcggagccacttggggcctcagttctcgccctcttgccgtcgccgcgggtcctggagaagcggccgcggccagggaacggggcatcgcggttccaacgattaactgctgaagtactgatcgagttctgcatttcttcaatgaggaactacaggctgatcttctgccataatctcaaacagccataaatgacaaaagaatgcttgctcagtgagggtagctggtgcagaagccattttttaaacttaggtatttaagtactgaaagaaaagacagctttgatttctggctgcaaaaaagatatgaggaagagctcctccccttccttgagtaactgcaactccgttcttgctaacaaaatatttggaattccacttgatgagctgcagcagggaggacatccagacaatgaggttccattcatagtccgccacgttgtggactatattgaggaacatggaggtctggagcaacaaggactttttcaagtcaatggaaatgctgagacagtggagtggcttcggcagagatacgacagcggagaagaggtggatttggttaaggaagcagatgttccctcagctattagccttcttagattttttcttcaagaacttcctgaacctgttatccctggcagtttacatattcacttgatgcagctttctcaagattataataatgaagatgaatttggaagaaagttgaggttcctcttgcaacagcttccacctgttaattatagtttgttaaagtttctgtgtagatttttagccaatgtagcatcacatcatgaagaaatttggtccgcaaattctttggctgctgtctttggtccagatgtcttccacatttacacagatgtggaagacatgaaagagcaagaaatagtgagcaggataatggctggacttctggaaaactactatgagttttttgagaatgaagaggaagatttttcatctaatgatttgagttcaattactgaacaggttaatgaactttctgaggaagaagaggaagatgaaaagctggaacatattgaagaacttccagaagagggtgcagaaaaatcaaatgacatgccagaggtggtacaattaaggatgactgaaaacatcctggaatcaaatagtgttacggcaacaagcacccatatatctcccatcagcatcctaccagcctctacagatattttagaaagaacaattagagcagctgtggaacagcacctttttgatcttcagagcagcatagatcatgatcttaagaatttacaacagcaaagtgtggtgtgtaataatgaagcagaaagtattcattgtgatggggaaggatctaataaccagattgatattgctgatgatattattaatgccagtgaaagtaacagagactgttcaaaacctgtggctagcactaatttagacaatgaagctatgcagcaagattgtgtatttgagaatgaagaaaatacccagtctgtaggtatattgttagagccatgcagtgaccgtggtgatagtgaagatggctgtcttgagagggaagaatatttgttatttgacagtgataaattgtcacacttgattctggattctagtagcaagatatgtgatttgaatgccaacactgaatcagaagtaccaggaggtcagagtgttggtgttcaaggggaagcagcgtgtgtcagtattccacatttagatctgaagaatgtttctgatggtgataaatgggaagagccatttcctgcttttaagtcttggcaggaggactctgagtctggagaagctcagctgtctccacaagctggaagaatgaatcatcaccccttggaagaggactgtcctccagtattatcacaccgcagtttagattttggtcaaagccagcgtttcctacatgatccagaaaagttggattcctcatctaaagcactgtcttttactagaattcgaagatcatcctttagttcaaaagatgaaaagagagaggacagaacaccttatcagctggtcaagaaacttcagaagaaaatcagacaatttgaggaacagtttgaaagggaaagaaatagcaagccctcctacagtgatattgctgccaatccaaaggtattaaaatggatgacagagcttacaaaactgcggaagcaaattaaagatgcaaaacacaaaaattctgatggagaatttgtacctcagacacgtccacgtagtaacacacttccaaaaagctttggctcttctctagaccatgaagatgaagagaatgaagatgaacccaaggtcattcagaaggagaaaaaaccatctaaagaagcaacccttgaacttattcttaaaagactgaaagaaaaacgtattgagaggtgtcttccagaagatatcaagaaaatgaccaaagatcatttggtagaagagaaagcttctcttcagaaaagtcttctttactatgaaagtcaacatggaaggccggtgaccaaggaagaaaggcacattgttaaacctctctatgatagatacaggcttgtaaaacaaatgctgacaagagctagcatcactcctgtccttggatctccatccaccaagcgaaggggtcagatgttacagccaatcatagaaggagaaactgcacatttttttgaagaaatcaaggaggaagaagaagatggtgttaatctgtcctctgagttaggtgatatgttgaaaactgcagtacaggtacagtcttcattagaaaactctgaatctgatgttgaagaaaatcaagaaaaactggctctggatctccgattgtcaagttctcgagcagcttctatgcctgaattattggaacaactttggaaagccagagctgaaaaaaagaaactacgcaaaacgttgcgggaatttgaagaagcattttatcaacaaaatggaaggaatgcccagaaagaggatcgtgttccagtgcttgaggagtacagagagtacaagaaaattaaagccaagcttaggcttcttgaagttcttataagcaaacaagattcttcaaaatccatataagatacgttccttgaaaattcatatcataaagtcagttgtattccttgaagctatcatcgtgtgtacttggctggtacttaaattcgttttgtcaggcactcagagaatctcattttgtacttggttgtggtgccactaaacaaaacaaatgatgggagagtaagtaggccctctcaagggagcgtaagtgatgttccatattaaccacagactgtcctctccacctttagcaaacatatggtttacttcattgttttgtactacagatacatccttttagcaaaagactggaattttatcctttcaacttcaagaactttggaaatgcaagctttttgttattaccaactttttgtttctcattactgaagaaaattggaggaaaatcttcatactgaattcttctgttgcctttttcttacagaatgactgaaaatttgaaagaaaagcctataaaagtgcacatacgcaactgtgttctctgttttcctagaaaaccaaaatcaaactgagatttcaagtcgtactatggaacacctttctgtttaattcccaaagtgacatcttctcacaggtagtatgttagtaaaattttgcaattcgctggtcacacagctcccggatgaagataacagttggtagaccaaaaggtgacctcgcttagtatattgaaaacacacaccacacatcacacacagaactgaatcataccacatgctgcctatgggacttcagttactgtttcctgagttactgtttatccgctggcaatggtgtgatttgtctggatcagatccgcgctattccccaacccacctccagataatgtgagaaaatagccatgtcagtatgtaggaactctgatggtgctcagatttgtgtgttcaatcaatgggcttaaatcagcaaaatattatgcctaaagtaaatctgttcttaacaagggctctaccactgcattttcacatgtaccttcagggggttatctttttttttttcccctcctattttaatcagcaaaatccataccaaaacaacgacaacaacgccctcttaagggaccaccctttggtcaatcataacatgctgtttaaagcagctgtttacaggatgtgtagtggtatgccccttgtcatatactcttagcatatctttttttcctttggctttgcatggcttttcttcaggtactgtctcggtatcattctgctaatcattgttacagaatggtgacttcatttgtgctaacagtacaacagcagatttgggtcaggcttaatctaagtgttaacttttttttctggtgcttttttggattgatgactgtctcactttgactatacccatgttttgcatgcaatgactcatgcatggttttcttaactagctaatattaacaatttattccatataaaaatggaattttgcaacatcctttaataaggtgagggaagcatgaacctcagacttctggcactattacatagtaagcacatgaagtagtttgataataaatagcagttctagtacttcacatttcacccgtgtgtgcaatgcctttttctggggggtggggggtgagggaaaacctggtagtgaatgtgtagttggggaataaagaaaagcactaaatcctgccctttttgtgtggtttccttttgatacaactaggttattcataatgtatacctagaaaagtgaaattgaaaataccaaaagatgtatcatttttatttgaatccatcatgcagtgtacatttcagataatttccttcagtctccagataggagtgtatccaaacatctaattttatgtgcactgtgtatcttatatgaatgttttattttatataccacatgcaaaaatgtccatatgcactatttaaatgttttaaataatatattccttctttataatgctaaatctatatgagtaccatatttttataagtcagtggtctgactggtttcattttagaattaacagctgcttcaatatgttattcaatgttaatgtttggctgtgagtagaatatgtaaaagtggcatggcagcacttatgctctgtgacagtattgtgtgtcatagttgagcagtagctggtagaattaggcagttggtgatagttttactttggtacaaataaaaactgtatatctatatacaaataatatatagatatatatgtccaccagtataatggcattgctgtgtctggcacttcattgtacagacttttataataaaagaacttgaaagttct

SEQ ID NO: 11971 - protein, 915 aa, Homo sapiens; identical to SEQ ID NO: 11969

SEQ ID NO: 11972 - DNA, 3094 bp, Homo sapiens
cgccagccgctctcctcccgctcgccgttagggaggctctgcacctcagccgccgcctctgtcgccactctctccccctgttccgcgtctgcgtcgccaccaccgccgggggtatccggggggtcgcttaccgggctggccccgcgccacagccgtagctttaacctcccgtcagcggccgccccaggaagaggcttctcggccgcggagccacttggggcctcagttctcgccctcttgccgtcgccgcgggtcctggagaagcggccgcggccagggaacggggcatcgcggttccaacgattaactgctgaagtactgatcgagttctgcatttcttcaatgaggaactacaggctgatcttctgccataatctcaaacagccataaatgacaaaagaatgcttgctcagtgagggtagctggtgcagaagccattttttaaacttaggtatttaagtactgaaaggaggtctggagcaacaaggactttttcaagtcaatggaaatgctgagacagtggagtggcttcggcagagatacgacagcggagaagaggtggatttggttaaggaagcagatgttccctcagctattagccttcttagattttttcttcaagaacttcctgaacctgttatccctggcagtttacatattcacttgatgcagctttctcaagattataataatgaagatgaatttggaagaaagttgaggttcctcttgcaacagcttccacctgttaattatagtttgttaaagtttctgtgtagatttttagccaatgtagcatcacatcatgaagaaatttggtccgcaaattctttggctgctgtctttggtccagatgtcttccacatttacacagatgtggaagacatgaaagagcaagaaatagtgagcaggataatggctggacttctggaaaactactatgagttttttgagaatgaagaggaagatttttcatctaatgatttgagttcaattactgaacaggttaatgaactttctgaggaagaagaggaagatgaaaagctggaacatattgaagaacttccagaagagggtgcagaaaaatcaaatgacatgccagaggtggtacaattaaggatgactgaaaacatcctggaatcaaatagtgttacggcaacaagcacccatatatctcccatcagcatcctaccagcctctacagatattttagaaagaacaattagagcagctgtggaacagcacctttttgatcttcagagcagcatagatcatgatcttaagaatttacaacagcaaagtgtggtgtgtaataatgaagcagaaagtattcattgtgatggggaaggatctaataaccagattgatattgctgatgatattattaatgccagtgaaagtaacagagactgttcaaaacctgtggctagcactaatttagacaatgaagctatgcagcaagattgtgtatttgagaatgaagaaaatacccagtctgtaggtatattgttagagccatgcagtgaccgtggtgatagtgaagatggctgtcttgagagggaagaatatttgttatttgacagtgataaattgtcacacttgattctggattctagtagcaagatatgtgatttgaatgccaacactgaatcagaagtaccaggaggtcagagtgttggtgttcaaggggaagcagcgtgtgtcagtattccacatttagatctgaagaatgtttctgatggtgataaatgggaagcgtcatgccctatcacttttcccctcattgatttcaaaacaatgcatctgcagagagatggggaggagccatttcctgcttttaagtcttggcaggaggactctgagtctggagaagctcagctgtctccacaagctggaagaatgaatcatcaccccttggaagaggactgtcctccagtattatcacaccgcagtttagattttggtcaaagccagcgtttcctacatgatccagaaaagttggattcctcatctaaagcactgtcttttactagaattcgaagatcatcctttagttcaaaagatgaaaagagagaggacagaacaccttatcagctggtcaagaaacttcagaagaaaatcagacaatttgaggaacagtttgaaagggaaagaaatagcaagccctcctacagtgatattgctgccaatccaaaggtattaaaatggatgacagagcttacaaaactgcggaagcaaattaaagatgcaaaacacaaaaattctgatggagaatttgtacctcagacacgtccacgtagtaacacacttccaaaaagctttggctcttctctagaccatgaagatgaagagaatgaagatgaacccaaggtcattcagaaggagaaaaaaccatctaaagaagcaacccttgaacttattcttaaaagactgaaagaaaaacgtattgagaggtgtcttccagaagatatcaaggtgaccaaggaagaaaggcacattgttaaacctctctatgatagatacaggcttgtaaaacaaatgctgacaagagctagcatcactcctgtccttggatctccatccaccaagcgaaggggtcagatgttacagccaatcatagaaggagaaactgcacatttttttgaagaaatcaaggaggaagaagaagatggtgttaatctgtcctctgagttaggtgatatgttgaaaactgcagtacaggtacagtcttcattagaaaactctgaatctgatgttgaagaaaatcaagaaaaactggctctggatctccgattgtcaagttctcgagcagcttctatgcctgaattattggaacaactttggaaagccagagctgaaaaaaagaaactacgcaaaacgttgcgggaatttgaagaagcattttatcaacaaaatggaaggaatgcccagaaagaggatcgtgttccagtgcttgaggagtacagagagtacaagaaaattaaagccaagcttaggcttcttgaagttcttataagcaaacaagattcttcaaaatccatataagatacgttccttgaaaattcatatcataaagtcagttgtattccttgaagct

SEQ ID NO: 11973 - protein, 791 aa, Homo sapiens
MQLSQDYNNEDEFGRKLRFLLQQLPPVNYSLLKFLCRFLANVASHHEEIWSANSLAAVFGPDVFHIYTDVEDMKEQEIVSRIMAGLLENYYEFFENEEEDFSSNDLSSITEQVNELSEEEEEDEKLEHIEELPEEGAEKSNDMPEVVQLRMTENILESNSVTATSTHISPISILPASTDILERTIRAAVEQHLFDLQSSIDHDLKNLQQQSVVCNNEAESIHCDGEGSNNQIDIADDIINASESNRDCSKPVASTNLDNEAMQQDCVFENEENTQSVGILLEPCSDRGDSEDGCLEREEYLLFDSDKLSHLILDSSSKICDLNANTESEVPGGQSVGVQGEAACVSIPHLDLKNVSDGDKWEASCPITFPLIDFKTMHLQRDGEEPFPAFKSWQEDSESGEAQLSPQAGRMNHHPLEEDCPPVLSHRSLDFGQSQRFLHDPEKLDSSSKALSFTRIRRSSFSSKDEKREDRTPYQLVKKLQKKIRQFEEQFERERNSKPSYSDIAANPKVLKWMTELTKLRKQIKDAKHKNSDGEFVPQTRPRSNTLPKSFGSSLDHEDEENEDEPKVIQKEKKPSKEATLELILKRLKEKRIERCLPEDIKVTKEERHIVKPLYDRYRLVKQMLTRASITPVLGSPSTKRRGQMLQPIIEGETAHFFEEIKEEEEDGVNLSSELGDMLKTAVQVQSSLENSESDVEENQEKLALDLRLSSSRAASMPELLEQLWKARAEKKKLRKTLREFEEAFYQQNGRNAQKEDRVPVLEEYREYKKIKAKLRLLEVLISKQDSSKSI

SEQ ID NO: 11974 - DNA, 3222 bp, Homo sapiens
cccgccagccgctctcctcccgctcgccgttagggaggctctgcacctcagccgccgcctctgtcgccactctctccccctgttccgcgtctgcgtcgccaccaccgccgggggtatccggggggtcgcttaccgggctggccccgcgccacagccgtagctttaacctcccgtcagcggccgccccaggaagaggcttctcggccgcggagccacttggggcctcagttctcgccctcttgccgtcgccgcgggtcctggagaagcggccgcggccagggaacggggcatcgcggttccaacgattaactgctgaagtactgatcgagttctgcatttcttcaatgaggaactacaggctgatcttctgccataatctcaaacagccataaatgacaaaagaatgcttgctcagtgagggtagctggtgcagaagccattttttaaacttaggtatttaagtactgaaagaaaagacagctttgatttctggctgcaaaaaagatatgaggaagagctcctccccttccttgagtaactgcaactccgttcttgctaacaaaatatttggaattccacttgatgagctgcagcagggaggacatccagacaatgaggttccattcatagtccgccacgttgtggactatattgaggaacatggaggtctggagcaacaaggactttttcaagtcaatggaaatgctgagacagtggagtggcttcggcagagatacgacagcggagaagaggtggatttggttaaggaagcagatgttccctcagctattagccttcttagattttttcttcaagaacttcctgaacctgttatccctggcagtttacatattcacttgatgcagctttctcaagattataataatgaagatgaatttggaagaaagttgaggttcctcttgcaacagcttccacctgttaattatagtttgttaaagtttctgtgtagatttttagccaatgtagcatcacatcatgaagaaatttggtccgcaaattctttggctgctgtctttggtccagatgtcttccacatttacacagatgtggaagacatgaaagagcaagaaatagtgagcaggataatggctggacttctggaaaactactatgagttttttgagaatgaagaggaagatttttcatctaatgatttgagttcaattactgaacaggttaatgaactttctgaggaagaagaggaagatgaaaagctggaacatattgaagaacttccagaagagggtgcagaaaaatcaaatgacatgccagaggtggtacaattaaggatgactgaaaacatcctggaatcaaatagtgttacggcaacaagcacccatatatctcccatcagcatcctaccagcctctacagatattttagaaagaacaattagagcagctgtggaacagcacctttttgatcttcagagcagcatagatcatgatcttaagaatttacaacagcaaagtgtggtgtgtaataatgaagcagaaagtattcattgtgatggggaaggatctaataaccagattgatattgctgatgatattattaatgccagtgaaagtaacagagactgttcaaaacctgtggctagcactaatttagacaatgaagctatgcagcaagattgtgtatttgagaatgaagaaaatacccagtctgtaggtatattgttagagccatgcagtgaccgtggtgatagtgaagatggctgtcttgagagggaagaatatttgttatttgacagtgataaattgtcacacttgattctggattctagtagcaagatatgtgatttgaatgccaacactgaatcagaagtaccaggaggtcagagtgttggtgttcaaggggaagcagcgtgtgtcagtattccacatttagatctgaagaatgtttctgatggtgataaatgggaagagccatttcctgcttttaagtcttggcaggaggactctgagtctggagaagctcagctgtctccacaagctggaagaatgaatcatcaccccttggaagaggactgtcctccagtattatcacaccgcagtttagattttggtcaaagccagcgtttcctacatgatccagaaaagttggattcctcatctaaagcactgtcttttactagaattcgaagatcatcctttagttcaaaagatgaaaagagagaggacagaacaccttatcagctggtcaagaaacttcagaagaaaatcagacaatttgaggaacagtttgaaagggaaagaaatagcaagccctcctacagtgatattgctgccaatccaaaggtattaaaatggatgacagagcttacaaaactgcggaagcaaattaaagatgcaaaacacaaaaattctgatggagaatttgtacctcagacacgtccacgtagtaacacacttccaaaaagctttggctcttctctagaccatgaagatgaagagaatgaagatgaacccaaggtcattcagaaggagaaaaaaccatctaaagaagcaacccttgaacttattcttaaaagactgaaagaaaaacgtattgagaggtgtcttccagaagatatcaaggtgaccaaggaagaaaggcacattgttaaacctctctatgatagatacaggcttgtaaaacaaatgctgacaagagctagcatcactcctgtccttggatctccatccaccaagcgaaggggtcagatgttacagccaatcatagaaggagaaactgcacatttttttgaagaaatcaaggaggaagaagaagatggtgttaatctgtcctctgagttaggtgatatgttgaaaactgcagtacaggtacagtcttcattagaaaactctgaatctgatgttgaagaaaatcaagaaaaactggctctggatctccgattgtcaagttctcgagcagcttctatgcctgaattattggaacaactttggaaagccagagctgaaaaaaagaaactacgcaaaacgttgcgggaatttgaagaagcattttatcaacaaaatggaaggaatgcccagaaagaggatcgtgttccagtgcttgaggagtacagagagtacaagaaaattaaagccaagcttaggcttcttgaagttcttataagcaaacaagattcttcaaaatccatataagatacgttccttgaaaattcatatcataaagtcagttgtattccttgaagct

SEQ ID NO: 11975 - protein, 887 aa, Homo sapiens
MRKSSSPSLSNCNSVLANKIFGIPLDELQQGGHPDNEVPFIVRHVVDYIEEHGGLEQQGLFQVNGNAETVEWLRQRYDSGEEVDLVKEADVPSAISLLRFFLQELPEPVIPGSLHIHLMQLSQDYNNEDEFGRKLRFLLQQLPPVNYSLLKFLCRFLANVASHHEEIWSANSLAAVFGPDVFHIYTDVEDMKEQEIVSRIMAGLLENYYEFFENEEEDFSSNDLSSITEQVNELSEEEEEDEKLEHIEELPEEGAEKSNDMPEVVQLRMTENILESNSVTATSTHISPISILPASTDILERTIRAAVEQHLFDLQSSIDHDLKNLQQQSVVCNNEAESIHCDGEGSNNQIDIADDIINASESNRDCSKPVASTNLDNEAMQQDCVFENEENTQSVGILLEPCSDRGDSEDGCLEREEYLLFDSDKLSHLILDSSSKICDLNANTESEVPGGQSVGVQGEAACVSIPHLDLKNVSDGDKWEEPFPAFKSWQEDSESGEAQLSPQAGRMNHHPLEEDCPPVLSHRSLDFGQSQRFLHDPEKLDSSSKALSFTRIRRSSFSSKDEKREDRTPYQLVKKLQKKIRQFEEQFERERNSKPSYSDIAANPKVLKWMTELTKLRKQIKDAKHKNSDGEFVPQTRPRSNTLPKSFGSSLDHEDEENEDEPKVIQKEKKPSKEATLELILKRLKEKRIERCLPEDIKVTKEERHIVKPLYDRYRLVKQMLTRASITPVLGSPSTKRRGQMLQPIIEGETAHFFEEIKEEEEDGVNLSSELGDMLKTAVQVQSSLENSESDVEENQEKLALDLRLSSSRAASMPELLEQLWKARAEKKKLRKTLREFEEAFYQQNGRNAQKEDRVPVLEEYREYKKIKAKLRLLEVLISKQDSSKSI

SEQ ID NO: 11976 - DNA, 3730 bp, Homo sapiens
gtccatgagtacccgatgtttagctcccacttatagatgagcacattcagtatttggtttgctgttcatttattaatttgtttaggataatggcctccacctacatccgtgttatcccaaaggacatgattttgtttttttttttttttgtttttgagatggagtctcgctctgtcatccaggctggagtgcagtggtgtgatctcagctcactgcaacctccgcctcccgggttcaagcaatttttcacctcagcctcccaagtagctgggattacaggcacccaccaccacacccagctaattttttagtagagacagggtttcaccatcttggccaggctggtcttgaactcctgaccttgtcatccacctgcctcggccttccaaagtgctgggattacaggcatgagccaccgtgccctgccgattttgttcttttttatggctgtataatatttcatggcgtatatgtaccacattttctttatccaatccactgttgatgggcacctgatttcatgactttgctattgtgaatagtgctgtggataaccatgtgactgcatgtgttgtttttggtagaatgatttgttttcttttggatatatatacctagtgatgggattgctgagtcgaatgtcagcagatgaatgagtaaataagatgtggtaacccgtacactcaaaatactcttcagccataaaaaacaatgaaataataatagatgccacaacatgggtgaaccttggaaacaagctgaatgagagaagcctgacacaaaggggcacatattatatgatcccatttgtatgaaatatttagaataggcaagaccatagagacagaatttagattagtggttaccaagggctaggcggagaaggcaaatgagtaacagctaatgggcacagagtttcttctgaggtaatgaaacgttccgaaattagtggagatagttgcacaacttggtaaatatactaaaaaccaccaaattatacattttaaaagggtgaattttatgatatataattatatcttaataaagttatttttaaaaaagagtatagaatggtcctcaaaccaaaaaagttgatacctatttttaaaaagaaaagtgcttcccattaaactatatgtatgttcttatcatttagaattttttttttgaggcagagtcttggtctgttgcccaggctggagtgtggtggtacaacttggctcactgcaacctccacctcctggggttcaagcaattcccctgcctcagcctcctgagtagctgggactacaggtgcgtgccaccacgcctggctaattttttgtatttttagtagaggcgggctttcaccgtgttagccaggatggtctcgatctccttacctgtgatccgcctgccttggcctcccaaagtgctgggattacaggcgttagccaccgtgcctggcccatttagaatttttaaaatatctgttgtatgagctctttcagacttttctagacataaattattatcttccttgtgcataaataaaaatataagcaaaaataaatgtaagcaattcctaaaaagatttaaagcaaatgtttaagattttgaaaataaagttgaagattcgtaacataatgaagggaagcttcactggacactttgaatacttaaaatgtaaaactatttatattattgattgttatagggatctccatccaccaagcgaaggggtcagatgttacagccaatcatagaaggagaaactgcacatttttttgaagaaatcaaggaggaagaagaagatggtgttaatctgtcctctgagttaggtgatatgttgaaaactgcagtacaggtacagtcttcattagaaaactctgaatctgatgttgaagaaaatcaagaaaaactggctctggatctccgattgtcaagttctcgagcagcttctatgtatgtatgctgatttgtgattttagcctatttttataataaaatgtatatgccaagaaatttgatgttaaatgagtattaaggaattaataggagatgaatcaagaatttatcaaaggacacatgcttttcaagtgtgatttgcaaatatttattgtcattcccatttttaaataaaacattactgtatttcaaaaattaaaaaaaaatctagccaggcacagtggctcatgcctataatcccagcagtttttgaagctgaggcaggaggatcccttgaggccaggagttcaagaccagcctgggcaatatagtgggacccagactgtataaaaattttgtttaaattagccaggggtggtggtgttcgcgtgtagtcccagatacttgggaggctgaggcaagaggatcacttgattctctgtttggaggatgttgaggccactgtcgcaccgctgttccagcctgggcgacagagtgagactctgtctctaaaaaaggaaacaaacaaataaaatcctacagttgatttataacaaagtacaggaactagttgcgagttgatctttttgttctatatccacttctttacctttggatgatatggtgtatgtcactggttctgagccctgacttcactgggaagattttaaagtactgatgcttgagtccttcagctattctgatttcattggtttgcagtggagcttaggcattggtagacctaacagttccccagccacttttaatttgcagccagaaatagaacctctcttaagaatataatgaatcaagtgtgcccttcagtattttaccatttcaattctaggcctgaattattggaacaactttggaaagccagagctgaaaaaaagaaactacgcaaaacgttgcgggaatttgaagaagcattttatcaacaaaatggaaggtttgttgagcatcacaaaattgagtcatctttcttctctaactcacaaactgaccatatgttgaaataatggaatacgtgggattagaaattgtgcatataggatgctagcactgaaaaattttaaaacattcctttatgctctgaggccctgcttttaatggccaggaatagtcacagccagtgtaaacaacatctgattaactattttcggattgtcctagggagccttggttgtattgcagtgattttatattctttaattctacatccttacccttttgggagtggttgtgaaatgagatatctcttattttagaaaggatcccatgacaggagtggtatccttaactagtttggattttttattttatactgagaccattgtgttcatactgtgtgttgaggttgcccgtttccaaggtgtctaacagtgtgccaggcatgtggctcctataatacagtatggcacatgcctttatctaactaggtaatgcacagttgacttggaagggctctttttaaaaactaagaaaaatacattccagttctgatggtggccagaagtttgggttcagttatctcaggcctgagaaacatttttctaagtagctgggttatcttaccaagctgatagctaatattacaaattctaaaatatctgtactttaattccctttgctttgtgagtctcctatataggttggcacatatggttaaaaaaaaatctgaagtgggccaggcgcagtggctcacgtctgtaataccagcactttgggaggctgaggcgggtggatcacgaggtcaggagatcaagaccatcctggctaacacagtgaaaccctgtctctaccg

SEQ ID NO: 11977 - protein, 76 aa, Homo sapiens
MLQPIIEGETAHFFEEIKEEEEDGVNLSSELGDMLKTAVQVQSSLENSESDVEENQEKLALDLRLSSSRAASMYVC

SEQ ID NO: 11978 - DNA, 730 bp, Homo sapiens
cggccgcggccagggaacggggcatcgcggttccaacgattaactgctgaagtactgatcgagttctgcatttcttcaatgaggaactacaggctgatcttctgccataatctcaaacagccataaatgacaaaagaatgcttgctcagtgagggtagctggtgcagaagccattttttaaacttaggtatttaagtactgaaaggtaagttttcaaaatggtaactatctcgtgctctataaatccatagagattttggaacttgcccctgtagctgctatttgatttaacttgaggttttatagttcttagctggcaccagatacattgaagaatggatgttgcttgtctgagactatgtaaatgtatggcattttgctatccttaagttaattttttcttttaagttggctgcattgtttcctagtcatgttgtgacattcttgatccagtgggtatacacttgatccagtggaccttatttttgtaaacttaggaattttagtagacttatttttgtgatttgctttttttctcttgcagtgagaaagaaattgtttttctagggtgatggaaaaaataccagctggtgtcattttgttcattatcaacctttgagtttttctttcttttacaaatactcttttcctacgtaaagtaataaatgtgtaatgtgtttattttagaaaataaatttttcttaggattacttgttctctgatgtgtcag

SEQ ID NO: 11979 - protein, 37 aa, Homo sapiens
DYVNVWHFAILKLIFSFKLAALFPSHVVTFLIQWVYT

SEQ ID NO: 11980 - DNA, 876 bp, Homo sapiens
ttacctaccgttggaaccgcgatgccccgttccctggccgcggccgcttctccaggacccgcggcgacggcaagagggcgagaactgaggccccaagtggctccgcggccgagaagcctcttcctggggcggccgctgacgggaggttaaagctacggctgtggcgcggggccagcccgcaggtggcagtaaagtgttttgtccaaactaaattacaacgactgcttcccaatagatggaagcaaagcgtctggacgaaggagagcttttttctcatggtgctgctgtgttagcctagtgacagctctgtatggcccacacctggtccacaggaagctctcaggcacctcttgcccgaacaaacttgggagtacaggctaatcccagtgcagattcaacattcctctactctgctgccaaaacagccgccagcctgtgggagtcagacacaggcccacggtgcccctcagactgcaggaggtacaagtcaagtgctctgagcagatccattgaaggcccactccctcgacttgaagtaaaaggcaggcaggcacctgtggtaagaatcacagctcaccagcaacagtctccaaagacattgtcctcaataattctggtttggccttttataactaaataactgagtatttaatctacctgctttgtctaaatcctctgaaatttctagagggggtctatctcagaaattactttagttttttggtggatggagggaagaagatggtttcttttataataatcttgttgcttcagttaaaacagtggttctcaactgcgacaattttgggggaccatgtgtgcagacatttttggtttttttttaaactttttttttccttctgaattcaggatctg

SEQ ID NO: 11981 - protein, 109 aa, Homo sapiens
MAHTWSTGSSQAPLARTNLGVQANPSADSTFLYSAAKTAASLWESDTGPRCPSDCRRYKSSALSRSIEGPLPRLEVKGRQAPVVRITAHQQQSPKTLSSIILVWPFITK

SEQ ID NO: 11982 - DNA, 646 bp, Homo sapiens
gttgaaaataaataaataacaaagaataaatatccctttctcttcttccctctgcctgtatccatataggggaaagaaaaaactgctctgagattcagtgagattatgaccttcacaaaatcatgaactttctgctgcctttttaaccagaaatctaggcaggagggtctcaccattttgcatatcctacctgttccttacaggctctaggcttttgagccttcctatcatttgaccagccaagttgcttctcagcaccttttttttcccctttgagtcagggtctgggtccagtggcccaattatagctcactgcagcctcagtatcccaggctcaagcaatcctcccacctcagcctcccaagtatctgggactacaggcatgtgccaccatgcctagccttcaggcaccttccattcagaccacattttctgtggcaaactgacaacgccaatgtttgcagtttgcagtttaactacagctgtattttttgccaaacatttacacctaactactcttttccactagagtatataacaatttacagaagcatttaatgttttctgaatccccaagctcatcagcagagaagctccaaaacatgaaggtgtacatccctattttaggccttcatagaaagaaacc

SEQ ID NO: 11983 - protein, 93 aa, Homo sapiens
VRVWVQWPNYSSLQPQYPRLKQSSHLSLPSIWDYRHVPPCLAFRHLPFRPHFLWQTDNANVCSLQFNYSCIFCQTFTPNYSFPLEYITIYRSI

SEQ ID NO: 11984 - DNA, 1899 bp, Homo sapiens
cagaattttctcacataaatactgaggaagaccctgccctctcctcacttctctggacttggccctgagctggacctggtccactggggtaggcagggcgatggggaacctgtttatgctctgggcagctctgggcatatgctgtgctgcattcagtgcctctgcctggtcagtgaacaatttcctgataacaggtcccaaggcctatctgacctacacgactagtgtggccttgggtgcccagagtggcatcgaggagtgcaagttccagtttgcttgggaacgctggaactgccctgaaaatgctcttcagctctccacccacaacaggctgagaagtgctaccagagagacttccttcatacatgctatcagctctgctggagtcatgtacatcatcaccaagaactgtagcatgggtgacttcgaaaactgtggctgtgatgggtcaaacaatggaaaaacaggaggccatggctggatctggggaggctgcagcgacaatgtggaatttggggaaaggatctccaaactctttgtggacagtttggagaaggggaaggatgccagagccctgatgaatcttcacaacaacagggccggcagactggcagtgagagccaccatgaaaaggacatgcaaatgtcatggcatctctgggagctgcagcatacagacatgctggctgcagctggctgaattccgggagatgggagactacctaaaggccaagtatgaccaggcgctgaaaattgaaatggataagcggcagctgagagctgggaacagcgccgagggccactgggtgcccgctgaggccttccttcctagcgcagaggcggaactgatctttttagaggaatcaccagattactgtacctgcaattccagcctgggcatctatggcacagagggtcgtgagtgcctacagaacagccacaacacatccaggtgggagcgacgtagctgtgggcgcctgtgcactgagtgtgggctgcaggtggaagagaggaaaactgaggtcataagcagctgtaactgcaaattccagtggtgctgtacggtcaagtgtgaccagtgtaggcatgtggtgagcaagtattactgcgcacgctccccaggcagtgcccagtccctgggtaagggcagtgcctgataataccccacacaagttcacttgattaattgcatcagtggaaggggacatagcttctctcttagagagaacagattggaaagcaatcggaaaattgcagttttggtctgtagtcctcatgatatctgctatcagtggggaaaatggaggcccaagattctacagcatattcctggcggggctgaaattggaacctgggcctcctgactttggcagacccccatttcatctttcctgcaaactactttcccatctttgtgcctgtacttatgcagctttctacagggagagtttggtttggggtctatatctagagggaccttcaaagtatttgttcctttaaatttcagaccatgtccaacccagctgtgctgctgggaatcaggagaatagaagcaaaaaacgaaagagttctgttcagacttctgaagagcagcctgtggctacaaatctatgctgataaatgagattgagaactcaactgtattttgccataaatgcttctaagatatatccagctgggacttctattactccctttggaaaccttaagatcaaaaagggaataagaaacccttcttctgtatcccaataatccaccaggataaaggagaaactagaaatatgcaactcccttgatttcagtgtttggcaggtaacaaaaaattgagacccagacactggtcaacaggaaaacaatacagactcccagaattagaaagtgttattttaatgcaacctag

SEQ ID NO: 11985 - protein, 351 aa, Homo sapiens; identical to SEQ ID NO: 1137

SEQ ID NO: 11986 - DNA, 1597 bp, Homo sapiens
cagaattttctcacataaatactgaggaagaccctgccctctcctcacttctctggacttggccctgagctggacctggtccactggggtaggcagggcgatggggaacctgtttatgctctgggcagctctgggcatatgctgtgctgcattcagtgcctctgcctggtcagtgaacaatttcctgataacaggtcccaaggcctatctgacctacacgactagtgtggccttgggtgcccagagtggcatcgaggagtgcaagttccagtttgcttgggaacgctggaactgccctgaaaatgctcttcagctctccacccacaacaggctgagaagtgctaccagagagacttccttcatacatgctatcagctctgctggagtcatgtacatcatcaccaagaactgtagcatgggtgacttcgaaaactgtggctgtgatgggtcaaacaatggaaaaacaggaggccatggctggatctggggaggctgcagcgacaatgtggaatttggggaaaggatctccaaactctttgtggacagtttggagaaggggaaggatgccagagccctgatgaatcttcacaacaacagggccggcagactggcagtgagagccaccatgaaaaggacatgcaaatgtcatggcatctctgggagctgcagcatacagacatgctggctgcagctggctgaattccgggagatgggagactacctaaaggccaagtatgaccaggcgctgaaaattgaaatggataagcggcagctgagagctgggaacagcgccgagggccactgggtgcccgctgaggccttccttcctagcgcagaggcggaactgatctttttagaggaatcaccagattactgtacctgcaattccagcctgggcatctatggcacagagggtcgtgagtgcctacagaacagccacaacacatccaggtgggagcgacgtagctgtgggcgcctgtgcactgagtgtgggctgcaggtggaagagaggaaaactgaggtcataagcagctgtaactgcaaattccagtggtgctgtacggtcaagtgtgaccagtgtaggcatgtggtgagcaagtattactgcgcacgctccccaggcagtgcccagtccctggggagagtttggtttggggtctatatctagagggaccttcaaagtatttgttcctttaaatttcagaccatgtccaacccagctgtgctgctgggaatcaggagaatagaagcaaaaaacgaaagagttctgttcagacttctgaagagcagcctgtggctacaaatctatgctgataaatgagattgagaactcaactgtattttgccataaatgcttctaagatatatccagctgggacttctattactccctttggaaaccttaagatcaaaaagggaataagaaacccttcttctgtatcccaataatccaccaggataaaggagaaactagaaatatgcaactcccttgatttcagtgtttggcaggtaacaaaaaattgagacccagacactggtcaacaggaaaacaatacagactcccagaattagaaagtgttattttaatgcaacctag

SEQ ID NO: 11987 - protein, 355 aa, Homo sapiens
MGNLFMLWAALGICCAAFSASAWSVNNFLITGPKAYLTYTTSVALGAQSGIEECKFQFAWERWNCPENALQLSTHNRLRSATRETSFIHAISSAGVMYIITKNCSMGDFENCGCDGSNNGKTGGHGWIWGGCSDNVEFGERISKLFVDSLEKGKDARALMNLHNNRAGRLAVRATMKRTCKCHGISGSCSIQTCWLQLAEFREMGDYLKAKYDQALKIEMDKRQLRAGNSAEGHWVPAEAFLPSAEAELIFLEESPDYCTCNSSLGIYGTEGRECLQNSHNTSRWERRSCGRLCTECGLQVEERKTEVISSCNCKFQWCCTVKCDQCRHVVSKYYCARSPGSAQSLGRVWFGVYI

SEQ ID NO: 11988 - DNA, 1152 bp, Homo sapiens
gctttccatttctgcaaaaaaacttgttggacatttggcaagagctgcactgaatctgtagattgctttgggaagtattgacatcttaacaatatcaaatctccgtatccatgaaaaataatgtcttctcatttatttagatttggctagctgattggctgctgaaaaataatcctaacaaacccaaactttgtcaccatccaattgtagaagaaccttattaaaaaaaaaatcctcgaaagaacaaatcatgaactatcttattataaaaggctgtacttctactgtttgaaaaaattatttctagggtttaagtaactacaagtaaaataaatttatttcttaaaaataagtgttaaaggaataactattctatgaagcagataacattaaggtaaaatataggcttagagtatgattttaacaatgatgtaacactaggtaatggaaaactcatgtaagatgttgctagatgtttttgtttttcttaagtttgagaagtaagacataaagtttagttatacattttcccaagcacatatcctatatctaaatacataattaatgcacagttgagacagtctagtttaaaaggcttaggtccttttgtagtccataagcatggtgatttggtttcatgctcatgtgtcagatatgcttccctcaaaccttgttacagcatcatcacattacctgtttgatgtaaaaaataaaaaatagaaaggtgtaagtatataagtaattttttggtacaatgaaaatggccagaaccaggggatgatcttaaactaatcacttggataactattaggctggtgcaaaagcaattatggtttttgtcattaaaaaacaatggcaaaaaccacaatcacggccggtcttggtggctcacgcctctaatcccagcactttgggaggccgaggcgggtggatcacgaggtcaggagatcgagaccatcctggctaacacggtgaaaccccgtctctactaaatatacaaacaattagccgggcgtagtggcggcgcctgtattcccagctactcgggaggctgaggcaggagaatggcgtgaacccagggggcggagcttgcagtgagccgagatcgcaccactgccctccagcctgggtgacagagcgagactctgtctc

SEQ ID NO: 11989 - protein, 45 aa, Homo sapiens
MVFVIKKQWQKPQSRPVLVAHASNPSTLGGRGGWITRSGDRDHPG

SEQ ID NO: 11990 - DNA, 1296 bp, Homo sapiens
gcatgcatataaagtaaggaatagacgttagattggatggacgtcatctctaacttgtttttagtctgagggcaatttatggcacagatgacctaaggaatgcacttcatgggagtaatgactttgctgctgcggaaagagaaatacgttttatgtttcctgaagtgattgttgagcccattccaattggacaagctgctaaggactatttaaatttacatataatgccaactctgcttgaaggactcacagagctttgtaagcaaaaaccagcagatcctttgatttggctagctgattggctgctgaaaaataatcctaacaaacccaaactttgtcaccatccaattgtagaagaaccttattaaaaaaaaaatcctcgaaagaacaaatcatgaactatcttattataaaaggctgtacttctactgtttgaaaaaattatttctagggtttaagtaactacaagtaaaataaatttatttcttaaaaataagtgttaaaggaataactattctatgaagcagataacattaaggtaaaatataggcttagagtatgattttaacaatgatgtaacactaggtaatggaaaactcatgtaagatgttgctagatgtttttgtttttcttaagtttgagaagtaagacataaagtttagttatacattttcccaagcacatatcctatatctaaatacataattaatgcacagttgagacagtctagtttaaaaggcttaggtccttttgtagtccataagcatggtgatttggtttcatgctcatgtgtcagatatgcttccctcaaaccttgttacagcatcatcacattacctgtttgatgtaaaaaataaaaaatagaaaggtgtaagtatataagtaattttttggtacaatgaaaatggccagaaccaggggatgatcttaaactaatcacttggataactattaggctggtgcaaaagcaattatggtttttgtcattaaaaaacaatggcaaaaaccacaatcacggccggtcttggtggctcacgcctctaatcccagcactttgggaggccgaggcgggtggatcacgaggtcaggagatcgagaccatcctggctaacacggtgaaaccccgtctctactaaatatacaaacaattagccgggcgtagtggcggcgcctgtattcccagctactcgggaggctgaggcaggagaatggcgtgaacccagggggcggagcttgcagtgagccgagatcgcaccactgccctccagcctgggtgacagagcgagactctgtctc

SEQ ID NO: 11991 - protein, 71 aa, Homo sapiens
MFPEVIVEPIPIGQAAKDYLNLHIMPTLLEGLTELCKQKPADPLIWLADWLLKNNPNKPKLCHHPIVEEPY

SEQ ID NO: 11992 - DNA, 1617 bp, Homo sapiens
aggtctcctagcaacaagttgtaccatatgaggacggccgctgagccataatggagatatcaatgcctccacctcagatatatgtagaaaaaactctggccattatcaaaccagatattgttgacaaagaggaggagatacaagatattattcttagatccggattcaccattgttcagagaagaaaactacgcctcagccctgagcaatgtagtaacttttatgtggaaaagtatggaaaaatgtttttccccaacttaacagcttacatgagttctggaccacttgtcgccatgatattagctagacataaagccatctcttattggttagaacttttgggaccaaataatagcttagtagcgaaggagacacatccagacagtctgagggcaatttatggcacagatgacctaaggaatgcacttcatgggagtaatgactttgctgctgcggaaagagaaatacgttttatgtttcctgaagtgattgttgagcccattccaattggacaagctgctaaggactatttaaatttacatataatgccaactctgcttgaaggactcacagagctttgtaagcaaaaaccagcagatcctttgatttggctagctgattggctgctgaaaaataatcctaacaaacccaaactttgtcaccatccaattgtagaagaaccttattaaaaaaaaaatcctcgaaagaacaaatcatgaactatcttattataaaaggctgtacttctactgtttgaaaaaattatttctagggtttaagtaactacaagtaaaataaatttatttcttaaaaataagtgttaaaggaataactattctatgaagcagataacattaaggtaaaatataggcttagagtatgattttaacaatgatgtaacactaggtaatggaaaactcatgtaagatgttgctagatgtttttgtttttcttaagtttgagaagtaagacataaagtttagttatacattttcccaagcacatatcctatatctaaatacataattaatgcacagttgagacagtctagtttaaaaggcttaggtccttttgtagtccataagcatggtgatttggtttcatgctcatgtgtcagatatgcttccctcaaaccttgttacagcatcatcacattacctgtttgatgtaaaaaataaaaaatagaaaggtgtaagtatataagtaattttttggtacaatgaaaatggccagaaccaggggatgatcttaaactaatcacttggataactattaggctggtgcaaaagcaattatggtttttgtcattaaaaaacaatggcaaaaaccacaatcacggccggtcttggtggctcacgcctctaatcccagcactttgggaggccgaggcgggtggatcacgaggtcaggagatcgagaccatcctggctaacacggtgaaaccccgtctctactaaatatacaaacaattagccgggcgtagtggcggcgcctgtattcccagctactcgggaggctgaggcaggagaatggcgtgaacccagggggcggagcttgcagtgagccgagatcgcaccactgccctccagcctgggtgacagagcgagactctgtctc

SEQ ID NO: 11993 - protein, 212 aa, Homo sapiens; identical to SEQ ID NO: 1139

SEQ ID NO: 11994 - DNA, 732 bp, Homo sapiens
gctttccatttctgcaaaaaaacttgttggacatttggcaagagctgcactgaatctgtagattgctttgggaagtattgacatcttaacaatatcaaatctccgtatccatgaaaaataatgtcttctcatttatttagatttggctagctgattggctgctgaaaaataatcctaacaaacccaaactttgtcaccatccaattgtagaagaaccttattaaaaaaaaaatcctcgaaagaacaaatcatgaactatcttattataaaaggctgtacttctactgtttgaaaaaattatttctagggtttaagtaactacaagtaaaataaatttatttcttaaaaataagtgttaaaggaataactattctatgaagcagataacattaaggtaaaatataggcttagagtatgattttaacaatgatgtaacactaggtaatggaaaactcatgtaagatgttgctagatgtttttgtttttcttaagtttgagaagtaagacataaagtttagttatacattttcccaagcacatatcctatatctaaatacataattaatgcacagttgagacagtctagtttaaaaggcttaggtccttttgtagtccataagcatggtgatttggtttcatgctcatgtgtcagatatgcttccctcaaaccttgttacagcatcatcacattacctgtttgatgtaaaaaataaaaaatagaaaggtgtaagt

SEQ ID NO: 11995 - protein, 32 aa, Homo sapiens
MVIWFHAHVSDMLPSNLVTASSHYLFDVKNKK

SEQ ID NO: 11996 - DNA, 876 bp, Homo sapiens
gcatgcatataaagtaaggaatagacgttagattggatggacgtcatctctaacttgtttttagtctgagggcaatttatggcacagatgacctaaggaatgcacttcatgggagtaatgactttgctgctgcggaaagagaaatacgttttatgtttcctgaagtgattgttgagcccattccaattggacaagctgctaaggactatttaaatttacatataatgccaactctgcttgaaggactcacagagctttgtaagcaaaaaccagcagatcctttgatttggctagctgattggctgctgaaaaataatcctaacaaacccaaactttgtcaccatccaattgtagaagaaccttattaaaaaaaaaatcctcgaaagaacaaatcatgaactatcttattataaaaggctgtacttctactgtttgaaaaaattatttctagggtttaagtaactacaagtaaaataaatttatttcttaaaaataagtgttaaaggaataactattctatgaagcagataacattaaggtaaaatataggcttagagtatgattttaacaatgatgtaacactaggtaatggaaaactcatgtaagatgttgctagatgtttttgtttttcttaagtttgagaagtaagacataaagtttagttatacattttcccaagcacatatcctatatctaaatacataattaatgcacagttgagacagtctagtttaaaaggcttaggtccttttgtagtccataagcatggtgatttggtttcatgctcatgtgtcagatatgcttccctcaaaccttgttacagcatcatcacattacctgtttgatgtaaaaaataaaaaatagaaaggtgtaagt

SEQ ID NO: 11997 - protein, 71 aa, Homo sapiens; identical to SEQ ID NO: 11991

SEQ ID NO: 11998 - DNA, 1225 bp, Homo sapiens
gcagccaccgtccccacgctggggcttcaggtctcctagcaacaagttgtaccatatgaggacggccgctgagccataatggagatatcaatgcctccacctcagatatatgtagaaaaaactctggccattatcaaaccagatattgttgacaaagaggaggagatacaagatattattcttagatccggattcaccattgttcagagaagaaaactacgcctcagccctgagcaatgtagtaacttttatgtggaaaagtatggaaaaatgtttttccccaacttaacagcttacatgagttctggaccacttgtcgccatgatattagctagacataaagccatctcttattggttagaacttttgggaccaaataatagcttagtagcgaaggagacacatccagacagtctgagggcaatttatggcacagatgacctaaggaatgcacttcatgggagtaatgactttgctgctgcggaaagagaaatacgttttatgtttcctgaagtgattgttgagcccattccaattggacaagctgctaaggactatttaaatttacatataatgccaactctgcttgaaggactcacagagctttgtaagcaaaaaccagcagatcctttgatttggctagctgattggctgctgaaaaataatcctaacaaacccaaactttgtcaccatccaattgtagaagaaccttattaaaaaaaaaatcctcgaaagaacaaatcatgaactatcttattataaaaggctgtacttctactgtttgaaaaaattatttctagggtttaagtaactacaagtaaaataaatttatttcttaaaaataagtgttaaaggaataactattctatgaagcagataacattaaggtaaaatataggcttagagtatgattttaacaatgatgtaacactaggtaatggaaaactcatgtaagatgttgctagatgtttttgtttttcttaagtttgagaagtaagacataaagtttagttatacattttcccaagcacatatcctatatctaaatacataattaatgcacagttgagacagtctagtttaaaaggcttaggtccttttgtagtccataagcatggtgatttggtttcatgctcatgtgtcagatatgcttccctcaaaccttgttacagcatcatcacattacctgtttgatgtaaaaaataaaaaatagaaaggtgtaagt

SEQ ID NO: 11999 - protein, 212 aa, Homo sapiens; identical to SEQ ID NO: 1139

SEQ ID NO: 12000 - DNA, 501 bp, Homo sapiens
tcttaagtggaatgcatgcatataaagtaaggaatagacgttagattggatggacgtcatctctaacttgtttttagtctgagggcaatttatggcacagatgacctaaggaatgcacttcatgggagtaatgactttgctgctgcggaaagagaaatacgttttatgtttcctgaagtgattgttgagcccattccaattggacaagctgctaaggactatttaaatttacatataatgccaactctgcttgaaggactcacagagctttgtaagcaaaaaccagcagatcctttgatttggctagctgattggctgctgaaaaataatcctaacaaacccaaactttgtcaccatccaattgtagaagaaccttattaaaaaaaaaatcctcgaaagaacaaatcatgaactatcttattataaaaggctgtacttctactgtttgaaaaaattatttctagggtttaagtaactacaagtaaaataaatttatttctt

SEQ ID NO: 12001 - protein, 71 aa, Homo sapiens; identical to SEQ ID NO: 11991

SEQ ID NO: 12002 - DNA, 809 bp, Homo sapiens
aggtctcctagcaacaagttgtaccatatgaggacggccgctgagccataatggagatatcaatgcctccacctcagatatatgtagaaaaaactctggccattatcaaaccagatattgttgacaaagaggaggagatacaagatattattcttagatccggattcaccattgttcagagaagaaaactacgcctcagccctgagcaatgtagtaacttttatgtggaaaagtatggaaaaatgtttttccccaacttaacagcttacatgagttctggaccacttgtcgccatgatattagctagacataaagccatctcttattggttagaacttttgggaccaaataatagcttagtagcgaaggagacacatccagacagtctgagggcaatttatggcacagatgacctaaggaatgcacttcatgggagtaatgactttgctgctgcggaaagagaaatacgttttatgtttcctgaagtgattgttgagcccattccaattggacaagctgctaaggactatttaaatttacatataatgccaactctgcttgaaggactcacagagctttgtaagcaaaaaccagcagatcctttgatttggctagctgattggctgctgaaaaataatcctaacaaacccaaactttgtcaccatccaattgtagaagaaccttattaaaaaaaaaatcctcgaaagaacaaatcatgaactatcttattataaaaggctgtacttctactgtttgaaaaaattatttctagggtttaagtaactacaagtaaaataaatttatttctt

SEQ ID NO: 12003 - protein, 212 aa, Homo sapiens; identical to SEQ ID NO: 1139

SEQ ID NO: 12004 - DNA, 553 bp, Homo sapiens
cacctactgatgggactaaacagggctctgcgcatgacaggtagtaagagcacaaggaattctataggacagatttccaagagcagaactgctggatcaaatggcgttctgaaatcaagattccagaggctacaggtatctgcatacagtacctgaatctgctccaggacttcttgccgcatctccacagccatatggtatacatgatgatcagagtcattgtacattacagcattttggaacatcagcatcaggtctcgcaggaattgggccatggtgcgaatccgacccttagagagatttctcttcaggctagttaagtccatgggtctgcaggtggccaagaaaaaacaaagaaaatcaaaccttcatgtggaacatatgataacctaacacgttctcttgaagaactaaccagttcttaatgaaaacagtagcaaagataacaaccctcatcagataataaaatagcaacagcagttaatatttgcctgtttacaatgggccaaacactgtatttctatactaactcacttaatcctctcaataaacc

SEQ ID NO: 12005 - protein, 48 aa, Homo sapiens
MGLNRALRMTGSKSTRNSIGQISKSRTAGSNGVLKSRFQRLQVSAYST

SEQ ID NO: 12006 - DNA, 507 bp, Homo sapiens
gcagccaccgtccccacgctggggcttcaggtctcctagcaacaagttgtaccatatgaggacggccgctgagccataatggagatatcaatgcctccacctcagatatatgtagaaaaaactctggccattatcaaaccagatattgttgacaaagaggaggagatacaagatattattcttagatccggattcaccattgttcaggtaacttctgggtatgatgattcatgcttttttcctctctgcccttaaaaaaaaaatgcttatgtaaatgtgcctacccatttaaacccttagtgttcagcattaaatttaagtttattcttctaagtataaaagttatatgtgatagtttttaaaaggatgtaaaatgagaaataaaatggacttttccttcacctgtcctcttttaccccaagtcccaggctccagagagaggcaaccacttaacactttctgttcttccaggagttttctatgcatttataaacattttccccccat

SEQ ID NO: 12007 - protein, 58 aa, Homo sapiens [sequence omitted]

SEQ ID NO: 12008 - DNA, 4071 bp, Homo sapiens
gggtttcggcccttccagaccgtctctcctcagggttggagacttcggggccaagatggcgacgggaacgggcaaacacaagctgctaagcactggccccacagagccatggtccatccgagagaagctatgtttagcatcttctgtcatgagaagtggcgatcaaaattgggtatcagttagcagagcaatcaagccctttgcagaacctggccgccctccagactggttctctcaaaaacattgtgcttcccagtactcggagcttttagagaccactgagacaccaaaacggaaacgaggtgaaaagggagaagtggtggaaactgttgaagatgttattgttcggaaattgactgctgagcgagttgaagaactaaagaaagtgataaaggaaacccaggagagatatagacggctaaagagagatgcagaactaattcaagctggacacatggacagcagactggatgagctttgcaatgacattgcaacgaaaaagaaattggaagaagaggaggctgaagtaaagaggaaggctacagatgctgcataccaggctcgtcaagcagtaaaaacacccccccggaggttacccactgtgatggttcgctctcctatagattctgcctccccaggaggtgattatccacttggggacttgactccaaccactatggaagaggctacctctggggtcaatgagagtgaaatggctgtggcttctggccacctgaacagtacaggtgtcctcctggaggtaggcggggtccttcccatgatacatggtggggagatacagcaaacacccaatactgttgcagcctcccctgctgcatcaggtgctcccactctttcccggcttttagaagctggtcctacacagttcaccacacctcttgcttccttcactactgttgccagtgagcctccagttaaacttgtgccaccccctgtagagtctgtgtcccaagctaccattgtcatgatgcctgcgctgccagcaccatcctctgctccggctgtctccactactgaaagtgtagctccagtgagtcaacccgacaactgtgttcccatggaggctgtgggggatccacatactgtgactgtttccatggacagcagtgaaatatccatgatcatcaattctatcaaagaagagtgttttcgatcaggggtagcagaggctcctgttggatcaaaggctcccagcatagatgggaaggaagaattagatctggctgagaagatggatattgctgtgtcttacacaggtgaagagctggattttgagactgttggagacatcattgccatcattgaggacaaggtagatgatcatcctgaagtgctggatgtggcagcagtggaagcagcactgtcattttgtgaagaaaatgatgatcctcagtccctgcctggcccctgggagcatcctatccagcaggagcgggacaagccagtacctctccctgcaccagaaatgacggtcaagcaagagagactggactttgaggaaacggaaaacaagggaatacatgaactggtggacatcagggagcccagtgcagagatcaaggtggaacctgcagaaccagagccagtcatttcaggagccgaaatagtagctggagttgttccagccacaagtatggagccaccagaactcaggagtcaggacttagatgaggaactgggaagtactgcagctggagagattgttgaagcagatgttgccattgggaaaggcgatgagactccacttacaaatgtgaagacagaggcatcccctgaaagcatgttgtctccatcacatggctcaaatcccattgaagatcctttagaggcagagactcagcacaagtttgaaatgtcagactcattgaaagaagaatcagggactatttttggaagccagataaaggatgccccaggtgaggatgaggaggaagatggtgtcagtgaagcggccagcctagaggagcctaaggaagaggatcaaggagaaggctacttgtcagaaatggataatgaacctcctgtgagcgagagtgatgatggcttcagcatacacaatgctacactgcagtcacacacactggcagactccatccccagcagccctgcttcttcacagttctctgtctgtagtgaggatcaggaagctattcaggcacagaaaatttggaagaaagccatcatgcttgtatggagagctgcagctaatcataggtatgccaatgtcttcctgcagcctgttacagatgacatagcacctggctaccacagcattgtgcagaggcctatggatttgtcaactattaagaaaaacatagaaaatggactgatccgaagcacagctgaatttcagcgtgacattatgctgatgtttcagaatgctgtaatgtacaatagctcagaccatgatgtctatcacatggcagtggagatgcagcgagatgtcttggaacagatccagcaattcttggccacgcagttgattatgcaaacatccgagtctgggatcagtgctaaaagtcttcgagggagagattctacccgcaaacaggatgcttcagagaaggacagtgtcccaatgggctctcctgccttccttctctctctctttatgggacacgagtgggtttggctggattctgaacaagatcatcccaatgactctgagttgagcaatgactgcaggtccctcttcagctcatgggactccagtctggatcttgatgtgggcaactggagggaaactgaggatccagaggctgaggaactagaggaaagcagcccggagagagaacctagtgaactgcttgttggggatggaggcagtgaggaatctcaggaagcggcaaggaaagccagccaccagaacctcctccactttctctctgaggtagcttatttaatggagcccttgtgcatcagcagcaacgaatcaagtgaaggctgctgccctccatctggtaccagacaagaaggaagggaaattaaagctagcgaaggagaaagggagctctgcagagagactgaagagctttcagctaaaggagaccccttagtagctgaaaagccactgggagaaaatggaaagccagaggtggcttcagctccctcagttatttgtacagttcagggactactcacagagagtgaagagggggaggctcagcaagaatccaaaggggaggaccagggtgaagtatatgtgtcagagatggaagaccagcccccttcaggcgagtgtgatgatgcctttaacattaaggagactcccttggtggatacacttttcagccatgctacctcctcaaagctgactgatctaagccaggatgaccctgttcaggatcatttgctatttaagaagactctcctgccagtctggaagatgattgccagtcacaggttcagcagtccatttctgaagcctgtgtcagaaaggcaggccccagggtacaaggatgtggtgaaaagacccatggacttaactagcctgaagagaaatctctctaagggtcggattcgcaccatggcccaattcctgcgagacctgatgctgatgttccaaaatgctgtaatgtacaatgactctgatcatcatgtataccatatggctgtggagatgcggcaagaagtcctggagcagattcaggtactgaatatctggttagacaaaagaaaaggctcaagtagtctggaaggagaaccagctaacccagtggatgatggaaaacctgttttctaacctggagctgctatcctgactttttctagagtttgaatctctcccggaactctgacctagagaggatcctggtacttctttgccatgtcctcattttcttttccaacaagaataataccttaactcacaaccaacgagtcaaagatgcatgtggacataatataaagaaaaaaaggggaagctgaggtttggatttatgccataaatgttgcccacatctttgttccatcggcttgatttaaagacaattccattagatcttttctaagccttttactctataaataaatgtatttacacaataggaa

SEQ ID NO: 12009 - protein, 1235 aa, Homo sapiens
MATGTGKHKLLSTGPTEPWSIREKLCLASSVMRSGDQNWVSVSRAIKPFAEPGRPPDWFSQKHCASQYSELLETTETPKRKRGEKGEVVETVEDVIVRKLTAERVEELKKVIKETQERYRRLKRDAELIQAGHMDSRLDELCNDIATKKKLEEEEAEVKRKATDAAYQARQAVKTPPRRLPTVMVRSPIDSASPGGDYPLGDLTPTTMEEATSGVNESEMAVASGHLNSTGVLLEVGGVLPMIHGGEIQQTPNTVAASPAASGAPTLSRLLEAGPTQFTTPLASFTTVASEPPVKLVPPPVESVSQATIVMMPALPAPSSAPAVSTTESVAPVSQPDNCVPMEAVGDPHTVTVSMDSSEISMIINSIKEECFRSGVAEAPVGSKAPSIDGKEELDLAEKMDIAVSYTGEELDFETVGDIIAIIEDKVDDHPEVLDVAAVEAALSFCEENDDPQSLPGPWEHPIQQERDKPVPLPAPEMTVKQERLDFEETENKGIHELVDIREPSAEIKVEPAEPEPVISGAEIVAGVVPATSMEPPELRSQDLDEELGSTAAGEIVEADVAIGKGDETPLTNVKTEASPESMLSPSHGSNPIEDPLEAETQHKFEMSDSLKEESGTIFGSQIKDAPGEDEEEDGVSEAASLEEPKEEDQGEGYLSEMDNEPPVSESDDGFSIHNATLQSHTLADSIPSSPASSQFSVCSEDQEAIQAQKIWKKAIMLVWRAAANHRYANVFLQPVTDDIAPGYHSIVQRPMDLSTIKKNIENGLIRSTAEFQRDIMLMFQNAVMYNSSDHDVYHMAVEMQRDVLEQIQQFLATQLIMQTSESGISAKSLRGRDSTRKQDASEKDSVPMGSPAFLLSLFMGHEWVWLDSEQDHPNDSELSNDCRSLFSSWDSSLDLDVGNWRETEDPEAEELEESSPEREPSELLVGDGGSEESQEAARKASHQNLLHFLSEVAYLMEPLCISSNESSEGCCPPSGTRQEGREIKASEGERELCRETEELSAKGDPLVAEKPLGENGKPEVASAPSVICTVQGLLTESEEGEAQQESKGEDQGEVYVSEMEDQPPSGECDDAFNIKETPLVDTLFSHATSSKLTDLSQDDPVQDHLLFKKTLLPVWKMIASHRFSSPFLKPVSERQAPGYKDVVKRPMDLTSLKRNLSKGRIRTMAQFLRDLMLMFQNAVMYNDSDHHVYHMAVEMRQEVLEQIQVLNIWLDKRKGSSSLEGEPANPVDDGKPVF

SEQ ID NO: 12010 - DNA, 3237 bp, Homo sapiens
gggtttcggcccttccagaccgtctctcctcagggttggagacttcggggccaagatggcgacgggaacgggcaaacacaagctgctaagcactggccccacagagccatggtccatccgagagaagctatgtttagcatcttctgtcatgagaagtggcgatcaaaattgggtatcagttagcagagcaatcaagccctttgcagaacctggccgccctccagactggttctctcaaaaacattgtgcttcccagtactcggagcttttagagaccactgagacaccaaaacggaaacgaggtgaaaagggagaagtggtggaaactgttgaagatgttattgttcggaaattgactgctgagcgagttgaagaactaaagaaagtgataaaggaaacccaggagagatatagacggctaaagagagatgcagaactaattcaagctggacacatggacagcagactggatgagctttgcaatgacattgcaacgaaaaagaaattggaagaagaggaggctgaagtaaagaggaaggctacagatgctgcataccaggctcgtcaagcagtaaaaacacccccccggaggttacccactgtgatggttcgctctcctatagattctgcctccccaggaggtgattatccacttggggacttgactccaaccactatggaagaggctacctctggggtaacccccgggactttgccgagtaccccagtcacctcgtttcctgggattcctgacacccttcctccaggctctgcacccttagaagcccccatgaccccagtaacagatgattcaccccagaaaaagatgcttggacagaaagcaactccacccccctcccctctgctgtcagagctcttgaagaagggcagcctcctgcctactagccccagactggtcaatgagagtgaaatggctgtggcttctggccacctgaacagtacaggtgtcctcctggaggtaggcggggtccttcccatgatacatggtggggagatacagcaaacacccaatactgttgcagcctcccctgctgcatcaggtgctcccactctttcccggcttttagaagctggtcctacacagttcaccacacctcttgcttccttcactactgttgccagtgagcctccagttaaacttgtgccaccccctgtagagtctgtgtcccaagctaccattgtcatgatgcctgcgctgccagcaccatcctctgctccggctgtctccactactgaaagtgtagctccagtgagtcaacccgacaactgtgttcccatggaggctgtgggggatccacatactgtgactgtttccatggacagcagtgaaatatccatgatcatcaattctatcaaagaagagtgttttcgatcaggggtagcagaggctcctgttggatcaaaggctcccagcatagatgggaaggaagaattagatctggctgagaagatggatattgctgtgtcttacacaggtgaagagctggattttgagactgttggagacatcattgccatcattgaggacaaggtagatgatcatcctgaagtgctggatgtggcagcagtggaagcagcactgtcattttgtgaagaaaatgatgatcctcagtccctgcctggcccctgggagcatcctatccagcaggagcgggacaagccagtacctctccctgcaccagaaatgacggtcaagcaagagagactggactttgaggaaacggaaaacaagggaatacatgaactggtggacatcagggagcccagtgcagagatcaaggtggaacctgcagaaccagagccagtcatttcaggagccgaaatagtagctggagttgttccagccacaagtatggagccaccagaactcaggagtcaggacttagatgaggaactgggaagtactgcagctggagagattgttgaagcagatgttgccattgggaaaggcgatgagactccacttacaaatgtgaagacagaggcatcccctgaaagcatgttgtctccatcacatggctcaaatcccattgaagatcctttagaggcagagactcagcacaagtttgaaatgtcagactcattgaaagaagaatcagggactatttttggaagccagataaaggatgccccaggtgaggatgaggaggaagatggtgtcagtgaagcggccagcctagaggagcctaaggaagaggatcaaggagaaggctacttgtcagaaatggataatgaacctcctgtgagcgagagtgatgatggcttcagcatacacaatgctacactgcagtcacacacactggcagactccatccccagcagccctgcttcttcacagttctctgtctgtagtgaggatcaggaagctattcaggcacagaaaatttggaagaaagccatcatgcttgtatggagagctgcagctaatcataggtatgccaatgtcttcctgcagcctgttacagatgacatagcacctggctaccacagcattgtgcagaggcctatggatttgtcaactattaagaaaaacatagaaaatggactgatccgaagcacagctgaatttcagcgtgacattatgctgatgtttcagaatgctgtaatgtacaatagctcagaccatgatgtctatcacatggcagtggagatgcagcgagatgtcttggaacagatccagcaattcttggccacgcagttgattatgcaaacatccgagtctgggatcagtgctaaaagtcttcgagggagagattctacccgcaaacaggatgcttcagagaaggacagtgtcccaatgggctctcctgccttccttctctctctctttgatggaggaaccaggggacgccgctgtgccattgaagcagatatgaagatgaaaaagtgaagcctcagagttaccctctttgagccgaacctaaaataaaagtaaacaagatagagcttgggcttgcgggcccagttccagaggtggaagttacagaagaggaggtacctgggccacacgacatgagctggaaaatctctcttagagagttggagtagcacaattgcctgttttagggcagaaaccatgggctatgttaatgtcctaatgtgtagctagcagatcgtagctagtttgtattgtcttgtcaattgtacagactttttaaaaaaaacaaccaccagtgaaatgtgtgtgtatacaataaactgaaaaaaaaaactagc

SEQ ID NO: 12011 - protein, 951 aa, Homo sapiens; identical to SEQ ID NO: 1141

SEQ ID NO: 12012 - DNA, 3074 bp, Homo sapiens
gggtttcggcccttccagaccgtctctcctcagggttggagacttcggggccaagatggcgacgggaacgggcaaacacaagctgctaagcactggccccacagagccatggtccatccgagagaagctatgtttagcatcttctgtcatgagaagtggcgatcaaaattgggtatcagttagcagagcaatcaagccctttgcagaacctggccgccctccagactggttctctcaaaaacattgtgcttcccagtactcggagcttttagagaccactgagacaccaaaacggaaacgaggtgaaaagggagaagtggtggaaactgttgaagatgttattgttcggaaattgactgctgagcgagttgaagaactaaagaaagtgataaaggaaacccaggagagatatagacggctaaagagagatgcagaactaattcaagctggacacatggacagcagactggatgagctttgcaatgacattgcaacgaaaaagaaattggaagaagaggaggctgaagtaaagaggaaggctacagatgctgcataccaggctcgtcaagcagtaaaaacacccccccggaggttacccactgtgatggttcgctctcctatagattctgcctccccaggaggtgattatccacttggggacttgactccaaccactatggaagaggctacctctggggtaacccccgggactttgccgagtaccccagtcacctcgtttcctgggattcctgacacccttcctccaggctctgcacccttagaagcccccatgaccccagtaacagatgattcaccccagaaaaagatgcttggacagaaagcaactccacccccctcccctctgctgtcagagctcttgaagaagggcagcctcctgcctactagccccagactggtcaatgagagtgaaatggctgtggcttctggccacctgaacagtacaggtgtcctcctggaggtaggcggggtccttcccatgatacatggtggggagatacagcaaacacccaatactgttgcagcctcccctgctgcatcagagtctgtgtcccaagctaccattgtcatgatgcctgcgctgccagcaccatcctctgctccggctgtctccactactgaaagtgtagctccagtgagtcaacccgacaactgtgttcccatggaggctgtgggggatccacatactgtgactgtttccatggacagcagtgaaatatccatgatcatcaattctatcaaagaagagtgttttcgatcaggggtagcagaggctcctgttggatcaaaggctcccagcatagatgggaaggaagaattagatctggctgagaagatggatattgctgtgtcttacacaggtgaagagctggattttgagactgttggagacatcattgccatcattgaggacaaggtagatgatcatcctgaagtgctggatgtggcagcagtggaagcagcactgtcattttgtgaagaaaatgatgatcctcagtccctgcctggcccctgggagcatcctatccagcaggagcgggacaagccagtacctctccctgcaccagaaatgacggtcaagcaagagagactggactttgaggaaacggaaaacaagggaatacatgaactggtggacatcagggagcccagtgcagagatcaaggtggaacctgcagaaccagagccagtcatttcaggagccgaaatagtagctggagttgttccagccacaagtatggagccaccagaactcaggagtcaggacttagatgaggaactgggaagtactgcagctggagagattgttgaagcagatgttgccattgggaaaggcgatgagactccacttacaaatgtgaagacagaggcatcccctgaaagcatgttgtctccatcacatggctcaaatcccattgaagatcctttagaggcagagactcagcacaagtttgaaatgtcagactcattgaaagaagaatcagggactatttttggaagccagataaaggatgccccaggtgaggatgaggaggaagatggtgtcagtgaagcggccagcctagaggagcctaaggaagaggatcaaggagaaggctacttgtcagaaatggataatgaacctcctgtgagcgagagtgatgatggcttcagcatacacaatgctacactgcagtcacacacactggcagactccatccccagcagccctgcttcttcacagttctctgtctgtagtgaggatcaggaagctattcaggcacagaaaatttggaagaaagccatcatgcttgtatggagagctgcagctaatcataggtatgccaatgtcttcctgcagcctgttacagatgacatagcacctggctaccacagcattgtgcagaggcctatggatttgtcaactattaagaaaaacatagaaaatggactgatccgaagcacagctgaatttcagcgtgacattatgctgatgtttcagaatgctgtaatgtacaatagctcagaccatgatgtctatcacatggcagtggagatgcagcgagatgtcttggaacagatccagcaattcttggccacgcagttgattatgcaaacatccgagtctgggatcagtgctaaaagtcttcgagggagagattctacccgcaaacaggatgcttcagagaaggatggaggaaccaggggacgccgctgtgccattgaagcagatatgaagatgaaaaagtgaagcctcagagttaccctctttgagccgaacctaaaataaaagtaaacaagatagagcttgggcttgcgggcccagttccagaggtggaagttacagaagaggaggtacctgggccacacgacatgagctggaaaatctctcttagagagttggagtagcacaattgcctgttttagggcagaaaccatgggctatgttaatgtcctaatgtgtagctagcagatcgtagctagtttgtattgtcttgtcaattgtacagactttttaaaaaaaacaaccaccagtgaaatgtgtgtgtatacaataaactgaaaaaaaaaactag

SEQ ID NO: 12013 - protein, 897 aa, Homo sapiens [sequence omitted]

SEQ ID NO: 12014 - DNA, 438 bp, Homo sapiens
ggaggaaagtaataaaagtctttaggctagctctcctaagcttatctgtaattccagcagccactattgatgcagtggtcacttttttttttcttttttttgtttgagacagagtttcactcttgttgcccaggctggagtgcaatggtgcaatctcagctcacggcaacctccgcctcctgggttcaagcgattctctcctgcattgaataagttcatcatctatatccttactctaaccttacttaagatcttcctccaagttaggaatgaaccaaagcactagaacacacaacatatataaaaaatgggtggtaaggctaggtgcagtggctcacgcctgtaatgctagcactttgggaggccgaggcaggtgggtcacttgaggtcaagagtttgagaccagcctgggcaacatagcgaaaccctgcctctact

SEQ ID NO: 12015 - protein, 47 aa, Homo sapiens
MQWSLFFFFFLFETEFHSCCPGWSAMVQSQLTATSASWVQAILSCIE

SEQ ID NO: 12016 - DNA, 485 bp, Homo sapiens
ccttccagaccgtctctcctcagggttggagacttcggggccaagatggcgacgggaacgggcaaacacaagctgctaagcactggccccacagagccatggtccatccgagagaagctatgtttagcatcttctgtcatgagaagtggcgatcaaaattgggtatcagttagcagagcaatcaagccctttgcagaacctggccgccctccagactggttctctcaaaaacattgtgcttcccagtactcggagcttttagagaccactgagacaccaaaacggaaacgaggtgaaaagggagaagtggtggaaactgttgaagatgttattgttcggaaattgactgctgagcgagttgaagaactaaagaaagtgataaaggaaacccaggagagatatagacggctaaagagagatgcagaactaattcaagctggacacatggacagcagactggatgagctttgcaatgacattgcaac

SEQ ID NO: 12017 - protein, 145 aa, Homo sapiens
MATGTGKHKLLSTGPTEPWSIREKLCLASSVMRSGDQNWVSVSRAIKPFAEPGRPPDWFSQKHCASQYSELLETTETPKRKRGEKGEVVETVEDVIVRKLTAERVEELKKVIKETQERYRRLKRDAELIQAGHMDSRLDELCNDI

SEQ ID NO: 12018 - DNA, 636 bp, Homo sapiens
agaattccagggtttcggcccttccagaccgtctctcctcagggttggagacttcggggccaagatggcgacgggaacgggcaaacacaagctgctaagcactggccccacagagccatggtccatccgagagaagctatgtttagcatcttctgtcatgagaagtggcgatcaaaattgggggtggtcttactctgtcacccaggctggagtgcagtggcgcgatttgggctcactgcagcctcttgacttcctgggctcaagggatcctcctacctcagctgcccaagtagctgggaccacaggccgcagggtatcagttagcagagcaatcaagccctttgcagaacctggccgccctccagactggttctctcaaaaacattgtgcttcccagtactcggagcttttagagaccactgagacaccaaaacggaaacgaggtgaaaagggagaagtggtggaaactgttgaagatgttattgttcggaaattgactgctgagcgagttgaagaactaaagaaagtgataaaggaaacccaggagagatatagacggctaaagagagatgcagaactaattcaagctggacacatggacagcagactggatgagctttgcaatgacattgcaac

SEQ ID NO: 12019 - protein, 189 aa, Homo sapiens
MATGTGKHKLLSTGPTEPWSIREKLCLASSVMRSGDQNWGWSYSVTQAGVQWRDLGSLQPLDFLGSRDPPTSAAQVAGTTGRRVSVSRAIKPFAEPGRPPDWFSQKHCASQYSELLETTETPKRKRGEKGEVVETVEDVIVRKLTAERVEELKKVIKETQERYRRLKRDAELIQAGHMDSRLDELCNDI

SEQ ID NO: 12020 - DNA, 547 bp, Homo sapiens
agggttggagacttcggggccaagatggcgacgggaacgggcaaacacaagctgctaagcactggccccacagagccatggtccatccgagagaagctatgtttagcatcttctgtcatgagaagtggcgatcaaaattggtaaggtatctaggatgtcagcttttctgggtcttagaaattgttagatactctttcacatcggtagatttctatagttaatcatattaagctgtaagtagactttcttttctttttcttctttttttgagactgagtctccttctgttgcccaggctggagtgcagtggtgcggacacgcccagctaatttttgtattttttagtagagacagagtttcgccatgttggccaggctggtctcgaactcctgacctcaggtgatccccccacctcggcctgccagagtgctgggattacaggtgtgagccactgcgcctggccatgcctggctaattttgtatttttagtagagacggggtttcaccatgttggccacgatggtctcaatctcctgacctcatgatc

SEQ ID NO: 12021 - protein, 39 aa, Homo sapiens
MATGTGKHKLLSTGPTEPWSIREKLCLASSVMRSGDQNW

SEQ ID NO: 12022 - DNA, 3157 bp, Homo sapiens
cgccccctttccttacgcggattggtagctgcaggcttccctatctgattggccgaacgaacgcagcgcgtaatttaaaatattgtatctgtaacaaagctgcacctcgtgggcggagttgtgctctgcggctgcgaaagtccagcttcggcgactaggtgtgagtaagccagtatcccaggaggagcaagtggcacgtcttcggacctaggctgcccctgccgtcatgtcgcaagggatcctttctccgccagcgggcttgctgtccgatgacgatgtcgtagtttctcccatgtttgagtccacagctgcagatttggggtctgtggtacgcaagaacctgctatcagactgctctgtcgtctctacctccctagaggacaagcagcaggttccatctgaggacagtatggagaaggtgaaagtatacttgagggttaggcccttgttaccttcagagttggaacgacaggaagatcagggttgtgtccgtattgagaatgtggagacccttgttctacaagcacccaaggactcttttgccctgaagagcaatgaacggggaattggccaagccacacacaggttcaccttttcccagatctttgggccagaagtgggacaggcatccttcttcaacctaactgtgaaggagatggtaaaggatgtactcaaagggcagaactggctcatctatacatatggagtcactaactcagggaaaacccacacgattcaaggtaccatcaaggatggagggattctcccccggtccctggcgctgatcttcaatagcctccaaggccaacttcatccaacacctgatctgaagcccttgctctccaatgaggtaatctggctagacagcaagcagatccgacaggaggaaatgaagaagctgtccctgctaaatggaggcctccaagaggaggagctgtccacttccttgaagaggagtgtctacatcgaaagtcggataggtaccagcaccagcttcgacagtggcattgctgggctctcttctatcagtcagtgtaccagcagtagccagctggatgaaacaagtcatcgatgggcacagccagacactgccccactacctgtcccggcaaacattcgcttctccatctggatctcattctttgagatctacaacgaactgctttatgacctattagaaccgcctagccaacagcgcaagaggcagactttgcggctatgcgaggatcaaaatggcaatccctatgtgaaagatctcaactggattcatgtgcaagatgctgaggaggcctggaagctcctaaaagtgggtcgtaagaaccagagctttgccagcacccacctcaaccagaactccagccgcagtcacagcatcttctcaatcaggatcctacaccttcagggggaaggagatatagtccccaagatcagcgagctgtcactctgtgatctggctggctcagagcgctgcaaagatcagaagagtggtgaacggttgaaggaagcaggaaacattaacacctctctacacaccctgggccgctgtattgctgcccttcgtcaaaaccagcagaaccggtcaaagcagaacctggttcccttccgtgacagcaagttgactcgagtgttccaaggtttcttcacaggccgaggccgttcctgcatgattgtcaatgtgaatccctgtgcatctacctatgatgaaactcttcatgtggccaagttctcagccattgctagccagcttgtgcatgccccacctatgcaactgggattcccatccctgcactcgttcatcaaggaacatagtcttcaggtatcccccagcttagagaaaggggctaaggcagacacaggccttgatgatgatattgaaaatgaagctgacatctccatgtatggcaaagaggagctcctacaagttgtggaagccatgaagacactgcttttgaaggaacgacaggaaaagctacagctggagatgcatctccgagatgaaatttgcaatgagatggtagaacagatgcaacagcgggaacagtggtgcagtgaacatttggacacccaaaaggaactattggaggaaatgtatgaagaaaaactaaatatcctcaaggagtcactgacaagtttttaccaagaagagattcaggagcgggatgaaaagattgaagagctagaagctctcttgcaggaagccagacaacagtcagtggcccatcagcaatcagggtctgaattggccctacggcggtcacaaaggttggcagcttctgcctccacccagcagcttcaggaggttaaagctaaattacagcagtgcaaagcagagctaaactctaccactgaagagttgcataagtatcagaaaatgttagaaccaccaccctcagccaagcccttcaccattgatgtggacaagaagttagaagagggccagaagaatataaggctgttgcggacagagcttcagaaacttggtgagtctctccaatcagcagagagagcttgttgccacagcactggggcaggaaaacttcgtcaagccttgaccacttgtgatgacatcttaatcaaacaggaccagactctggctgaactgcagaacaacatggtgctagtgaaactggaccttcggaagaaggcagcatgtattgctgagcagtatcatactgtgttgaaactccaaggccaggtttctgccaaaaagcgccttggtaccaaccaggaaaatcagcaaccaaaccaacaaccaccagggaagaaaccattccttcgaaatttacttccccgaacaccaacctgccaaagctcaacagactgcagcccttatgcccggatcctacgctcacggcgttcccctttactcaaatctgggccttttggcaaaaagtactaaggctgtggggaaagagaagagcagtcatggccctgaggtgggtcagctactctcctgaagaaataggtctcttttatgctttaccatatatcaggaattatatccaggatgcaatactcagacactagcttttttctcacttttgtattataaccacctatgtaatctcatgttgttgtttttttttatttacttatatgatttctatgcacacaaaaacagttatattaaagatattattgttcacattttttattg

SEQ ID NO: 12023 - protein, 890 aa, Homo sapiens; identical to SEQ ID NO: 1147

SEQ ID NO: 12024 - DNA, 3204 bp, Homo sapiens
cgccccctttccttacgcggattggtagctgcaggcttccctatctgattggccgaacgaacgcagcgcgtaatttaaaatattgtatctgtaacaaagctgcacctcgtgggcggagttgtgctctgcggctgcgaaagtccagcttcggcgactaggtgtgagtaagccagtatcccaggaggagcaagtggcacgtcttcggacctaggctgcccctgccgtcatgtcgcaagggatcctttctccgccagcgggcttgctgtccgatgacgatgtcgtagtttctcccatgtttgagtccacagctgcagatttggggtctgtggtacgcaagaacctgctatcagactgctctgtcgtctctacctccctagaggacaagcagcaggttccatctgaggacagtatggagaaggtgaaagtatacttgagggttaggcccttgttaccttcagagttggaacgacaggaagatcagggttgtgtccgtattgagaatgtggagacccttgttctacaagcacccaaggactcttttgccctgaagagcaatgaacggggaattggccaagccacacacaggttcaccttttcccagatctttgggccagaagtgggacaggcatccttcttcaacctaactgtgaaggagatggtaaaggatgtactcaaagggcagaactggctcatctatacatatggagtcactaactcagggaaaacccacacgattcaaggtaccatcaaggatggagggattctcccccggtccctggcgctgatcttcaatagcctccaaggccaacttcatccaacacctgatctgaagcccttgctctccaatgaggtaatctggctagacagcaagcagatccgacaggaggaaatgaagaagctgtccctgctaaatggaggcctccaagaggaggagctgtccacttccttgaagaggagtgtctacatcgaaagtcggataggtaccagcaccagcttcgacagtggcattgctgggctctcttctatcagtcagtgtaccagcagtagccagctggatgaaacaagtcatcgatgggcacagccagacactgccccactacctgtcccggcaaacattcgcttctccatctggatctcattctttgagatctacaacgaactgctttatgacctattagaaccgcctagccaacagcgcaagaggcagactttgcggctatgcgaggatcaaaatggcaatccctatgtgaaagatctcaactggattcatgtgcaagatgctgaggaggcctggaagctcctaaaagtgggtcgtaagaaccagagctttgccagcacccacctcaaccagaactccagccgcagtcacagcatcttctcaatcaggatcctacaccttcagggggaaggagatatagtccccaagatcagcgagctgtcactctgtgatctggctggctcagagcgctgcaaagatcagaagagtggtgaacggttgaaggaagcaggaaacattaacacctctctacacaccctgggccgctgtattgctgcccttcgtcaaaaccagcagaaccggtcaaagcagaacctggttcccttccgtgacagcaagttgactcgagtgttccaaggtttcttcacaggccgaggccgttcctgcatgattgtcaatgtgaatccctgtgcatctacctatgatgaaactcttcatgtggccaagttctcagccattgctagccagcttgtgcatgccccacctatgcaactgggattcccatccctgcactcgttcatcaaggaacatagtcttcaggtatcccccagcttagagaaaggggctaaggcagacacaggccttgatgatgatattgaaaatgaagctgacatctccatgtatggcaaagaggagctcctacaagttgtggaagccatgaagacactgcttttgaaggaacgacaggaaaagctacagctggagatgcatctccgagatgaaatttgcaatgagatggtagaacagatgcaacagcgggaacagtggtgcagtgaacatttggacacccaaaaggaactattggaggaaatgtatgaagaaaaactaaatatcctcaaggagtcactgacaagtttttaccaagaagagattcaggagcgggatgaaaagattgaagagctagaagctctcttgcaggaagccagacaacagtcagtggcccatcagcaatcagggtctgaattggccctacggcggtcacaaaggttggcagcttctgcctccacccagcagcttcaggaggttaaagctaaattacagcagtgcaaagcagagctaaactctaccactgaagagttgcataagtatcagaaaatgttagaaccaccaccctcagccaagcccttcaccattgatgtggacaagaagttagaagagggccagaagaatataaggctgttgcggacagagcttcagaaacttggtgagtctctccaatcagcagagagagcttgttgccacagcactggggcaggaaaacttcgtcaagccttgaccacttgtgatgacatcttaatcaaacaggaccagactctggctgaactgcagaacaacatggtgctagtgaaactggaccttcggaagaaggcagcatgtattgctgagcagtatcatactgtgttgaaactccaaggccaggtttctgccaaaaagcgccttggtaccaaccaggaaaatcagcaaccaaaccaacaaccaccagggaagaaaccattccttcgaaatttacttccccgaacaccaacctgccaaagctcaacagactgcagcccttatgcccggatcctacgctcacggcgttcccctttactcaaatctgggccttttggcaaaaagtactaaggctgtggggaaagagaagagcagtcatggccctgaggtgggtcagctactctcctgaagaaataggtctcttttatgctttaccatatatcaggaattatatccaggatgcaatactcagacactagcttttttctcacttttgtattataaccacctatgtaatctcatgttgttgtttttttttatttacttatatgatttctatgcacacaaaaacagttatattaaagatattattgttcacattttttattgaattccaaatgtagcaaaatcattaaaacaaattataaaagggacag

SEQ ID NO: 12025 - protein, 890 aa, Homo sapiens; identical to SEQ ID NO: 1147

SEQ ID NO: 12026 - DNA, 1119 bp, Homo sapiens
taggtgtgagtaagccagtatcccaggaggagcaagtggcacgtcttcgggtgagtgtgcggctgtgctggagcccgggttaccagctcttgcccgcgcggaataggctttaagaaatcggagctgcagccatctgtttttctcttaatgctgcatctctgttctcacggtggtccttggggtgaggttagagaaggagccgagggatcctgacaccacctccacagcaccggcgggcgaggtgccctactttaggcgtagccttctgcttttggagccagatgtctgtggacttctgttcgcgttcagaaatgccgcctcaaacttctctcaattgttcattaagtgaacttctctcattcccttcccctttgccgataattggaggggaaaagaagtaggaagcgggacacggtgtcctggggcaagggacttattacctaaaattcgcggccccttctgtccctaaaggttcttctccctgcccactttttggtctctttttagacctaggctgcccctgccgtcatgtcgcaagggatcctttctccgccagcgggcttgctgtccgatgacgatgtcgtagtttctcccatgtttgagtccacagctgcagatttggggtctgtggtacgcaagaacctgctatcagactgctctgtcgtctctacctccctagaggacaagcagcaggttccatctgaggacagtatggagaaggtgaaagtatacttgagggttaggcccttgttaccttcagagttggaacgacaggaagatcaggtaagtgtctgagaagggaggattcaaggtgaaatgatgcagtacaaaagattcccaggaatgccttctgtgacaactgtattttctcccttctcagggttgtgtccgtattgagaatgtggagacccttgttctacaagcacccaaggactcttttgccctgaagagcaatgaacggggaattggccaagccacacacaggttcaccttttcccaggtatggagggtactggtttgtgaacaaaagaccaacatgtaagggcaactttattccctctttagagggaaagcttctcttcctgactgtgagttccttgtatatgcacacctacaatt

SEQ ID NO: 12027 - protein, 88 aa, Homo sapiens
MSQGILSPPAGLLSDDDVVVSPMFESTAADLGSVVRKNLLSDCSVVSTSLEDKQQVPSEDSMEKVKVYLRVRPLLPSELERQEDQVSV

SEQ ID NO: 12028 - DNA, 3065 bp, Homo sapiens
tggagcccgggttaccagctcttgcccgcgcggaataggctttaagaaatcggagctgcagccatctgtttttctcttaatgctgcatctctgttctcacggtggtccttgggacctaggctgcccctgccgtcatgtcgcaagggatcctttctccgccagcgggcttgctgtccgatgacgatgtcgtagtttctcccatgtttgagtccacagctgcagatttggggtctgtggtacgcaagaacctgctatcagactgctctgtcgtctctacctccctagaggacaagcagcaggttccatctgaggacagtatggagaaggtgaaagtatacttgagggttaggcccttgttaccttcagagttggaacgacaggaagatcagggttgtgtccgtattgagaatgtggagacccttgttctacaagcacccaaggactcttttgccctgaagagcaatgaacggggaattggccaagccacacacaggttcaccttttcccagatctttgggccagaagtgggacaggcatccttcttcaacctaactgtgaaggagatggtaaaggatgtactcaaagggcagaactggctcatctatacatatggagtcactaactcagggaaaacccacacgattcaaggtaccatcaaggatggagggattctcccccggtccctggcgctgatcttcaatagcctccaaggccaacttcatccaacacctgatctgaagcccttgctctccaatgaggtaatctggctagacagcaagcagatccgacaggaggaaatgaagaagctgtccctgctaaatggaggcctccaagaggaggagctgtccacttccttgaagaggagtgtctacatcgaaagtcggataggtaccagcaccagcttcgacagtggcattgctgggctctcttctatcagtcagtgtaccagcagtagccagctggatgaaacaagtcatcgatgggcacagccagacactgccccactacctgtcccggcaaacattcgcttctccatctggatctcattctttgagatctacaacgaactgctttatgacctattagaaccgcctagccaacagcgcaagaggcagactttgcggctatgcgaggatcaaaatggcaatccctatgtgaaagatctcaactggattcatgtgcaagatgctgaggaggcctggaagctcctaaaagtgggtcgtaagaaccagagctttgccagcacccacctcaaccagaactccagccgcagtcacagcatcttctcaatcaggatcctacaccttcagggggaaggagatatagtccccaagatcagcgagctgtcactctgtgatctggctggctcagagcgctgcaaagatcagaagagtggtgaacggttgaaggaagcaggaaacattaacacctctctacacaccctgggccgctgtattgctgcccttcgtcaaaaccagcagaaccggtcaaagcagaacctggttcccttccgtgacagcaagttgactcgagtgttccaaggtttcttcacaggccgaggccgttcctgcatgattgtcaatgtgaatccctgtgcatctacctatgatgaaactcttcatgtggccaagttctcagccattgctagccagcttgtgcatgccccacctatgcaactgggattcccatccctgcactcgttcatcaaggaacatagtcttcaggtatcccccagcttagagaaaggggctaaggcagacacaggccttgatgatgatattgaaaatgaagctgacatctccatgtatggcaaagaggagctcctacaagttgtggaagccatgaagacactgcttttgaaggaacgacaggaaaagctacagctggagatgcatctccgagatgaaatttgcaatgagatggtagaacagatgcaacagcgggaacagtggtgcagtgaacatttggacacccaaaaggaactattggaggaaatgtatgaagaaaaactaaatatcctcaaggagtcactgacaagtttttaccaagaagagattcaggagcgggatgaaaagattgaagagctagaagctctcttgcaggaagccagacaacagtcagtggcccatcagcaatcagggtctgaattggccctacggcggtcacaaaggttggcagcttctgcctccacccagcagcttcaggaggttaaagctaaattacagcagtgcaaagcagagctaaactctaccactgaagagttgcataagtatcagaaaatgttagaaccaccaccctcagccaagcccttcaccattgatgtggacaagaagttagaagagggccagaagaatataaggctgttgcggacagagcttcagaaacttggtgagtctctccaatcagcagagagagcttgttgccacagcactggggcaggaaaacttcgtcaagccttgaccacttgtgatgacatcttaatcaaacaggaccagactctggctgaactgcagaacaacatggtgctagtgaaactggaccttcggaagaaggcagcatgtattgctgagcagtatcatactgtgttgaaactccaaggccaggtttctgccaaaaagcgccttggtaccaaccaggaaaatcagcaaccaaaccaacaaccaccagggaagaaaccattccttcgaaatttacttccccgaacaccaacctgccaaagctcaacagactgcagcccttatgcccggatcctacgctcacggcgttcccctttactcaaatctgggccttttggcaaaaagtactaaggctgtggggaaagagaagagcagtcatggccctgaggtgggtcagctactctcctgaagaaataggtctcttttatgctttaccatatatcaggaattatatccaggatgcaatactcagacactagcttttttctcacttttgtattataaccacctatgtaatctcatgttgttgtttttttttatttacttatatgatttctatgcacacaaaaacagttatattaaagatattattgttcacattttttattg

SEQ ID NO: 12029 - protein, 890 aa, Homo sapiens; identical to SEQ ID NO: 1147

SEQ ID NO: 12030 - DNA, 3682 bp, Homo sapiens
atgattggctggagtggcccgagtcgggaaaatggctgcgagtacctccatggtcccggtggctgtgacggcggcagtggcgcctgtcctgtccataaacagcgatttctcagatttgcgggaaattaaaaagcaactgctgcttattgcgggccttacccgggagcggggcctactacacagtagcaaatggtcggcggagttggctttctctctccctgcattgcctctggccgagctgcaaccgcctccgcctattacagaggaagatgcccaggatatggatgcctataccctggccaaggcctactttgacgttaaagagtatgatcgggcagcacatttcctgcatggctgcaatagcaagaaagcctattttctgtatatgtattccagatatctgtctggagaaaaaaagaaggacgatgaaacagttgatagcttaggccccctggaaaaaggacaagtgaaaaatgaggcgcttagagaattgagagtggagctcagcaaaaaacaccaagctcgagaacttgatggatttggactttatctgtatggtgtggtgcttcgaaaactggacttggttaaagaggccattgatgtgtttgtggaagctactcatgttttgcccttgcattggggagcctggttagaactctgtaacctgatcacagacaaagagatgctgaagttcctgtctttgccagacacctggatgaaagagttttttctggctcatatatacacagagttgcagttgatagaggaggccctgcaaaagtatcagaatctcattgatgtgggcttctctaagagctcgtatattgtttcccaaattgcagttgcctatcacaatatcagagatattgacaaagccctctccatttttaatgagctaaggaaacaagacccttacaggattgaaaatatggacacattctccaaccttctttatgtcaggagcatgaaatcggagttgagttatctggctcataacctctgtgagattgataaatatcgtgtagaaacgtgctgtgtaattggcaattattacagtttacgttctcagcatgagaaagcagccttatatttccagagagccctgaaattaaatcctcggtatcttggtgcctggacactaatgggacatgagtacatggagatgaagaacacgtctgctgctatccaggcttatagacatgccattgaggtcaacaaacgggactacagagcttggtatggcctcgggcagacctatgaaatccttaagatgccattttactgcctttattattatagacgggcccaccagcttcgacccaatgattctcgcatgctggttgctttaggagaatgttacgagaaactcaatcaactagtggaagccaaaaagtgttattggagagcttacgccgtgggagatgtggagaaaatggctctggtgaaactggcaaagcttcatgaacagttgactgagtcagaacaggctgcccagtgttacatcaaatatatccaagatatctattcctgtggggaaatagtagaacacttggaggaaagcactgcctttcgctatctggcccagtactattttaagtgcaaactgtgggatgaagcttcaacttgtgcacaaaagtgttgtgcatttaatgatacccgggaagaaggtaaggccttactccggcaaatcctacagcttcggaaccaaggcgagactcctaccaccgaggtgcctgctccctttttcctacctgcttcactctctgctaacaatacccccacacgcagagtttctccactcaacttgtcttctgtcacgccatagttggctactctcaagccagcacattgttagacccatcttaattaagccttacctccatgtaaagaacagcacgtctgttccaaggacctcagctcttcttgtttctacagatggcaacagctccatagggacagcttgtataattaccttcagaggccaactgacagaatcctggcaggaacagacattatcttgccagttagaagtacttctgtctcacttatgtccaaagagtggctatagatcttggccttcttccctgaatgctttttttttttggcccccaagaaagtcccttttatagcactttagcacaggcaatgctacaggaacaaagtttcaatgctgctgagagtgaaagaaaggaggaaagtctgccactctaccctgagctggcagtagggcactgagtaccctaggaagaagtcagagcaatggatacaaatgaccttgctcttggatttgctgagcatgatccctattctgatgtcagagattaggtttaaatggaatagagctatccatttgttcttactctctagggagacaatcttccaaaacagttttgggggggtcttctaaagctttcaaattggaagtaactttattcaactagagttgaataaaagaagggcaaaaataatctcacagagcttggaactgctgatagcccttactgagggcaaaagatggctatattgttagctatactcctaccaaagcaagcaaggagataggattatagataatttcacggacatttggaaataacattggtgattatacagacaagaataaactcacttcaagctggtctgttttaataaattttcaacgtaattgtctatttttttccctcccatctgcaacagaatacatttttttcagcctttatctagatgaggtaaagggaatcattcttatggtgctcttggagagtttcaggcctgtgcatgtgtgtacagcaggaggtaatatgctataatgtctgctgtaatatatttgcacagtagatgctatggatcattctgagctcagggtccagactttattcttattcccagaattttgtgttacgtttttacctcctaacatatgacacttcatcttatattaaggaaggtttagaatatctaatacgacttgaattcatttgttactaagccttctcaggcaagctgtatactagttactggtctccactgccatgccttttcaaggttcccatggtccagaatgatgtttgattcttaatttttctgtcccttttataatttgttttaatgattttgctacatttggaattcaataaaaaatgtgaacaataatatctttaatataactgtttttgtgtgcatagaaatcatataagtaaataaaaaaaaacaacaacatgagattacataggtggttataatacaaaagtgagaaaaaagctagtgtctgagtattgcatcctggatataattcctgatatatggtaaagcataaaagagacctatttcttcaggagagtagctgacccacctcagggccatgactgctcttctctttccccacagccttagtactttttgccaaaaggcccagatttgagtaaaggggaacgccgtgagcgtaggatccgggcataagggctgcagtctgttgagctttggcaggttggtgttcggggaagtaaatttcgaaggaatggtttcttccctggtggttgttggtttggttgctgattttcctggttggtaccaaggcgctttttggcagaaacctggccttggagtttcaacacagtatgatactgctcagcaatacatgctgccttcttccgaaggtccagtttcactagcaccatgttgt

SEQ ID NO: 12031 - protein, 597 aa, Homo sapiens
MAASTSMVPVAVTAAVAPVLSINSDFSDLREIKKQLLLIAGLTRERGLLHSSKWSAELAFSLPALPLAELQPPPPITEEDAQDMDAYTLAKAYFDVKEYDRAAHFLHGCNSKKAYFLYMYSRYLSGEKKKDDETVDSLGPLEKGQVKNEALRELRVELSKKHQARELDGFGLYLYGVVLRKLDLVKEAIDVFVEATHVLPLHWGAWLELCNLITDKEMLKFLSLPDTWMKEFFLAHIYTELQLIEEALQKYQNLIDVGFSKSSYIVSQIAVAYHNIRDIDKALSIFNELRKQDPYRIENMDTFSNLLYVRSMKSELSYLAHNLCEIDKYRVETCCVIGNYYSLRSQHEKAALYFQRALKLNPRYLGAWTLMGHEYMEMKNTSAAIQAYRHAIEVNKRDYRAWYGLGQTYEILKMPFYCLYYYRRAHQLRPNDSRMLVALGECYEKLNQLVEAKKCYWRAYAVGDVEKMALVKLAKLHEQLTESEQAAQCYIKYIQDIYSCGEIVEHLEESTAFRYLAQYYFKCKLWDEASTCAQKCCAFNDTREEGKALLRQILQLRNQGETPTTEVPAPFFLPASLSANNTPTRRVSPLNLSSVTP

SEQ ID NO: 12032 - DNA, 3154 bp, Homo sapiens
atgattggctggagtggcccgagtcgggaaaatggctgcgagtacctccatggtcccggtggctgtgacggcggcagtggcgcctgtcctgtccataaacagcgatttctcagatttgcgggaaattaaaaagcaactgctgcttattgcgggccttacccgggagcggggcctactacacagtagcaaatggtcggcggagttggctttctctctccctgcattgcctctggccgagctgcaaccgcctccgcctattacagaggaagatgcccaggatatggatgcctataccctggccaaggcctactttgacgttaaagagtatgatcgggcagcacatttcctgcatggctgcaatagcaagaaagcctattttctgtatatgtattccagatatctgtctggagaaaaaaagaaggacgatgaaacagttgatagcttaggccccctggaaaaaggacaagtgaaaaatgaggcgcttagagaattgagagtggagctcagcaaaaaacaccaagctcgagaacttgatggatttggactttatctgtatggtgtggtgcttcgaaaactggacttggttaaagaggccattgatgtgtttgtggaagctactcatgttttgcccttgcattggggagcctggttagaactctgtaacctgatcacagacaaagagatgctgaagttcctgtctttgccagacacctggatgaaagagttttttctggctcatatatacacagagttgcagttgatagaggaggccctgcaaaagtatcagaatctcattgatgtgggcttctctaagagctcgtatattgtttcccaaattgcagttgcctatcacaatatcagagatattgacaaagccctctccatttttaatgagctaaggaaacaagacccttacaggattgaaaatatggacacattctccaaccttctttatgtcaggagcatgaaatcggagttgagttatctggctcataacctctgtgagattgataaatatcgtgtagaaacgtgctgtgtaattggcaattattacagtttacgttctcagcatgagaaagcagccttatatttccagagagccctgaaattaaatcctcggtatcttggtgcctggacactaatgggacatgagtacatggagatgaagaacacgtctgctgctatccaggcttatagacatgccattgaggtcaacaaacgggactacagagcttggtatggcctcgggcagacctatgaaatccttaagatgccattttactgcctttattattatagacgggcccaccagcttcgacccaatgattctcgcatgctggttgctttaggagaatgttacgagaaactcaatcaactagtggaagccaaaaagtgttattggagagcttacgccgtgggagatgtggagaaaatggctctggtgaaactggcaaagcttcatgaacagttgactgagtcagaacaggctgcccagtgttacatcaaatatatccaagatatctattcctgtggggaaatagtagaacacttggaggaaagcactgcctttcgctatctggcccagtactattttaagtgcaaactgtgggatgaagcttcaacttgtgcacaaaagtgttgtgcatttaatgatacccgggaagaaggtaaggccttactccggcaaatcctacagcttcggaaccaaggcgagactcctaccaccgaggtgcctgctccctttttcctacctgcttcactctctgctaacaatacccccacacgcagagtttctccactcaacttgtcttctgtcacgccatagttggctactctcaagccagcacattgttagacccatcttaattaagccttacctccatgtaaagaacagcacgtctgttccaaggacctcagctcttcttgtttctacagatggcaacagctccatagggacagcttgtataattaccttcagaggccaactgacagaatcctggcaggaacagacattatcttgccagttagaagtacttctgtctcacttatgtccaaagagtggctatagatcttggccttcttccctgaatgctttttttttttggcccccaagaaagtcccttttatagcactttagcacaggcaatgctacaggaacaaagtttcaatgctgctgagagtgaaagaaaggaggaaagtctgccactctaccctgagctggcagtagggcactgagtaccctaggaagaagtcagagcaatggatacaaatgaccttgctcttggatttgctgagcatgatccctattctgatgtcagagattaggtttaaatggaatagagctatccatttgttcttactctctagggagacaatcttccaaaacagttttgggggggtcttctaaagctttcaaattggaagtaactttattcaactagagttgaataaaagaagggcaaaaataatctcacagagcttggaactgctgatagcccttactgagggcaaaagatggctatattgttagctatactcctaccaaagcaagcaaggagataggattatagataatttcacggacatttggaaataacattggtgattatacagacaagaataaactcacttcaagctggtctgttttaataaattttcaacgtaattgtctatttttttccctcccatctgcaacagaatacatttttttcagcctttatctagatgaggtaaagggaatcattcttatggtgctcttggagagtttcaggcctgtgcatgtgtgtacagcaggaggtaatatgctataatgtctgctgtaatatatttgcacagtagatgctatggatcattctgagctcagggtccagactttattcttattcccagaattttgtgttacgtttttacctcctaacatatgacacttcatcttatattaaggaaggtttagaatatctaatacgacttgaattcatttgttactaagccttctcaggcaagctgtatactagttactggtctccactgccatgccttttcaaggttcccatggtccagaatgatgtttgattcttaatttttctgtcccttttataatttgttttaatgattttgctacatttggaattcaataaaaaatgtgaacaataat

SEQ ID NO: 12033 - protein, 597 aa, Homo sapiens; identical to SEQ ID NO: 12031

SEQ ID NO: 12034 - DNA, 845 bp, Homo sapiens
gagtcgggaaaatggctgcgagtacctccatggtcccggtggctgtgacggcggcagtggcgcctgtcctgtccataaacagcgatttctcagatttgcgggaaattaaaaagcaactgctgcttattgcgggccttacccgggagcggggcctactacacagtagcaaatggtcggcggagttggctttctctctccctgcattgcctctggccgagctgcaaccgcctccgcctattacagaggaagatgcccaggatatggatgcctataccctggccaaggcctactttgacgttaaagagtatgatcgggcagcacatttcctgcatggctgcaatagcaagaaagcctattttctgtatatgtattccagatatctgtctggagaaaaaaagaaggacgatgaaacagttgatagcttaggccccctggaaaaaggacaagtgaaaaatgaggcgcttagagaattgagagtggagctcagcaaaaaacaccaagctcgagaacttgatggatttggactttatctgtatggtgtggtgcttcgaaaactggacttggttaaagaggccattgatgtgtttgtggaagctactcatgttttgcccttgcattggggagcctggttagaactctgtaacctgatcacagacaaagagatggtaaattgtgatgagctatgtgaaaaaccctctgcttcaagccttttgtaattctgtagtaatataggggtggggaaagttttggcagggctttggttatagttctccctttgctgcgcctctggtgtcttttcgctgttttggaagtaagtctttgtttgaaagactgatgactagctc

SEQ ID NO: 12035 - protein, 234 aa, Homo sapiens
MAASTSMVPVAVTAAVAPVLSINSDFSDLREIKKQLLLIAGLTRERGLLHSSKWSAELAFSLPALPLAELQPPPPITEEDAQDMDAYTLAKAYFDVKEYDRAAHFLHGCNSKKAYFLYMYSRYLSGEKKKDDETVDSLGPLEKGQVKNEALRELRVELSKKHQARELDGFGLYLYGVVLRKLDLVKEAIDVFVEATHVLPLHWGAWLELCNLITDKEMVNCDELCEKPSASSLL

SEQ ID NO: 12036 - DNA, 1080 bp, Homo sapiens
gatgattggctggagtggcccgagtcgggaaaatggctgcgagtacctccatggtcccggtggctgtgacggcggcagtggcgcctgtcctgtccataaacagcgatttctcagatttgcgggaaattaaaaagcaactgctgcttattgcgggccttacccgggagcggggcctactacacagtagcaaatggtcggcggagttggctttctctctccctgcattgcctctggccgagctgcaaccgcctccgcctattacagaggaagatgcccaggatatggatgcctataccctggccaaggcctactttgacgttaaagagtatgatcgggcagcacatttcctgcatggctgcaatagcaagaaagcctattttctgtatatgtattccagatatctggtgagggccattttaaaatgtcattctgcctttagtgaaacatccatatttagaaccaatggaaaagttaaatcttttaaatagcttagcagtgggccactgaatgaatgtactttatacatagcaataataaaaaaaagatatcataaataaagttaaaaaggatggtagagaagaaaatattcttaggaatgactaacaggataagtaacaacctgattatttatttactttaggttatataaggttcttcatgcctgtgaattaatattattgtgtaagaattaagttaaaaagcctgggctgacttttaaatttataaattcatttatcatgtttatagtatatttattgtttttctttcatggctattaaaaagtatgactgtaaaggacaatgcaagtaaaccaacttaatactgtattgaataataagtacaatttattattttactttgaaacattatgaatttactttcctactttttcttagttgttatctatataaattgattaaaaaaacattttatgtacttctcatttcctagtacaggttgagtatcccttatttgaagtgcttgggaccaaaagtgtttcagatttcagatttttttcagattttggtatatttgcattatacttactggttgaaataaaaaatgctgcagtgagtgtca

SEQ ID NO: 12037 - protein, 151 aa, Homo sapiens
MAASTSMVPVAVTAAVAPVLSINSDFSDLREIKKQLLLIAGLTRERGLLHSSKWSAELAFSLPALPLAELQPPPPITEEDAQDMDAYTLAKAYFDVKEYDRAAHFLHGCNSKKAYFLYMYSRYLVRAILKCHSAFSETSIFRTNGKVKSFK

SEQ ID NO: 12038 - DNA, 1841 bp, Homo sapiens
cccaggaccctggtgggagagtgtgtgcgtcgcgctggagggcgggaggcgggggcgggaggtgccggtcgagggagccccgctctcagagctccaggggaggagcgaggggagcgcggagcccggcgcctacagctcgccatggtgcgccccctgaacccgcgaccgctgccgcccgtagtcctgatgttgctgctgctgctgccgccgtcgccgctgcctctcgcagccggagacccccttcccacagaaagccgactcatgaacagctgtctccaggccaggaggaagtgccaggctgatcccacctgcagtgctgcctaccaccacctggattcctgcacctctagcataagcaccccactgccctcagaggagccttcggtccctgctgactgcctggaggcagcacagcaactcaggaacagctctctgataggctgcatgtgccaccggcgcatgaagaaccaggttgcctgcttggacatctattggaccgttcaccgtgcccgcagccttgactcagacctctgcctcaagtttgccatgctgtgtactctcaatgacaagtgtgaccggctgcgcaaggcctacggggaggcgtgctccgggccccactgccagcgccacgtctgcctcaggcagctgctcactttcttcgagaaggccgccgagccccacgcgcagggcctgctactgtgcccatgtgcccccaacgaccggggctgcggggagcgccggcgcaacaccatcgcccccaactgcgcgctgccgcctgtggcccccaactgcctggagctgcggcgcctctgcttctccgacccgctttgcagatcacgcctggtggatttccagacccactgccatcccatggacatcctaggaacttgtgcaacagagcagtccagatgtctacgagcatacctggggctgattgggactgccatgacccccaactttgtcagcaatgtcaacaccagtgttgccttaagctgcacctgccgaggcagtggcaacctgcaggaggagtgtgaaatgctggaagggttcttctcccacaacccctgcctcacggaggccattgcagctaagatgcgttttcacagccaactcttctcccaggactggccacaccctacctttgctgtgatggcacaccagaatgaaaaccctgctgtgaggccacagccctgggtgccctctcttttctcctgcacgcttcccttgattctgctcctgagcctatggtagctggacttccccagggccctcttcccctccaccacacccaggtggacttgcagcccacaaggggtgaggaaaggacagcagcaggaaggaggtgcagtgcgcagatgagggcacaggagaagctaagggttatgacctccagatccttactggtccagtcctcattccctccaccccatctccacttctgattcatgctgcccctccttggtggccacaatttagccatgtcatctggtggtgaccagctccaccaagcccctttctgagcccttcctcttgactaccaggatcaccagaatctaataagttagccattctctattgcattccagattagggttagggtagggaggactgggtgttctgaggcagcctagaaagtcattctcctttgtgaagaaggctcctgccccctcgtctcctcctctgagtggaggatggaaaactactgcctgcactgccctgtccccggatcctgccgaacatctgggcatcaggagctggagcctgtgggccttgctttattcctattattgtcctaaagtctctctgggctcttggatcatgattaaacctttgacttaaga

SEQ ID NO: 12039 - protein, 369 aa, Homo sapiens
MVRPLNPRPLPPVVLMLLLLLPPSPLPLAAGDPLPTESRLMNSCLQARRKCQADPTCSAAYHHLDSCTSSISTPLPSEEPSVPADCLEAAQQLRNSSLIGCMCHRRMKNQVACLDIYWTVHRARSLDSDLCLKFAMLCTLNDKCDRLRKAYGEACSGPHCQRHVCLRQLLTFFEKAAEPHAQGLLLCPCAPNDRGCGERRRNTIAPNCALPPVAPNCLELRRLCFSDPLCRSRLVDFQTHCHPMDILGTCATEQSRCLRAYLGLIGTAMTPNFVSNVNTSVALSCTCRGSGNLQEECEMLEGFFSHNPCLTEAIAAKMRFHSQLFSQDWPHPTFAVMAHQNENPAVRPQPWVPSLFSCTLPLILLLSLW

SEQ ID NO: 12040 - DNA, 1961 bp, Homo sapiens
cgcgcgcttcggagttggagggcggcgcccaggaccctggtgggagagtgtgtgcgtcgcgctggagggcgggaggcgggggcgggaggtgccggtcgagggagccccgctctcagagctccaggggaggagcgaggggagcgcggagcccggcgcctacagctcgccatggtgcgccccctgaacccgcgaccgctgccgcccgtagtcctgatgttgctgctgctgctgccgccgtcgccgctgcctctcgcagccggagacccccttcccacagaaagccgactcatgaacagctgtctccaggccaggaggaagtgccaggctgatcccacctgcagtgctgcctaccaccacctggattcctgcacctctagcataagcaccccactgccctcagaggagccttcggtccctgctgactgcctggaggcagcacagcaactcaggaacagctctctgataggctgcatgtgccaccggcgcatgaagaaccaggttgcctgcttggacatctattggaccgttcaccgtgcccgcagccttggtaactatgagctggatgtctccccctatgaagacacagtgaccagcaaaccctggaaaatgaatctcagcaaactgaacatgctcaaaccagactcagacctctgcctcaagtttgccatgctgtgtactctcaatgacaagtgtgaccggctgcgcaaggcctacggggaggcgtgctccgggccccactgccagcgccacgtctgcctcaggcagctgctcactttcttcgagaaggccgccgagccccacgcgcagggcctgctactgtgcccatgtgcccccaacgaccggggctgcggggagcgccggcgcaacaccatcgcccccaactgcgcgctgccgcctgtggcccccaactgcctggagctgcggcgcctctgcttctccgacccgctttgcagatcacgcctggtggatttccagacccactgccatcccatggacatcctaggaacttgtgcaacagagcagtccagatgtctacgagcatacctggggctgattgggactgccatgacccccaactttgtcagcaatgtcaacaccagtgttgccttaagctgcacctgccgaggcagtggcaacctgcaggaggagtgtgaaatgctggaagggttcttctcccacaacccctgcctcacggaggccattgcagctaagatgcgttttcacagccaactcttctcccaggactggccacaccctacctttgctgtgatggcacaccagaatgaaaaccctgctgtgaggccacagccctgggtgccctctcttttctcctgcacgcttcccttgattctgctcctgagcctatggtagctggacttccccagggccctcttcccctccaccacacccaggtggacttgcagcccacaaggggtgaggaaaggacagcagcaggaaggaggtgcagtgcgcagatgagggcacaggagaagctaagggttatgacctccagatccttactggtccagtcctcattccctccaccccatctccacttctgattcatgctgcccctccttggtggccacaatttagccatgtcatctggtggtgaccagctccaccaagcccctttctgagcccttcctcttgactaccaggatcaccagaatctaataagttagccattctctattgcattccagattagggttagggtagggaggactgggtgttctgaggcagcctagaaagtcattctcctttgtgaagaaggctcctgccccctcgtctcctcctctgagtggaggatggaaaactactgcctgcactgccctgtccccggatcctgccgaacatctgggcatcaggagctggagcctgtgggccttgctttattcctattattgtcctaaagtctctctgggctcttggatcatgattaaacctttgacttaaga

SEQ ID NO: 12041 - protein, 400 aa, Homo sapiens; identical to SEQ ID NO: 1151

SEQ ID NO: 12042 - DNA, 1901 bp, Homo sapiens
ggtcaacgcctgcggctgttgatattcttgctcagaggccgtaactttggccttctgctcagggaagactctgagtccgacgttggcctacccagtcggaaggcagagctgcaatctagttaactacctcctttcccctagatttcctttcattctgctcaagtcttcgcctgtgtccgatccctatctactttctctcctcttgtaggcaagcctcagactccaggcttgagctaggttttgtttttctcctggtgagaattcgaagaccatgtctacggaactcttctcatccacaagagaggaaggaagctctggctcaggacccagttttaggtctaatcaaaggaaaatgttaaacctgctcctggagagagacacttcctttaccgtctgtccagatgtccctagaactccagtgggcaaatttcttggtgattctgcaaacctaagcattttgtctgggtcacctggattcttcaggacttcaggaagtgcatttagctgggatgacaatggaaacttggtggacagtgaaatgaaatatttgggcagtcccattactactgttccaaaattggataaaaatccaaacctaggagaagaccaggcagaagagatttcagatgaattaatggagttttccctgaaagatcaagaagcaaaggtgagcagaagtggcctatatcgctccccgtcgatgccagagaacttgaacaggccaagactgaagcaggtggaaaaattcaaggacaacacaataccagataaagttaaaaaaaagtatttttctggccaaggaaagctcaggaagggcttatgtttaaagaagacagtctctctgtgtgacattactatcactcagatgctggaggaagattctaaccaggggcacctgattggtgatttttccaaggtatgtgcgctgccaaccgtgtcagggaaacaccaagatctgaagtatgtcaacccagaaacagtggctgccttactgtcggggaagttccagggtctgattgagaagttttatgtcattgattgtcgctatccatatgagtatctgggaggacacatccagggagccttaaacttatatagtcaggaagaactgtttaacttctttctgaagaagcccatcgtccctttggacacccagaagagaataatcatcgtgttccactgtgaattctcctcagagaggggcccccgaatgtgccgctgtctgcgtgaagaggacaggtctctgaaccagtatcctgcattgtactacccagagctatatatccttaaaggcggctacagagacttctttccagaatatatggaactgtgtgaaccacagagctactgccctatgcatcatcaggaccacaagactgagttgctgaggtgtcgaagccagagcaaagtgcaggaaggggagcggcagctgcgggagcagattgcccttctggtgaaggacatgagcccatgataacattccagccactggctgctaacaagtcaccaaaagacactgcagaaaccctgagcagaaagaggccttctggatggccaaacccaagattattaaaagatgtctctgcaaaccaacaggctaccaacttgtatccaggcctgggaatggattaggtttcagcagagctgaaagctggtggcagagtcctggagctggctctataaggcagccttgagttgcatagagatttgtattggttcagggaactctggcattccttttcccaactcctcatgtcttctcacaagccagccaactctttctctctgggcttcgggctatgcaagagcgttgtctaccttctttctttgtattttccttctttgtttccccctctttcttttttaaaaatggaaaaataaacactacagaatgagaggtg

SEQ ID NO: 12043 - protein, 400 aa, Homo sapiens; identical to SEQ ID NO: 1155

SEQ ID NO: 12044 - DNA, 2128 bp, Homo sapiens
gtttgaatggtcaacgcctgcggctgttgatattcttgctcagaggccgtaactttggccttctgctcagggaagactctgagtccgacgttggcctacccagtcggaaggcagagctgcaatctagttaactacctcctttcccctagatttcctttcattctgctcaagtcttcgcctgtgtccgatccctatctactttctctcctcttgtaggcaagcctcagactccaggcttgagctaggttttgtttttctcctggtgagaattcgaagaccatgtctacggaactcttctcatccacaagagaggaaggaagctctggctcaggacccagttttaggtctaatcaaaggaaaatgttaaacctgctcctggagagagacacttcctttaccgtctgtccagatgtccctagaactccagtgggcaaatttcttggtgattctgcaaacctaagcattttgtctggaggaaccccaaaacgttgcctcgatctttcgaatcttagcagtggggagataactgccactcagcttaccacttctgcagaccttgatgaaactggtcacctggattcttcaggacttcaggaagtgcatttagctgggatgaatcatgaccagcacctaatgaaatgtagcccagcacagcttctttgtagcactccgaatggtttggaccgtggccatagaaagagagatgcaatgtgtagttcatctgcaaataaagaaaatgacaatggaaacttggtggacagtgaaatgaaatatttgggcagtcccattactactgttccaaaattggataaaaatccaaacctaggagaagaccaggcagaagagatttcagatgaattaatggagttttccctgaaagatcaagaagcaaaggtgagcagaagtggcctatatcgctccccgtcgatgccagagaacttgaacaggccaagactgaagcaggtggaaaaattcaaggacaacacaataccagataaagttaaaaaaaagtatttttctggccaaggaaagctcaggaagggcttatgtttaaagaagacagtctctctgtgtgacattactatcactcagatgctggaggaagattctaaccaggggcacctgattggtgatttttccaaggtatgtgcgctgccaaccgtgtcagggaaacaccaagatctgaagtatgtcaacccagaaacagtggctgccttactgtcggggaagttccagggtctgattgagaagttttatgtcattgattgtcgctatccatatgagtatctgggaggacacatccagggagccttaaacttatatagtcaggaagaactgtttaacttctttctgaagaagcccatcgtccctttggacacccagaagagaataatcatcgtgttccactgtgaattctcctcagagaggggcccccgaatgtgccgctgtctgcgtgaagaggacaggtctctgaaccagtatcctgcattgtactacccagagctatatatccttaaaggcggctacagagacttctttccagaatatatggaactgtgtgaaccacagagctactgccctatgcatcatcaggaccacaagactgagttgctgaggtgtcgaagccagagcaaagtgcaggaaggggagcggcagctgcgggagcagattgcccttctggtgaaggacatgagcccatgataacattccagccactggctgctaacaagtcaccaaaagacactgcagaaaccctgagcagaaagaggccttctggatggccaaacccaagattattaaaagatgtctctgcaaaccaacaggctaccaacttgtatccaggcctgggaatggattaggtttcagcagagctgaaagctggtggcagagtcctggagctggctctataaggcagccttgagttgcatagagatttgtattggttcagggaactctggcattccttttcccaactcctcatgtcttctcacaagccagccaactctttctctctgggcttcgggctatgcaagagcgttgtctaccttctttctttgtattttccttctttgtttccccctctttcttttttaaaaatggaaaaataaacactacagaatgagaggtg

SEQ ID NO: 12045 - protein, 473 aa, Homo sapiens
MSTELFSSTREEGSSGSGPSFRSNQRKMLNLLLERDTSFTVCPDVPRTPVGKFLGDSANLSILSGGTPKRCLDLSNLSSGEITATQLTTSADLDETGHLDSSGLQEVHLAGMNHDQHLMKCSPAQLLCSTPNGLDRGHRKRDAMCSSSANKENDNGNLVDSEMKYLGSPITTVPKLDKNPNLGEDQAEEISDELMEFSLKDQEAKVSRSGLYRSPSMPENLNRPRLKQVEKFKDNTIPDKVKKKYFSGQGKLRKGLCLKKTVSLCDITITQMLEEDSNQGHLIGDFSKVCALPTVSGKHQDLKYVNPETVAALLSGKFQGLIEKFYVIDCRYPYEYLGGHIQGALNLYSQEELFNFFLKKPIVPLDTQKRIIIVFHCEFSSERGPRMCRCLREEDRSLNQYPALYYPELYILKGGYRDFFPEYMELCEPQSYCPMHHQDHKTELLRCRSQSKVQEGERQLREQIALLVKDMSP

SEQ ID NO: 12046 - DNA, 2287 bp, Homo sapiens
gaggtgcccgccccgaggccccagcgccacctgccctccaccacctaccgcggttcctccagctcccagggccgcggccggagcagctctgagcgctcggttcgccccacggtgcccttaaaaggcgctggcgcgaaccaacgagtccctgaggagagtagggggacagctccggctcgcagaatccccccaagccacccatggagggcgcagctccgtgtcgtgtctctctcaaagtgtctctcggacagcgctgttgggaacgagcctggcgctttgatttagggatgggggtggtttcctcactaacgagtcaccccctccaaaatatcgcagaaagtggacggccccagttggaggcacatcttgaaacccgcgggggaggccatgtcggaagaagctaggttttgtttttctcctggtgagaattcgaagaccatgtctacggaactcttctcatccacaagagaggaaggaagctctggctcaggacccagttttaggtctaatcaaaggaaaatgttaaacctgctcctggagagagacacttcctttaccgtctgtccagatgtccctagaactccagtgggcaaatttcttggtgattctgcaaacctaagcattttgtctggaggaaccccaaaacgttgcctcgatctttcgaatcttagcagtggggagataactgccactcagcttaccacttctgcagaccttgatgaaactggtcacctggattcttcaggacttcaggaagtgcatttagctgggatgaatcatgaccagcacctaatgaaatgtagcccagcacagcttctttgtagcactccgaatggtttggaccgtggccatagaaagagagatgcaatgtgtagttcatctgcaaataaagaaaatgacaatggaaacttggtggacagtgaaatgaaatatttgggcagtcccattactactgttccaaaattggataaaaatccaaacctaggagaagaccaggcagaagagatttcagatgaattaatggagttttccctgaaagatcaagaagcaaaggtgagcagaagtggcctatatcgctccccgtcgatgccagagaacttgaacaggccaagactgaagcaggtggaaaaattcaaggacaacacaataccagataaagttaaaaaaaagtatttttctggccaaggaaagctcaggaagggcttatgtttaaagaagacagtctctctgtgtgacattactatcactcagatgctggaggaagattctaaccaggggcacctgattggtgatttttccaaggtatgtgcgctgccaaccgtgtcagggaaacaccaagatctgaagtatgtcaacccagaaacagtggctgccttactgtcggggaagttccagggtctgattgagaagttttatgtcattgattgtcgctatccatatgagtatctgggaggacacatccagggagccttaaacttatatagtcaggaagaactgtttaacttctttctgaagaagcccatcgtccctttggacacccagaagagaataatcatcgtgttccactgtgaattctcctcagagaggggcccccgaatgtgccgctgtctgcgtgaagaggacaggtctctgaaccagtatcctgcattgtactacccagagctatatatccttaaaggcggctacagagacttctttccagaatatatggaactgtgtgaaccacagagctactgccctatgcatcatcaggaccacaagactgagttgctgaggtgtcgaagccagagcaaagtgcaggaaggggagcggcagctgcgggagcagattgcccttctggtgaaggacatgagcccatgataacattccagccactggctgctaacaagtcaccaaaagacactgcagaaaccctgagcagaaagaggccttctggatggccaaacccaagattattaaaagatgtctctgcaaaccaacaggctaccaacttgtatccaggcctgggaatggattaggtttcagcagagctgaaagctggtggcagagtcctggagctggctctataaggcagccttgagttgcatagagatttgtattggttcagggaactctggcattccttttcccaactcctcatgtcttctcacaagccagccaactctttctctctgggcttcgggctatgcaagagcgttgtctaccttctttctttgtattttccttctttgtttccccctctttcttttttaaaaatggaaaaataaacactacagaatgagaggtg

SEQ ID NO: 12047 - protein, 490 aa, Homo sapiens
MSEEARFCFSPGENSKTMSTELFSSTREEGSSGSGPSFRSNQRKMLNLLLERDTSFTVCPDVPRTPVGKFLGDSANLSILSGGTPKRCLDLSNLSSGEITATQLTTSADLDETGHLDSSGLQEVHLAGMNHDQHLMKCSPAQLLCSTPNGLDRGHRKRDAMCSSSANKENDNGNLVDSEMKYLGSPITTVPKLDKNPNLGEDQAEEISDELMEFSLKDQEAKVSRSGLYRSPSMPENLNRPRLKQVEKFKDNTIPDKVKKKYFSGQGKLRKGLCLKKTVSLCDITITQMLEEDSNQGHLIGDFSKVCALPTVSGKHQDLKYVNPETVAALLSGKFQGLIEKFYVIDCRYPYEYLGGHIQGALNLYSQEELFNFFLKKPIVPLDTQKRIIIVFHCEFSSERGPRMCRCLREEDRSLNQYPALYYPELYILKGGYRDFFPEYMELCEPQSYCPMHHQDHKTELLRCRSQSKVQEGERQLREQIALLVKDMSP

SEQ ID NO: 12048 - DNA, 786 bp, Homo sapiens
ggtgagtttggctacacccatcctgtatttcagtgagtcattttggatctgaatcttctctgtttgccgagaatgcctggtgtaaatatgcatcctcaccaagtactctttggtaacctgacagtgctctagtggtagatccaggccctaagcctttccagagagaaagtatttcttattcttctgggaagatccagaacaggggaaagtatgagactttttaccttttttctgtttaaaaacatattttaaaattatgtaaataatacttggttgttacagaaaaagtagaaaatgaagaaatttatcccaaactttattaaccagggtaatattgcttagtatatactctttttttcccccctactgtctgtgtaattgcagaaggtacatattcttacagatttttttctgtgttttcacaaacacatatacaaatacagtttttgcttttctacaaaaacagtttatattgttttgttatctgttgtttttcctctcatttaataattatatcaggggttgcggtgagccaagatggcaccattgtactccagcctgggcaacaagggcgaaattccatctcaaaaaacaaaaaaaaaggatcatgatgaacgtatagtattgcaatttgcttagtgagacattatagacatctttctatatcaataaggtatctatattatcattttaatggctatataatgccgctctattctactgacatgtacaatttattttaccaaacccctattattgaatattgaagttatttctaatatattg

SEQ ID NO: 12049 - protein, 33 aa, Homo sapiens
MAPLYSSLGNKGEIPSQKTKKKDHDERIVLQFA

SEQ ID NO: 12050 - DNA, 450 bp, Homo sapiens
ccactttacatgcaagtgtagattaatttcttatttcccccttagtctagcttttaagcccttattccgaggaggccatggtactttttatctaaaccttaggccatccgtcgttccaagttaaatctagcctctccggagccacctcatcactaagatagttctgtatctaatccctcatctaagccccttttctagacatcgttttttcttccctgcctcccatccctttccccaaatcattaccataaaagatagctgctcttcttttcttacattgacttaagataaactcatgttttcggctgttcttatcagttttttcttgatttaatactgtccttctaatctccatttataatcactttttattcatttatttttgaaactgaattacaccactgcactccagtgcagtgaatggacaggtgacaaagtgagactgtctca

SEQ ID NO: 12051 - protein, 51 aa, Homo sapiens
PLRSHLITKIVLYLIPHLSPFSRHRFFFPASHPFPQIITIKDSCSSFLTLT

SEQ ID NO: 12052 - DNA, 542 bp, Homo sapiens
gttttatatgaaatattccaaaaggaatgtttcataagttaaccttccagaattctaatttcagattttctgagtgataacctttcttttctacccataagaaaaaaaaaaactccataggtagcatagtgtagtgtttcccaacacttgatttcttttagtgacacatataaattcttacgtttctgtgaaattgtaccttgtaccatgaaatgggtaccaatcgagaggctttgtattcaaaagctcagtccttgaaattaatacggcttactggtaatgaagaaaatctgaaggaaaaacaggatgcatggacaagaataactccttttactgattctttatatttgattgcaggtcacctggattcttcaggacttcaggaagtgcatttagctgggatgaatcatgaccagcacctaatgaaatgtagcccagtgagtagcctctctttttttgggttttgttttgcttttcaggtgggaggcagagggtttccattgcacctgtggcttgaggatgctggacgttctcagcaaact

SEQ ID NO: 12053 - protein, 109 aa, Homo sapiens
MGTNREALYSKAQSLKLIRLTGNEENLKEKQDAWTRITPFTDSLYLIAGHLDSSGLQEVHLAGMNHDQHLMKCSPVSSLSFFGFCFAFQVGGRGFPLHLWLEDAGRSQQ

SEQ ID NO: 12054 - DNA, 400 bp, Homo sapiens
aaagcagatagattatggcaagtgcacacctggctaccagtgctttctgcaccaggtcctcaagcagggaatgaagagtcttagaaccaatggattccactcctttggatgacctcctggatgactggctccaggccctggagccctcagaatatggatggagagggaaataagcagtgcaagtttgtagacttggtggctcctgcctcctcccctccctggctcagtgaggacgacccccgccactggctctactttccagctgatcacagctatttacctgtcccagtcttgagtaaggcacaaaatatttacagaaaacagatgtctttcagaggacttgctgctaagtgtaatagtgaagattacttgcattactgctactttccaatcaattaaa

SEQ ID NO: 12055 - protein, 96 aa, Homo sapiens
MTSWMTGSRPWSPQNMDGEGNKQCKFVDLVAPASSPPWLSEDDPRHWLYFPADHSYLPVPVLSKAQNIYRKQMSFRGLAAKCNSEDYLHYCYFPIN

SEQ ID NO: 12056 - DNA, 1614 bp, Homo sapiens
ctgagctttacaaagtgttctgggtgagggcaaattacagaaccaagtggaaacgtccccgcaaccattataagtcctgggtttttaaggttcaggccgatccggcagctgcaagaggggctcctgggactccgagcaggccctaatccgcgcttggaccacacttcccagcagccttcacgccgcggacgggtcctttgctgggggaagggggattccttcgaagaggtggtcgtggagggcggggcagcagagcagactcagcaggcatgactggagagggaagtcccaatggtgctagaatggtgctgcagtggcagaagacggctcacaagtgaggtctggaagaacaacagggaagacatccatcatttgctccaaagtgtgcaagtcaaatcctggggagaatcatgataaccctgatcactgagcagctacagaagcagactctggatgagctgaaatgcacacgcttcagcatcagtctgcctttgcctgatcatgcagacatctccaactgtgggaactctttccagcttgtgtctgaaggtgcttcctggaggggcctgccccactgttcctgtgctgagttccaggacagcctcaacttcagctaccatccctcaggcctgagcctgcacctcagaccacccagtcggggaaactcccccaaggagcagcccttctcccaagtcctaagacctgagcccccagatccagagaagcttcctgtgccccctgcccctccatccaagaggcactgccgctcactctcagtgcccgtggacctgtctcgctggcagccggtgtggcggcccgccccctccaagctgtggactcccataaagcaccggggcagtggtggagggggtgggccgcaggtgcctcaccagagccccccaaagcgggtctccagcctcaggttcctccaagctcccagtgcctcttctcaatgtgccccagctcacagaccctacagccctcctttcttcagcctggccctggcccaagattcctctcgaccctgcgccgcctcccctcaaagtggctcctgggagagtgatgctgagtccttgtcaccttgcccacctcagcgccgcttctccctgtcacccagtctgggcccgcaggcaagccgcttcttgccctctgcccggagctctcccgcatcctccccagagctgccctggcgacctcgaggtctccgcaaccttccccgaagccgctcacagccttgtgatctggatgcccgcaaaactggggtcaagcggcgccacgaggaagacccccggcgtctgcggccttcgttggactttgacaagatgaatcagaaaccatactcaggaggtctttgtctccaagaaacagcccgggaaggcagcagcatctctccaccatggttcatggcctgtagccccccacccctctctgcttcctgcagccccactgggggttcctcccaggtgctgagtgaaagcgaagaggaggaggagggggctgtgcggtggggtcggcaggcgctgagcaagcggacactgtgccagcgggactttggggacctggacttgaatttgattgaggaaaactaaaactgagaggctacttcctggggcc

SEQ ID NO: 12057 - protein, 392 aa, Homo sapiens; identical to SEQ ID NO: 1157

SEQ ID NO: 12058 - DNA, 370 bp, Homo sapiens
agagctgctccggccgcggccctgggagctggaggaaccgcgaaggtgcttcctggaggggcctgccccactgttcctgtgctgagttccaggacagcctcaacttcagctaccatccctcaggcctgagcctgcacctcagaccacccagtcggggaaactcccccaaggagcagcccttctcccaagtcctaagacctgagcccccagatccagagaagcttcctgtgccccctgcccctccatccaagaggcactgccgctcactctcagtgcccgtggacctgtctcgctggcagccggtgtggcggcccgccccctccaagctgtggactcccataaagcaccggggcagtggtggagggggtgg

SEQ ID NO: 12059 - protein, 121 aa, Homo sapiens
SCSGRGPGSWRNREGASWRGLPHCSCAEFQDSLNFSYHPSGLSLHLRPPSRGNSPKEQPFSQVLRPEPPDPEKLPVPPAPPSKRHCRSLSVPVDLSRWQPVWRPAPSKLWTPIKHRGSGGG

SEQ ID NO: 12060 - DNA, 831 bp, Homo sapiens
agagctgctccggccgcggccctgggagctggaggaaccgcgactcagcaggcatgactggagagggaagtcccaatggtgctagaatggtgctgcagtggcagaagacggctcacaagtgaggtctggaagaacaacagggaagacatccatcatttgctccaaagtgtgcaagtcaaatcctggggagaatcatgataaccctgatcactgagcagctacagaagcagactctggatgagctgaaatgcacacgcttcagcatcagtctgcctttgcctgatcatgcagacatctccaactgtgggaactctttccagcttgtgtctgtctgggcccgcaggcaagccgcttcttgccctctgcccggagctctcccgcatcctccccagagctgccctggcgacctcgaggtctccgcaaccttccccgaagccgctcacagccttgtgatctggatgcccgcaaaactggggtcaagcggcgccacgaggaagacccccggcgtctgcggccttcgttggactttgacaagatgaatcagaaaccatactcaggaggtctttgtctccaagaaacagcccgggaaggcagcagcatctctccaccatggttcatggcctgtagccccccacccctctctgcttcctgcagccccactgggggttcctcccaggtgctgagtgaaagcgaagaggaggaggagggggctgtgcggtggggtcggcaggcgctgagcaagcggacactgtgccagcgggactttggggacctggacttgaatttgattgaggaaaactaaaactgagaggctacttcctggggccacac

SEQ ID NO: 12061 - protein, 114 aa, Homo sapiens
MITLITEQLQKQTLDELKCTRFSISLPLPDHADISNCGNSFQLVSVWARRQAASCPLPGALPHPPQSCPGDLEVSATFPEAAHSLVIWMPAKLGSSGATRKTPGVCGLRWTLTR

SEQ ID NO: 12062 - DNA, 2602 bp, Homo sapiens
agagctgctccggccgcggccctgggagctggaggaaccgcgactcagcaggcatgactggagagggaagtcccaatggtgctagaatggtgctgcagtggcagaagacggctcacaagtgaggtctggaagaacaacagggaagacatccatcatttgctccaaagtgtgcaagtcaaatcctggggagaatcatgataaccctgatcactgagcagctacagaagcagactctggatgagctgaaatgcacacgcttcagcatcagtctgcctttgcctgatcatgcagacatctccaactgtgggaactctttccagcttgtgtctgaaggtgcttcctggaggggcctgccccactgttcctgtgctgagttccaggacagcctcaacttcagctaccatccctcaggcctgagcctgcacctcagaccacccagtcggggaaactcccccaaggagcagcccttctcccaagtcctaagacctgagcccccagatccagagaagcttcctgtgccccctgcccctccatccaagaggcactgccgctcactctcagtgcccgtggacctgtctcgctggcagccggtgtggcggcccgccccctccaagctgtggactcccataaagcaccggggcagtggtggagggggtgggccgcaggtgcctcaccagagccccccaaagcgggtctccagcctcaggttcctccaagctcccagtgcctcttctcaatgtgccccagctcacagaccctacagccctcctttcttcagcctggccctggcccaagattcctctcgaccctgcgccgcctcccctcaaagtggctcctgggagagtgatgctgagtccttgtcaccttgcccacctcagcgccgcttctccctgtcacccagtctgggcccgcaggcaagccgcttcttgccctctgcccggagctctcccgcatcctccccagagctgccctggcgacctcgaggtctccgcaaccttccccgaagccgctcacagccttgtgatctggatgcccgcaaaactggggtcaagcggcgccacgaggaagacccccggcgtctgcggccttcgttggactttgacaagatgaatcagaaaccatactcaggaggtctttgtctccaagaaacagcccgggaaggcagcagcatctctccaccatggttcatggcctgtagccccccacccctctctgcttcctgcagccccactgggggttcctcccaggtgctgagtgaaagcgaagaggaggaggagggggctgtgcggtggggtcggcaggcgctgagcaagcggacactgtgccagcgggactttggggacctggacttgaatttgattgaggaaaactaaaactgagaggctacttcctggggccacacagactgactctctcatggctactaacaagtgtcgagtccccaaggctgggggccgagcctgggaatgggggtgagtggagggctccgactcagggcagctggaaatcttctcgctccagcaagctcgaccatgccaagagactggccgggacaagataaacggagctggtggcgggagggacagccccagagcagacccttcctatggcggccctgagtgtgagtatccctgccaccaagagagcaatgggcagggaaggaaggggtctgccgaccccagctcggggaatttcactagcccctttgcttcaaagggcacttgtgtcttagaatttggccagggtggggggttgagtcagcctcctcagagaaactgcgtgagagtgtgtgcgtgcatgggagtgtacttgtggaaaggtgtgtttgcgtagccttagggaaggaaggcaattgctccttaacagcagagtatcatgatacccccaggatcttgagttttttacaggatgttgggtttgctcaaggagtcaagaggagggcaccaattccattactttcagtctggaaaactaagctagtcagaactgtcatcttgcttcccaatctaagaacctgtggccctggaacacttttcaagaattggttcattttgctttacacagtagatctgttccaacagttctgtgtaaaccaaatgctatttttcaatgcatttggactgctgaccatttaaaagcagcctatgattgcttctttttgtaaagcaagcaacctccctccactttagctgttttgactatttgaattttcacatattgggcttacccagagtggagcacacctccagggcatgtggctgacactgggtcaatgtctgcatctgtgctgtgtgtgtagtgtggttggccagtaggtgagtatccctgtgtgtgtgagtgaagccactccccaggctggtgctctcctcctgtgcccagtgactgcccagtggcagctcagctgcccttcactcccacctgctgccaaagtccctgtgctaatgggattacaaatacaaaaagtggaaaaaaattttcgtaaactttgttttatattaaaagaaaaatccataagtctgtgtgtgttaaacatgaggttctgcctctgtggctgtgtttgaaaaaataaagttttattagaataatccattttcccaagcaa

SEQ ID NO: 12063 - protein, 392 aa, Homo sapiens; identical to SEQ ID NO: 1157

SEQ ID NO: 12064 - DNA, 4143 bp, Homo sapiens
agagctgctccggccgcggccctgggagctggaggaaccgcgactcagcaggcatgactggagagggaagtcccaatggtgctagaatggtgctgcagtggcagaagacggctcacaagtgaggtctggaagaacaacagggaagacatccatcatttgctccaaagtgtgcaagtcaaatcctggggagaatcatgataaccctgatcactgagcagctacagaagcagactctggatgagctgaaatgcacacgcttcagcatcagtctgcctttgcctgatcatgcagacatctccaactgtgggaactctttccagcttgtgtctgaaggtgcttcctggaggggcctgccccactgttcctgtgctgagttccaggacagcctcaacttcagctaccatccctcaggcctgagcctgcacctcagaccacccagtcggggaaactcccccaaggagcagcccttctcccaagtcctaagacctgagcccccagatccagagaagcttcctgtgccccctgcccctccatccaagaggcactgccgctcactctcagtgcccgtggacctgtctcgctggcagccggtgtggcggcccgccccctccaagctgtggactcccataaagcaccggggcagtggtggagggggtgggccgcaggtgcctcaccagagccccccaaagcgggtctccagcctcaggttcctccaagctcccagtgcctcttctcaatgtgccccagctcacagaccctacagccctcctttcttcagcctggccctggcccaagattcctctcgaccctgcgccgcctcccctcaaagtggctcctgggagagtgatgctgagtccttgtcaccttgcccacctcagcgccgcttctccctgtcacccagtctgggcccgcaggcaagccgcttcttgccctctgcccggagctctcccgcatcctccccagagctgccctggcgacctcgaggtctccgcaaccttccccgaagccgctcacagccttgtgatctggatgcccgcaaaactggggtcaagcggcgccacgaggaagacccccggcgtctgcggccttcgttggactttgacaagatgaatcagaaaccatactcaggaggtctttgtctccaagaaacagcccgggaaggcagcagcatctctccaccatggttcatggcctgtagccccccacccctctctgcttcctgcagccccactgggggttcctcccaggtgctgagtgaaagcgaagaggaggaggagggggctgtgcggtggggtcggcaggcgctgagcaagcggacactgtgccagcgggactttggggacctggacttgaatttgattgaggaaaactaaaactgagaggctacttcctggggccacacagactgactctctcatggctactaacaagtgtcgagtccccaaggctgggggccgagcctgggaatgggggtgagtggagggctccgactcagggcagctggaaatcttctcgctccagcaagctcgaccatgccaagagactggccgggacaagataaacggagctggtggcgggagggacagccccagagcagacccttcctatggcggccctgagtgtgagtatccctgccaccaagagagcaatgggcagggaaggaaggggtctgccgaccccagctcggggaatttcactagcccctttgcttcaaagggcacttgtgtcttagaatttggccagggtggggggttgagtcagcctcctcagagaaactgcgtgagagtgtgtgcgtgcatgggagtgtacttgtggaaaggtgtgtttgcgtagccttagggaaggaaggcaattgctccttaacagcagagtatcatgatacccccaggatcttgagttttttacaggatgttgggtttgctcaaggagtcaagaggagggcaccaagttttccttttttctaaatagctctggaaccaggcttgtaatccatagcatcaccgactctgcaaaggatttcattttggggtacagcagggtgttttaagtgctgtgacttcagctaatgatcttttcttcagccccaccccctccccactagctcgatctagtatattggggaatgcaggtggggggtgtcaccatattttttctgagctggcctttttttctcatcagattgtccaggctatattccacctgcctcttttgccctcttgagtagagttgcacacagcacatgggcaactgaagcagggttgaggggctctctctctctctcctctgctgatgggacccttttcccctcaccctctgcccttctaagtcatagactaggtaggaaggccctatattggtccccagcatctactgaggcagacctgcaacagaagtggcattcagtccccagcagacatgggtgagctcaccccagcactgctgttgggaaggtgactgcaggaaaccaattcttacaagatccaggcccagcctttttgacctgcttgagagggaagaaggggtgtttagcatttaatagtttgcttgtcttccactcctgccaggaagtgtttatttgcctctaattgggcctgagagaccatagggaggttggggctcactgagggattggctgaggatgtataaagcaaaggctgtgagaagcagttgggagtttggttgtcattggattgaatttacttttttgtttctcacccgcaacttgagccaggacagctggtccaagtggccacagtgatgggtttaagtaccttggtagggctggcaccagtggaaacacatactgaagctgccaccacaatagcttgtgaggttttatccagctgtggttagaccctgcatgaccaaatttgacctgcccttgtttatggcaagaagggcatttttctcttcaatttccagggtttcctaggacccagttcctcatgtaagggaggaagaccaaggtctttgtgttttcttcctcatggaattgaacctgacattttctggatctcctgcatgtcaggagcatcagtgaggcttcagcctcctcgtctccactccagagaggaggtggctatgtcttcttaagcctctggccctcagaggctcctccctatctcctggctagttaccactaggctaccaggtctctaggggcctgagagaggccctctagagaatccagggaaactgtgagcccaggagttgcccatctatggtttcattcctcccctggctcttctccctcttcaggccataatttccctggtgccaatttcttttcctcctggggcatcctcatcccagggctctctgctgtagattggctgtgccagcttccaacaggttactggcaatgccagtgagtttctgtaggccctaagctgaagaagtgaggcagtgattctgcctccatcctggtttccccaaagccccagggcaccatccttaggggagaaggtctacagttatcattattttaattccattactttcagtctggaaaactaagctagtcagaactgtcatcttgcttcccaatctaagaacctgtggccctggaacacttttcaagaattggttcattttgctttacacagtagatctgttccaacagttctgtgtaaaccaaatgctatttttcaatgcatttggactgctgaccatttaaaagcagcctatgattgcttctttttgtaaagcaagcaacctccctccactttagctgttttgactatttgaattttcacatattgggcttacccagagtggagcacacctccagggcatgtggctgacactgggtcaatgtctgcatctgtgctgtgtgtgtagtgtggttggccagtaggtgagtatccctgtgtgtgtgagtgaagccactccccaggctggtgctctcctcctgtgcccagtgactgcccagtggcagctcagctgcccttcactcccacctgctgccaaagtccctgtgctaatgggattacaaatacaaaaagtggaaaaaaattttcgtaaactttgttttatattaaaagaaaaatccataagtctgtgtgtgttaaacatgaggttctgcctctgtggctgtgtttgaaaaaataaagttttattagaataatccattttcccaagcaa

SEQ ID NO: 12065 - protein, 392 aa, Homo sapiens; identical to SEQ ID NO: 1157

SEQ ID NO: 12066 - DNA, 3284 bp, Homo sapiens
agagctgctccggccgcggccctgggagctggaggaaccgcgtctgggcccgcaggcaagccgcttcttgccctctgcccggagctctcccgcatcctccccagagctgccctggcgacctcgaggtctccgcaaccttccccgaagccgctcacagccttgtgatctggatgcccgcaaaactggggtcaagcggcgccacgaggaagacccccggcgtctgcggccttcgttggactttgacaagatgaatcagaaaccatactcaggaggtctttgtctccaagaaacagcccgggaaggcagcagcatctctccaccatggttcatggcctgtagccccccacccctctctgcttcctgcagccccactgggggttcctcccaggtgctgagtgaaagcgaagaggaggaggagggggctgtgcggtggggtcggcaggcgctgagcaagcggacactgtgccagcgggactttggggacctggacttgaatttgattgaggaaaactaaaactgagaggctacttcctggggccacacagactgactctctcatggctactaacaagtgtcgagtccccaaggctgggggccgagcctgggaatgggggtgagtggagggctccgactcagggcagctggaaatcttctcgctccagcaagctcgaccatgccaagagactggccgggacaagataaacggagctggtggcgggagggacagccccagagcagacccttcctatggcggccctgagtgtgagtatccctgccaccaagagagcaatgggcagggaaggaaggggtctgccgaccccagctcggggaatttcactagcccctttgcttcaaagggcacttgtgtcttagaatttggccagggtggggggttgagtcagcctcctcagagaaactgcgtgagagtgtgtgcgtgcatgggagtgtacttgtggaaaggtgtgtttgcgtagccttagggaaggaaggcaattgctccttaacagcagagtatcatgatacccccaggatcttgagttttttacaggatgttgggtttgctcaaggagtcaagaggagggcaccaagttttccttttttctaaatagctctggaaccaggcttgtaatccatagcatcaccgactctgcaaaggatttcattttggggtacagcagggtgttttaagtgctgtgacttcagctaatgatcttttcttcagccccaccccctccccactagctcgatctagtatattggggaatgcaggtggggggtgtcaccatattttttctgagctggcctttttttctcatcagattgtccaggctatattccacctgcctcttttgccctcttgagtagagttgcacacagcacatgggcaactgaagcagggttgaggggctctctctctctctcctctgctgatgggacccttttcccctcaccctctgcccttctaagtcatagactaggtaggaaggccctatattggtccccagcatctactgaggcagacctgcaacagaagtggcattcagtccccagcagacatgggtgagctcaccccagcactgctgttgggaaggtgactgcaggaaaccaattcttacaagatccaggcccagcctttttgacctgcttgagagggaagaaggggtgtttagcatttaatagtttgcttgtcttccactcctgccaggaagtgtttatttgcctctaattgggcctgagagaccatagggaggttggggctcactgagggattggctgaggatgtataaagcaaaggctgtgagaagcagttgggagtttggttgtcattggattgaatttacttttttgtttctcacccgcaacttgagccaggacagctggtccaagtggccacagtgatgggtttaagtaccttggtagggctggcaccagtggaaacacatactgaagctgccaccacaatagcttgtgaggttttatccagctgtggttagaccctgcatgaccaaatttgacctgcccttgtttatggcaagaagggcatttttctcttcaatttccagggtttcctaggacccagttcctcatgtaagggaggaagaccaaggtctttgtgttttcttcctcatggaattgaacctgacattttctggatctcctgcatgtcaggagcatcagtgaggcttcagcctcctcgtctccactccagagaggaggtggctatgtcttcttaagcctctggccctcagaggctcctccctatctcctggctagttaccactaggctaccaggtctctaggggcctgagagaggccctctagagaatccagggaaactgtgagcccaggagttgcccatctatggtttcattcctcccctggctcttctccctcttcaggccataatttccctggtgccaatttcttttcctcctggggcatcctcatcccagggctctctgctgtagattggctgtgccagcttccaacaggttactggcaatgccagtgagtttctgtaggccctaagctgaagaagtgaggcagtgattctgcctccatcctggtttccccaaagccccagggcaccatccttaggggagaaggtctacagttatcattattttaattccattactttcagtctggaaaactaagctagtcagaactgtcatcttgcttcccaatctaagaacctgtggccctggaacacttttcaagaattggttcattttgctttacacagtagatctgttccaacagttctgtgtaaaccaaatgctatttttcaatgcatttggactgctgaccatttaaaagcagcctatgattgcttctttttgtaaagcaagcaacctccctccactttagctgttttgactatttgaattttcacatattgggcttacccagagtggagcacacctccagggcatgtggctgacactgggtcaatgtctgcatctgtgctgtgtgtgtagtgtggttggccagtaggtgagtatccctgtgtgtgtgagtgaagccactccccaggctggtgctctcctcctgtgcccagtgactgcccagtggcagctcagctgcccttcactcccacctgctgccaaagtccctgtgctaatgggattacaaatacaaaaagtggaaaaaaattttcgtaaactttgttttatattaaaagaaaaatccataagtctgtgtgtgttaaacatgaggttctgcctctgtggctgtgtttgaaaaaataaagttttattagaataatccattttcccaagcaa

SEQ ID NO: 12067 - protein, 88 aa, Homo sapiens
MNQKPYSGGLCLQETAREGSSISPPWFMACSPPPLSASCSPTGGSSQVLSESEEEEEGAVRWGRQALSKRTLCQRDFGDLDLNLIEEN

SEQ ID NO: 12068 - DNA, 3572 bp, Homo sapiens
agagctgctccggccgcggccctgggagctggaggaaccgcgactcagcaggcatgactggagagggaagtcccaatggtgctagaatggtgctgcagtggcagaagacggctcacaagtgaggtctggaagaacaacagggaagacatccatcatttgctccaaagtgtgcaagtcaaatcctggggagaatcatgataaccctgatcactgagcagctacagaagcagactctggatgagctgaaatgcacacgcttcagcatcagtctgcctttgcctgatcatgcagacatctccaactgtgggaactctttccagcttgtgtctgtctgggcccgcaggcaagccgcttcttgccctctgcccggagctctcccgcatcctccccagagctgccctggcgacctcgaggtctccgcaaccttccccgaagccgctcacagccttgtgatctggatgcccgcaaaactggggtcaagcggcgccacgaggaagacccccggcgtctgcggccttcgttggactttgacaagatgaatcagaaaccatactcaggaggtctttgtctccaagaaacagcccgggaaggcagcagcatctctccaccatggttcatggcctgtagccccccacccctctctgcttcctgcagccccactgggggttcctcccaggtgctgagtgaaagcgaagaggaggaggagggggctgtgcggtggggtcggcaggcgctgagcaagcggacactgtgccagcgggactttggggacctggacttgaatttgattgaggaaaactaaaactgagaggctacttcctggggccacacagactgactctctcatggctactaacaagtgtcgagtccccaaggctgggggccgagcctgggaatgggggtgagtggagggctccgactcagggcagctggaaatcttctcgctccagcaagctcgaccatgccaagagactggccgggacaagataaacggagctggtggcgggagggacagccccagagcagacccttcctatggcggccctgagtgtgagtatccctgccaccaagagagcaatgggcagggaaggaaggggtctgccgaccccagctcggggaatttcactagcccctttgcttcaaagggcacttgtgtcttagaatttggccagggtggggggttgagtcagcctcctcagagaaactgcgtgagagtgtgtgcgtgcatgggagtgtacttgtggaaaggtgtgtttgcgtagccttagggaaggaaggcaattgctccttaacagcagagtatcatgatacccccaggatcttgagttttttacaggatgttgggtttgctcaaggagtcaagaggagggcaccaagttttccttttttctaaatagctctggaaccaggcttgtaatccatagcatcaccgactctgcaaaggatttcattttggggtacagcagggtgttttaagtgctgtgacttcagctaatgatcttttcttcagccccaccccctccccactagctcgatctagtatattggggaatgcaggtggggggtgtcaccatattttttctgagctggcctttttttctcatcagattgtccaggctatattccacctgcctcttttgccctcttgagtagagttgcacacagcacatgggcaactgaagcagggttgaggggctctctctctctctcctctgctgatgggacccttttcccctcaccctctgcccttctaagtcatagactaggtaggaaggccctatattggtccccagcatctactgaggcagacctgcaacagaagtggcattcagtccccagcagacatgggtgagctcaccccagcactgctgttgggaaggtgactgcaggaaaccaattcttacaagatccaggcccagcctttttgacctgcttgagagggaagaaggggtgtttagcatttaatagtttgcttgtcttccactcctgccaggaagtgtttatttgcctctaattgggcctgagagaccatagggaggttggggctcactgagggattggctgaggatgtataaagcaaaggctgtgagaagcagttgggagtttggttgtcattggattgaatttacttttttgtttctcacccgcaacttgagccaggacagctggtccaagtggccacagtgatgggtttaagtaccttggtagggctggcaccagtggaaacacatactgaagctgccaccacaatagcttgtgaggttttatccagctgtggttagaccctgcatgaccaaatttgacctgcccttgtttatggcaagaagggcatttttctcttcaatttccagggtttcctaggacccagttcctcatgtaagggaggaagaccaaggtctttgtgttttcttcctcatggaattgaacctgacattttctggatctcctgcatgtcaggagcatcagtgaggcttcagcctcctcgtctccactccagagaggaggtggctatgtcttcttaagcctctggccctcagaggctcctccctatctcctggctagttaccactaggctaccaggtctctaggggcctgagagaggccctctagagaatccagggaaactgtgagcccaggagttgcccatctatggtttcattcctcccctggctcttctccctcttcaggccataatttccctggtgccaatttcttttcctcctggggcatcctcatcccagggctctctgctgtagattggctgtgccagcttccaacaggttactggcaatgccagtgagtttctgtaggccctaagctgaagaagtgaggcagtgattctgcctccatcctggtttccccaaagccccagggcaccatccttaggggagaaggtctacagttatcattattttaattccattactttcagtctggaaaactaagctagtcagaactgtcatcttgcttcccaatctaagaacctgtggccctggaacacttttcaagaattggttcattttgctttacacagtagatctgttccaacagttctgtgtaaaccaaatgctatttttcaatgcatttggactgctgaccatttaaaagcagcctatgattgcttctttttgtaaagcaagcaacctccctccactttagctgttttgactatttgaattttcacatattgggcttacccagagtggagcacacctccagggcatgtggctgacactgggtcaatgtctgcatctgtgctgtgtgtgtagtgtggttggccagtaggtgagtatccctgtgtgtgtgagtgaagccactccccaggctggtgctctcctcctgtgcccagtgactgcccagtggcagctcagctgcccttcactcccacctgctgccaaagtccctgtgctaatgggattacaaatacaaaaagtggaaaaaaattttcgtaaactttgttttatattaaaagaaaaatccataagtctgtgtgtgttaaacatgaggttctgcctctgtggctgtgtttgaaaaaataaagttttattagaataatccattttcccaagcaa

SEQ ID NO: 12069 - protein, 114 aa, Homo sapiens; identical to SEQ ID NO: 12061

SEQ ID NO: 12070 - DNA, 1476 bp, Homo sapiens
gagtgctaagtcccagaccctccccatcccctgcgtcctgagttcgcttcccgcggccagatgatggaacctagtgggaagaggcgaacgacagcccccctgagcgagccctggcgcacccccccccccgccccggggaccagcggacgccccatgccccaccccgcggggacaggcagggcaacagagggagaggttgaagattggagggggaaagcctggactgagagttaggtctggtggggttgctgagagggcctagcggcctgctgctctgtgaagggctgagccccgtgccagttgttaaactgagaagttttaacttgtttagtgaatattcagggctgtctctacccttcagatacacaaaatggaaggggaaggaaggcggcaagagagggcttcttacacttttttcaatgcctgcttgagaaagaggaggcccctcgcggagctggtttgccttcttttgtgtcctggtttgattccttatggcttccgttctgttccccctcgcagcctggcctgttttaggaaactcaggctgagagtatcagttgcgtggtggtagttgcattgttccaattaccactgtgtgtggccacatcccaacaattaaaatgcagaaaaacacaaattcactgtcttgacttgatcctagaggtggctgggagtttgctgtttgtccaaatgcctcatgaaaagctggagagtttgcttcattccctgctcctcatagctggttagcctgaggcctggggtctctagggtaaaatcctgcacttaggttccctctctggttgatctttgagggcagcagagttaagaaaccaagagcagaagtgatataagctttagcttctcccgtaagaatataggggaagcagctgaagagagctccccggaagctagaattttgttcagggtggtaataattatgcatgaaaatgatagttaactgtaatgatgattgacttctcttgcacctttcttccagagaactccaggtacatccaggtttatctctttgctcttccttgtgccctccttctaaggtgtgagtggggtagagataattcctcttttttgtagagtgatctgcccccaaggtcacagaaggaagagccctcttgggcttttcttagtgtgcaggtgagggaggatggtattcagccagagagatggaccctattgccttcttcatcttattgatttcattacttctgacattctgaggccttgaagattcacaaacgggaacgagaaatggtagtctgtgtggactcctgatttttataggtcagatggtacattttgtacattttaatatgttatattgttcctgtgacaggttaagattattctgcccactttacatatgggtaaactgaggccaaggagtattaaatgatttgtcaaaactcttagcaaattggattaataattagatttcttgatgatttgttctcttgacta

SEQ ID NO: 12071 - protein, 57 aa, Homo sapiens [sequence omitted]

SEQ ID NO: 12072 - DNA, 646 bp, Homo sapiens
gtatcatgatacccccaccctggccaaattctaagacacaagtgccctttgaagcaaaggggctagtgaaattccccgagctggggtcggcagaccccttccttccctgcccattgctctcttggtggcagggatactcacactcagggccgccataggaagggtctgctctggggctgtccctcccgccaccagctccgtttatcttgtcccggccagtctcttggcatggtcgagcttgctggagcgagaagatttccagctgccctgagtcggagccctccactcacccccattcccaggctcggcccccagccttggggactcgacacttgttagtagccatgagagagtcagtctgtgtggccccaggaagtagcctctcagttttagttttcctcaatcaaattcaagtccaggtccccaaagtcccgctggcacagtgtccgcttgctcagcgcctgccgaccccaccgcacagccccctcctcctcctcttcgctttcactcagcacctgggaggaacccccagtggggctgcaggaagcagagaggggtggggggctacaggccatgaaccatggtggagagatgctgctgccttcccgggctgtttcttggagacaaagacctcctgagtatggtt

SEQ ID NO: 12073 - protein, 50 aa, Homo sapiens [sequence omitted]

SEQ ID NO: 12074 - DNA, 499 bp, Homo sapiens
cccaaggctgggggccgagcctgggaatgggggtgagtggagggctccgactcagggcagctggaaatcttctccctccactttagctgttttgactatttgaattttcacatattgggcttacccagagtggagcacacctccagggcatgtggctgacactgggtcaatgtctgcatctgtgctgtgtgtgtagtgtggttggccagtaggtgagtatccctgtgtgtgtgagtgaagccactccccaggctggtgctctcctcctgtgcccagtgactgcccagtggcagctcagctgcccttcactcccacctgctgccaaagtccctgtgctaatgggattacaaatacaaaaagtggaaaaaaattttcgtaaactttgttttatattaaaagaaaaatccataagtctgtgtgtgttaaacatgaggttctgcctctgtggctgtgtttgaaaaaataaagttttattagaataatccattttcccaagcaa

SEQ ID NO: 12075 - protein, 39 aa, Homo sapiens
MGLQIQKVEKNFRKLCFILKEKSISLCVLNMRFCLCGCV

SEQ ID NO: 12076 - DNA, 6819 bp, Homo sapiens
gcggggcccaggctgcggctccgctcccggccacggggggcgctgcgctgcgccggtggttggtggtggctgttggggggggtgggggggaacggcggccgcgggtggtgcggagggaggccttgcgggcggatcgggcgcttggcggcggaggtggtgggaggcggcgggcgggagcgcgggtcaggccggccccggcgatggcggacgcggcggcctccccggtgggcaagcggctgctgctgctgttcgcggacactgcggcctcagcctcggcctcggctcccgcggcggcagcggcgagcggagatccggggcctgcgctgcgcactcgagcctggcgggccggcacggtgcgggccatgagcggggcggtgccccaggacctagcgatctttgtagaatttgatggctgtaactggaagcaacactcctgggtaaaagttcatgctgaggaagttatcgtgcttctgctggaagggtctcttgtatgggcgccccgtgaggacccagtccttctccagggcattcgagtctccattgcacaatggccagccctgacttttactccccttgtagataaactgggtttgggttctgtggttccagtggaatatcttctggatcgagagcttcggttcctgtcagatgccaatgggttgcatctgtttcagatgggaacagatagccaaaaccagattcttttggaacatgctgcactgagagaaacagttaatgctttgatcagtgaccaaaagctacaagagatattcagccgaggtccctacagtgttcaaggtcacagggtcaaaatatatcagccagagggggaagaagggtggctctatggtgttgtgagccatcaggactccatcactcgtcttatggaggtgtctgtaactgagagtggtgagatcaagtcggtagatcccagactaatccatgtgatgctgatggataattcagcgcctcaaagcgaggggggtacgttaaaagcagtaaaatcttccaaaggaaagaagaagagagaaagcatagaggggaaagatggccggaggaggaaaagtgcttcggactctgggtgtgaccctgcatcaaagaaattaaaaggagacaggggtgaagtagacagtaatgggagcgatggaggtgaggcaagccgagggccctggaaaggagggaatgccagtggagagccagggctggatcagagagccaagcagccaccgtctacatttgtcccccagataaaccgcaacattcgctttgccacttacaccaaagaaaacggcaggactctggtggtgcaggatgagcctgtaggtggggacacacctgcatctttcactccatattctacagccacaggtcagacacctttggccccagaggtgggtggagccgaaaacaaagaggcaggaaaaacactggaacaagttggccagggcatagtggcttccgcagctgtggtcactaccgccagctccaccccaaacacagtgaggatctcagacactggccttgcagcagggactgtgccagaaaaacagaaaggcagccggtcgcaggcctcgggagagaattcaagaaattctattctggcctcttctggatttggagcacctctccctagttcatcgcaacctttgacttttggaagtggaaggagccagtccaatggtgttctagccacagagaacaaacctttgggcttctcttttggctgtagctctgcacaagaggcacagaaagacactgatctctccaaaaacttgttttttcaatgcatgtcccaaactttacctaccagtaactacttcactactgtttcagagagtttggctgatgattcttctagtcgggactcattcaaacaaagccttgagagcctgagctcaggcctgtgtaaaggcagatccgttcttggaacagacactaagccaggctctaaggctggcagctctgtggaccggaaagtgcctgcagagtccatgcccaccctcactccagccttcccacggagcctcctaaatgcccgtaccccagagaatcatgaaaatctatttttacagccccccaaattgtcccgagaagagccttctaatcctttcctggcatttgtggagaaagttgaacacagccctttcagtagttttgcatctcaggcatcaggtagctcctcttctgctaccactgtcacctccaaggtggcacccagctggcccgagtctcactcctctgcagattcggcatctttagcaaagaagaaacccctcttcattacaactgactcctccaagctagtatctggtgttctgggctcagctcttaccagtgggggcccaagcctctctgccatggggaatggccgctccagctcgcccaccagcagcctcactcagcccattgagatgccaactctctcctctagccccacagaggagaggccaactgtggggcctgggcagcaggacaatcccctcctcaaaacctttagtaacgtctttggcaggcactcaggcggctttctgtcctccccggcagatttttcacaggagaacaaagctccttttgaagctgtgaaaaggttctcactggatgaacgaagcttggcttgcagacaagactcggactccagcaccaacagtgacctgtcagatttgagtgactctgaggagcagctgcaggctaagacaggcctgaagggaattccagagcacctgatggggaagctgggccccaatggggagcgcagtgctgagctgttgctgggcaaaagcaaagggaagcaggcccccaagggccggcctcggactgcccccctgaaagttggccagtcagtgctgaaagatgtaagcaaagtgaagaagctgaagcaatctggagagcccttcctgcaggatgggtcatgcatcaatgtggcacctcatctgcacaagtgtcgtgaatgccgcctggagcggtaccggaagtttaaggaacaggagcaagatgattctactgtagcctgccgtttctttcacttccggaggttgatcttcactcgaaaaggggtactccgtgtggaggggtttttaagcccccagcaaagtgaccctgatgccatgaacctgtggattccctcttcctccctagcagaagggatagatctagagacctcaaaatacatcctggccaatgttggggaccagttctgccagctcgtaatgtctgagaaggaggccatgatgatggtggagccacaccagaaagtggcatggaagcgagctgtgcgtggtgtacgggagatgtgtgatgtgtgtgaaacaactctcttcaacatccactgggtttgtcgcaaatgtggatttggggtctgccttgactgttaccggctcaggaaaagccggccacgcagtgagacagaagagatgggtgatgaagaagttttctcctggttgaagtgtgcaaagggacagtcccacgaaccagagaatctcatgcccacacaaattattcctggcacagctctttacaatattggagacatggtacatgctgcccggggcaagtggggaattaaagcaaactgcccttgtatcagtcgacagaacaaatctgtattgagacctgccgtcaccaatgggatgtcacagcttcctagcataaaccctagtgcctcttctggaaacgaaactaccttctctggtggaggaggaccggcaccagtaacaactccagagccggaccatgttcccaaagccgacagcactgacatcagatctgaagagcctctgaaaacagacagttcggcatcaaatagcaatagtgaactgaaagccatcaggcctccttgccctgacacggccccaccctcctccgccctgcactggttggcagatttagcaactcagaaggctaaagaagaaacaaaagaagcagggtccctgaggtcggtgctcaataaagagtctcattcaccctttgggctggactcgttcaactccactgcaaaggtctctccgctgactccaaagctttttaacagtctgttgctgggtcccactgcctccaacaacaaaaccgaagggtctagccttcgagacctccttcactccgggccgggaaaacttcctcaaacccccttggacacaggcataccctttcccccggtcttctctacatcctcagcaggagtgaagagcaaggccagcctacccaactttcttgaccacatcattgcctcagtggtagaaaataagaaaacctcagatgcttcaaagcgggcctgcaacttgactgatacccagaaggaagtgaaggagatggtgatggggttaaatgtgctagatccccatacttctcactcctggctttgtgatgggaggcttctgtgtctccatgaccccagcaacaaaaacaattggaagatcttccgggagtgttggaagcaaggtcagccagtgctggtttcgggggtacataaaaagctcaagtctgagctctggaagccagaagcctttagccaggaatttggagaccaggatgtagacttggtgaactgcaggaactgtgctataatttccgatgtgaaagttcgggatttctgggatggtttcgagatcatatgcaaacgactacggtcagaagatgggcagccaatggtgctcaaactcaaggactggcctcctggggaagattttcgagacatgatgccaaccaggtttgaagatctgatggagaaccttcctctgccagaatataccaaacgagatggcaggctcaatctggcctctaggctacctagctactttgtaaggcctgatctgggccccaagatgtacaacgcctatgggttgataacagcagaagatagaagagttggtacaacaaatcttcacttagatgtgtctgatgctgttaatgtgatggtgtatgttgggattcccatcggggagggtgctcatgatgaagaggtactcaagacaattgacgagggagatgccgatgaggtgacgaagcagaggattcatgatggaaaagagaagccaggtgctttatggcacatctatgcagccaaggatgcagagaagatccgggagctgctccgaaaggttggagaagaacaaggccaagagaacccccctgatcatgacccaattcatgaccaaagttggtacctggaccagaccctccgtaagcgactctatgaggagtatggcgtgcaaggctgggctattgtgcagttcctaggtgatgctgttttcatacctgctggagccccacaccaggttcacaatctatacagttgcataaaagtagcagaagactttgtatctccagaacatgtaaagcactgtttccgcctgactcaggaattcaggcatctctctaacactcatacaaatcatgaggataaactgcaggtgaagaacatcatttaccatgcagtgaaagatgcggttggcaccctcaaggctcatgaatccaaactggcaaggtcctaggcatggagaaactccaagctcctctgtgaagcaggtctttcactcacaacacttaacagggaacggcagggctctttgctggagcagaggcccttcacccagagccagtgtggtcagtattccaaactctccagccactctcttctacgctgcctcaacactgaaggttgacacaggaaagtcgtactgttcacacacacagtttgagactccaagccaagagtgccacatccctatcctgtggccttttggaaatccaaattgcctgaacatggcggggctttcctgcacattctcctgatttgagattcacgggcacacctttcttttcttttcctcttgtgcctagttaagtggaaatgtgtttggagataggggaaatcacataactggtacaagtatggggtaattgcttaaacatgcctggtggaagtctgatagcgtctctgcacgtgacctctgacaaagcccatcccaggagacggggtgaagctattccccacactctcctgtgaacactggagtcttgcaagacccagggagaacccactgcttttcccaggaggctccaggattaggaaatgtgtgtatttagtgaaaaataggtttgtagtgaaatagttactatttcatgaaagtagatatttttagaatttttgaaataccacagttgttttcctggattataaggaaaggcacattacatttagtcttcctttcgatataaaactctttgaagaaatatgatttttagaaatcagctacccattatagcacaaaatcagccaaagcagaatttttaaaaattggcttttttaggattctttttctccccctcccatcttagtcttaccttgagggaacagtcatatgagaaggaactttgtcacatctaagctgtggtgtgttccccatgtgtgtgtacaacactggtgactccaggaaccattttcacctattaccagtgttccctggggactcctcttaatgtttccaaatgggaaggacagttgatttccaacatgaggttttttgttttttatccagaaatattttcagcaaaactttccaactgagtggagtctgattaaggatttatttgaaaatggtgggattcattggcccataggtacattggaaaatgtatatctctccagctgtactgtagtgccctgcaggctgtttatatgttcacagttacttttttttttttttttaaataaaagtcatttaatgtagaatacttttaatttcactttctgtattttaattttgttgaagggctgattgggatttccatgttcttattaaaaatctaacaaatctgtttgga

SEQ ID NO: 12077 - protein, 1761 aa, Homo sapiens
MADAAASPVGKRLLLLFADTAASASASAPAAAAASGDPGPALRTRAWRAGTVRAMSGAVPQDLAIFVEFDGCNWKQHSWVKVHAEEVIVLLLEGSLVWAPREDPVLLQGIRVSIAQWPALTFTPLVDKLGLGSVVPVEYLLDRELRFLSDANGLHLFQMGTDSQNQILLEHAALRETVNALISDQKLQEIFSRGPYSVQGHRVKIYQPEGEEGWLYGVVSHQDSITRLMEVSVTESGEIKSVDPRLIHVMLMDNSAPQSEGGTLKAVKSSKGKKKRESIEGKDGRRRKSASDSGCDPASKKLKGDRGEVDSNGSDGGEASRGPWKGGNASGEPGLDQRAKQPPSTFVPQINRNIRFATYTKENGRTLVVQDEPVGGDTPASFTPYSTATGQTPLAPEVGGAENKEAGKTLEQVGQGIVASAAVVTTASSTPNTVRISDTGLAAGTVPEKQKGSRSQASGENSRNSILASSGFGAPLPSSSQPLTFGSGRSQSNGVLATENKPLGFSFGCSSAQEAQKDTDLSKNLFFQCMSQTLPTSNYFTTVSESLADDSSSRDSFKQSLESLSSGLCKGRSVLGTDTKPGSKAGSSVDRKVPAESMPTLTPAFPRSLLNARTPENHENLFLQPPKLSREEPSNPFLAFVEKVEHSPFSSFASQASGSSSSATTVTSKVAPSWPESHSSADSASLAKKKPLFITTDSSKLVSGVLGSALTSGGPSLSAMGNGRSSSPTSSLTQPIEMPTLSSSPTEERPTVGPGQQDNPLLKTFSNVFGRHSGGFLSSPADFSQENKAPFEAVKRFSLDERSLACRQDSDSSTNSDLSDLSDSEEQLQAKTGLKGIPEHLMGKLGPNGERSAELLLGKSKGKQAPKGRPRTAPLKVGQSVLKDVSKVKKLKQSGEPFLQDGSCINVAPHLHKCRECRLERYRKFKEQEQDDSTVACRFFHFRRLIFTRKGVLRVEGFLSPQQSDPDAMNLWIPSSSLAEGIDLETSKYILANVGDQFCQLVMSEKEAMMMVEPHQKVAWKRAVRGVREMCDVCETTLFNIHWVCRKCGFGVCLDCYRLRKSRPRSETEEMGDEEVFSWLKCAKGQSHEPENLMPTQIIPGTALYNIGDMVHAARGKWGIKANCPCISRQNKSVLRPAVTNGMSQLPSINPSASSGNETTFSGGGGPAPVTTPEPDHVPKADSTDIRSEEPLKTDSSASNSNSELKAIRPPCPDTAPPSSALHWLADLATQKAKEETKEAGSLRSVLNKESHSPFGLDSFNSTAKVSPLTPKLFNSLLLGPTASNNKTEGSSLRDLLHSGPGKLPQTPLDTGIPFPPVFSTSSAGVKSKASLPNFLDHIIASVVENKKTSDASKRACNLTDTQKEVKEMVMGLNVLDPHTSHSWLCDGRLLCLHDPSNKNNWKIFRECWKQGQPVLVSGVHKKLKSELWKPEAFSQEFGDQDVDLVNCRNCAIISDVKVRDFWDGFEIICKRLRSEDGQPMVLKLKDWPPGEDFRDMMPTRFEDLMENLPLPEYTKRDGRLNLASRLPSYFVRPDLGPKMYNAYGLITAEDRRVGTTNLHLDVSDAVNVMVYVGIPIGEGAHDEEVLKTIDEGDADEVTKQRIHDGKEKPGALWHIYAAKDAEKIRELLRKVGEEQGQENPPDHDPIHDQSWYLDQTLRKRLYEEYGVQGWAIVQFLGDAVFIPAGAPHQVHNLYSCIKVAEDFVSPEHVKHCFRLTQEFRHLSNTHTNHEDKLQVKNIIYHAVKDAVGTLKAHESKLARS

SEQ ID NO: 12078 - DNA, 3641 bp, Homo sapiens
aggtccctacagtgttcaaggtcacagggtcaaaatatatcagccagagggggaagaagggtggctctatggtgttgtgagccatcaggactccatcactcctcgtaatgtctgagaaggaggccatgatgatggtggagccacaccagaaagtggcatggaagcgagctgtgcgtggtgtacgggagatgtgtgatgtgtgtgaaacaactctcttcaacatccactgggtttgtcgcaaatgtggatttggggtctgccttgactgttaccggctcaggaaaagccggccacgcagtgagacagaagagatgggtgatgaagaagttttctcctggttgaagtgtgcaaagggacagtcccacgaaccagagaatctcatgcccacacaaattattcctggcacagctctttacaatattggagacatggtacatgctgcccggggcaagtggggaattaaagcaaactgcccttgtatcagtcgacagaacaaatctgtattgagacctgccgtcaccaatgggatgtcacagcttcctagcataaaccctagtgcctcttctggaaacgaaactaccttctctggtggaggaggaccggcaccagtaacaactccagagccggaccatgttcccaaagccgacagcactgacatcagatctgaagagcctctgaaaacagacagttcggcatcaaatagcaatagtgaactgaaagccatcaggcctccttgccctgacacggccccaccctcctccgccctgcactggttggcagatttagcaactcagaaggctaaagaagaaacaaaagaagcagggtccctgaggtcggtgctcaataaagagtctcattcaccctttgggctggactcgttcaactccactgcaaaggtctctccgctgactccaaagctttttaacagtctgttgctgggtcccactgcctccaacaacaaaaccgaagggtctagccttcgagacctccttcactccgggccgggaaaacttcctcaaacccccttggacacaggcataccctttcccccggtcttctctacatcctcagcaggagtgaagagcaaggccagcctacccaactttcttgaccacatcattgcctcagtggtagaaaataagaaaacctcagatgcttcaaagcgggcctgcaacttgactgatacccagaaggaagtgaaggagatggtgatggggttaaatgtgctagatccccatacttctcactcctggctttgtgatgggaggcttctgtgtctccatgaccccagcaacaaaaacaattggaagatcttccgggagtgttggaagcaaggtcagccagtgctggtttcgggggtacataaaaagctcaagtctgagctctggaagccagaagcctttagccaggaatttggagaccaggatgtagacttggtgaactgcaggaactgtgctataatttccgatgtgaaagttcgggatttctgggatggtttcgagatcatatgcaaacgactacggtcagaagatgggcagccaatggtgctcaaactcaaggactggcctcctggggaagattttcgagacatgatgccaaccaggtttgaagatctgatggagaaccttcctctgccagaatataccaaacgagatggcaggctcaatctggcctctaggctacctagctactttgtaaggcctgatctgggccccaagatgtacaacgcctatgggttgataacagcagaagatagaagagttggtacaacaaatcttcacttagatgtgtctgatgctgttaatgtgatggtgtatgttgggattcccatcggggagggtgctcatgatgaagaggtactcaagacaattgacgagggagatgccgatgaggtgacgaagcagaggattcatgatggaaaagagaagccaggtgctttatggcacatctatgcagccaaggatgcagagaagatccgggagctgctccgaaaggttggagaagaacaaggccaagagaacccccctgatcatgacccaattcatgaccaaagttggtacctggaccagaccctccgtaagcgactctatgaggagtatggcgtgcaaggctgggctattgtgcagttcctaggtgatgctgttttcatacctgctggagccccacaccaggttcacaatctatacagttgcataaaagtagcagaagactttgtatctccagaacatgtaaagcactgtttccgcctgactcaggaattcaggcatctctctaacactcatacaaatcatgaggataaactgcaggtgaagaacatcatttaccatgcagtgaaagatgcggttggcaccctcaaggctcatgaatccaaactggcaaggtcctaggcatggagaaactccaagctcctctgtgaagcaggtctttcactcacaacacttaacagggaacggcagggctctttgctggagcagaggcccttcacccagagccagtgtggtcagtattccaaactctccagccactctcttctacgctgcctcaacactgaaggttgacacaggaaagtcgtactgttcacacacacagtttgagactccaagccaagagtgccacatccctatcctgtggccttttggaaatccaaattgcctgaacatggcggggctttcctgcacattctcctgatttgagattcacgggcacacctttcttttcttttcctcttgtgcctagttaagtggaaatgtgtttggagataggggaaatcacataactggtacaagtatggggtaattgcttaaacatgcctggtggaagtctgatagcgtctctgcacgtgacctctgacaaagcccatcccaggagacggggtgaagctattccccacactctcctgtgaacactggagtcttgcaagacccagggagaacccactgcttttcccaggaggctccaggattaggaaatgtgtgtatttagtgaaaaataggtttgtagtgaaatagttactatttcatgaaagtagatatttttagaatttttgaaataccacagttgttttcctggattataaggaaaggcacattacatttagtcttcctttcgatataaaactctttgaagaaatatgatttttagaaatcagctacccattatagcacaaaatcagccaaagcagaatttttaaaaattggcttttttaggattctttttctccccctcccatcttagtcttaccttgagggaacagtcatatgagaaggaactttgtcacatctaagctgtggtgtgttccccatgtgtgtgtacaacactggtgactccaggaaccattttcacctattaccagtgttccctggggactcctcttaatgtttccaaatgggaaggacagttgatttccaacatgaggttttttgttttttatccagaaatattttcagcaaaactttccaactgagtggagtctgattaaggatttatttgaaaatggtgggattcattggcccataggtacattggaaaatgtatatctctccagctgtactgtagtgccctgcaggctgtttatatgttcacagttacttttttttttttttttaaataaaagtcatttaatgtagaatacttttaatttc

SEQ ID NO: 12079 - protein, 759 aa, Homo sapiens
MSEKEAMMMVEPHQKVAWKRAVRGVREMCDVCETTLFNIHWVCRKCGFGVCLDCYRLRKSRPRSETEEMGDEEVFSWLKCAKGQSHEPENLMPTQIIPGTALYNIGDMVHAARGKWGIKANCPCISRQNKSVLRPAVTNGMSQLPSINPSASSGNETTFSGGGGPAPVTTPEPDHVPKADSTDIRSEEPLKTDSSASNSNSELKAIRPPCPDTAPPSSALHWLADLATQKAKEETKEAGSLRSVLNKESHSPFGLDSFNSTAKVSPLTPKLFNSLLLGPTASNNKTEGSSLRDLLHSGPGKLPQTPLDTGIPFPPVFSTSSAGVKSKASLPNFLDHIIASVVENKKTSDASKRACNLTDTQKEVKEMVMGLNVLDPHTSHSWLCDGRLLCLHDPSNKNNWKIFRECWKQGQPVLVSGVHKKLKSELWKPEAFSQEFGDQDVDLVNCRNCAIISDVKVRDFWDGFEIICKRLRSEDGQPMVLKLKDWPPGEDFRDMMPTRFEDLMENLPLPEYTKRDGRLNLASRLPSYFVRPDLGPKMYNAYGLITAEDRRVGTTNLHLDVSDAVNVMVYVGIPIGEGAHDEEVLKTIDEGDADEVTKQRIHDGKEKPGALWHIYAAKDAEKIRELLRKVGEEQGQENPPDHDPIHDQSWYLDQTLRKRLYEEYGVQGWAIVQFLGDAVFIPAGAPHQVHNLYSCIKVAEDFVSPEHVKHCFRLTQEFRHLSNTHTNHEDKLQVKNIIYHAVKDAVGTLKAHESKLARS

SEQ ID NO: 12080 - DNA, 339 bp, Homo sapiens
ttctagtcgggactcattcaaacaaagccttgagagcctgagctcaggcctgtgtaaaggcagatccgttcttggaacagacactaagccaggctctaaggctggcagctctgtggaccggaaagtgcctgcagagtccatgcccacctgcactccagcctgggcaacagagcgagactccatctcaaaaaaaaaaaaaaaaaaaaagattagtctcctaggctgggcgcagtgccttacgcctgtaatcccagctactcagggagaatcgcttgaacccgggaggccaagatcatgccactgcactgcagcccgggtgacagagcaagactctgtctc

SEQ ID NO: 12081 - protein, 65 aa, Homo sapiens [sequence omitted]

SEQ ID NO: 12082 - DNA, 619 bp, Homo sapiens
gcactgacatcagatctgaagagcctctgaaaacagacagttcggcatcaaatagcaatatgctgggattataggcgtgagccaccattcccagccatatacaagacttttaacaagcttctgagatggttctgttatgcagccagggttgagagctagacttagagcagaagttttcactgggcacaagaatcatctggggaatggttaaaaatgcagattcctgtgtcccgcccagaactatgaaatcagaatctctgggggtaaagatctccatttttaacaagcactccaagtgacttcagtacaggtatcctgaagatacacttgaaacactgtcttaggaagtgagggagatgaaagatggatgacaacaaaagggagtttgaaattcagatctggtaaagaagtagtaggagagtttctccttggctgtgagacctcctataattatagcttgtaaggcttgacccaaacaaaccatacacagtttggggggtgcaagggaaaggagagaatctttcctccttcccatgtgactgatttttaggagtcagttgtgtgctgattattcctttttgtacctaatgctgttcctggttatgttcttacagaagca

SEQ ID NO: 12083 - protein, 31 aa, Homo sapiens
MTTKGSLKFRSGKEVVGEFLLGCETSYNYSL

SEQ ID NO: 12084 - DNA, 2347 bp, Homo sapiens
ataaataaaagcaaggagattactaaaaacacactttgcatcctcttgtttctaagctgtatagttctgtgttcttaaaaaggcagttgaaatttctgttaggtggtgatctggcattgatatctttagagaaaaatccttaagtgtgattttaagatggggcagagaaggggttggaggtaggtagtacttttctaggcaaatgttttaaggccacacaagttttttgatagtgtgataacactccctagtttaaaaactttagcaggtgcttgaggaaggggagctcatggcattgtcattttcaatatgaggaagtgttctcaaagttggacttgtcagatttttgtcctttcaccttaaaacaatggtaggtattagggcaacagaagtgatttccccagggtgagaatgaagcataacaatggagtagaagcatttcctttcactttagttgacatgtggaaatccatggattatacaactaggaaagaacagtagagcttcctggagaagaggaggccctcctcaggaaaccctcctattctgtctcagccctagagctggaagtttttcctagattgctctgattgggatatttttgtttccacagccagtgctggtttcgggggtacataaaaagctcaagtctgagctctggaagccagaagcctttagccaggaatttggagaccaggatgttggagaagaacaaggccaagagaacccccctgatcatgacccaattcatgaccaaagttggtacctggaccagaccctccgtaagcgactctatgaggagtatggcgtgcaaggctgggctattgtgcagttcctaggtgatgctgttttcatacctgctggagccccacaccaggttcacaatctatacagttgcataaaagtagcagaagactttgtatctccagaacatgtaaagcactgtttccgcctgactcaggaattcaggcatctctctaacactcatacaaatcatgaggataaactgcaggtgaagaacatcatttaccatgcagtgaaagatgcggttggcaccctcaaggctcatgaatccaaactggcaaggtcctaggcatggagaaactccaagctcctctgtgaagcaggtctttcactcacaacacttaacagggaacggcagggctctttgctggagcagaggcccttcacccagagccagtgtggtcagtattccaaactctccagccactctcttctacgctgcctcaacactgaaggttgacacaggaaagtcgtactgttcacacacacagtttgagactccaagccaagagtgccacatccctatcctgtggccttttggaaatccaaattgcctgaacatggcggggctttcctgcacattctcctgatttgagattcacgggcacacctttcttttcttttcctcttgtgcctagttaagtggaaatgtgtttggagataggggaaatcacataactggtacaagtatggggtaattgcttaaacatgcctggtggaagtctgatagcgtctctgcacgtgacctctgacaaagcccatcccaggagacggggtgaagctattccccacactctcctgtgaacactggagtcttgcaagacccagggagaacccactgcttttcccaggaggctccaggattaggaaatgtgtgtatttagtgaaaaataggtttgtagtgaaatagttactatttcatgaaagtagatatttttagaatttttgaaataccacagttgttttcctggattataaggaaaggcacattacatttagtcttcctttcgatataaaactctttgaagaaatatgatttttagaaatcagctacccattatagcacaaaatcagccaaagcagaatttttaaaaattggcttttttaggattctttttctccccctcccatcttagtcttaccttgagggaacagtcatatgagaaggaactttgtcacatctaagctgtggtgtgttccccatgtgtgtgtacaacactggtgactccaggaaccattttcacctattaccagtgttccctggggactcctcttaatgtttccaaatgggaaggacagttgatttccaacatgaggttttttgttttttatccagaaatattttcagcaaaactttccaactgagtggagtctgattaaggatttatttgaaaatggtgggattcattggcccataggtacattggaaaatgtatatctctccagctgtactgtagtgccctgcaggctgtttatatgttcacagttacttttttttttttttttaaataaaagtcatttaatgtagaatacttttaatttc

SEQ ID NO: 12085 - protein, 46 aa, Homo sapiens [sequence omitted]

SEQ ID NO: 12086 - DNA, 2426 bp, Homo sapiens
ataaataaaagcaaggagattactaaaaacacactttgcatcctcttgtttctaagctgtatagttctgtgttcttaaaaaggcagttgaaatttctgttaggtggtgatctggcattgatatctttagagaaaaatccttaagtgtgattttaagatggggcagagaaggggttggaggtaggtagtacttttctaggcaaatgttttaaggccacacaagttttttgatagtgtgataacactccctagtttaaaaactttagcaggtgcttgaggaaggggagctcatggcattgtcattttcaatatgaggaagtgttctcaaagttggacttgtcagatttttgtcctttcaccttaaaacaatggtaggtattagggcaacagaagtgatttccccagggtgagaatgaagcataacaatggagtagaagcatttcctttcactttagttgacatgtggaaatccatggattatacaactaggaaagaacagtagagcttcctggagaagaggaggccctcctcaggaaaccctcctattctgtctcagccctagagctggaagtttttcctagattgctctgattgggatatttttgtttccacagccagtgctggtttcgggggtacataaaaagctcaagtctgagctctggaagccagaagcctttagccaggaatttggagaccaggatgttggagaagaacaaggccaagagaacccccctgatcatgacccaattcatgaccaaagttggtacctggaccagaccctccgtaagcgactctatgaggagtatggcgtgcaaggctgggctattgtgcagttcctaggtgatgctgttttcatacctgctggagccccacaccaggttcacaatctatacagttgcataaaagtagcagaagactttgtatctccagaacatgtaaagcactgtttccgcctgactcaggaattcaggcatctctctaacactcatacaaatcatgaggataaactgcaggtgaagaacatcatttaccatgcagtgaaagatgcggttggcaccctcaaggctcatgaatccaaactggcaaggtcctaggcatggagaaactccaagctcctctgtgaagcaggtctttcactcacaacacttaacagggaacggcagggctctttgctggagcagaggcccttcacccagagccagtgtggtcagtattccaaactctccagccactctcttctacgctgcctcaacactgaaggttgacacaggaaagtcgtactgttcacacacacagtttgagactccaagccaagagtgccacatccctatcctgtggccttttggaaatccaaattgcctgaacatggcggggctttcctgcacattctcctgatttgagattcacgggcacacctttcttttcttttcctcttgtgcctagttaagtggaaatgtgtttggagataggggaaatcacataactggtacaagtatggggtaattgcttaaacatgcctggtggaagtctgatagcgtctctgcacgtgacctctgacaaagcccatcccaggagacggggtgaagctattccccacactctcctgtgaacactggagtcttgcaagacccagggagaacccactgcttttcccaggaggctccaggattaggaaatgtgtgtatttagtgaaaaataggtttgtagtgaaatagttactatttcatgaaagtagatatttttagaatttttgaaataccacagttgttttcctggattataaggaaaggcacattacatttagtcttcctttcgatataaaactctttgaagaaatatgatttttagaaatcagctacccattatagcacaaaatcagccaaagcagaatttttaaaaattggcttttttaggattctttttctccccctcccatcttagtcttaccttgagggaacagtcatatgagaaggaactttgtcacatctaagctgtggtgtgttccccatgtgtgtgtacaacactggtgactccaggaaccattttcacctattaccagtgttccctggggactcctcttaatgtttccaaatgggaaggacagttgatttccaacatgaggttttttgttttttatccagaaatattttcagcaaaactttccaactgagtggagtctgattaaggatttatttgaaaatggtgggattcattggcccataggtacattggaaaatgtatatctctccagctgtactgtagtgccctgcaggctgtttatatgttcacagttacttttttttttttttttaaataaaagtcatttaatgtagaatacttttaatttcactttctgtattttaattttgttgaagggctgattgggatttccatgttcttattaaaaatctaacaaatctgtttgga

SEQ ID NO: 12087 - protein, 46 aa, Homo sapiens [sequence omitted]

SEQ ID NO: 12088 - DNA, 1273 bp, Homo sapiens
gaaatcccaatcagcccttcaacaaaattaaaatacagaaagtgaaattaaaagtattctacattaaatgacttttatttaaaaaaaacattttcaaataaatccttaatcagactccactcagttggaaagttttgctgaaaatatttctggataaaaaacaaaaaacctcatgttggaaatcaactgtccttcccatttggaaacattaagaggagtccccagggaacactggtaataggtgaaaatggttcctggagtcaccagtgttgtacacacacatggggaacacaccacagcttagatgtgacaaagttccttctcatatgactgttccctcaaggtaagactaagatgggagggggagaaaaagaatcctaaaaaagccaatttttaaaaattctgctttggctgattttgtgctataatgggtagctgatttctaaaaatcatatttcttcaaagagttttatatcgaaaggaagactaaatgtaatgtgcctttccttataatccaggaaaacaactgtggtatttcaaaaattctaaaaatatctactttcatgaaatagtaactatttcactacaaacctatttttcactaaatacacacatttcctaatcctggagcctcctgggaaaagcagtgggttctccctgggtcttgcaagactccagtgttcacaggagagtgtggggaatagcttcaccccgtctcctgggatgggctttgtcagaggtcacgtgcagagacgctatcagacttccaccaggcatgtttaagcaattaccccatacttgtaccagttatgtgatttcccctatctccaaacacatttccacttaactaggcacaagaggaaaagaaaagaaaggtgtgcccgtgaatctcaaatcaggagaatgtgcaggaaagccccgccatgttcaggcaatttggatttccaaaaggccacaggatagggatgtggcactcttggcttggagtctcaaactgtgtgtgtgaacagtacgactttcctgtgtcaaccttcagtgttgaggcagcgtagaagagagtggctggagagtttggaatactgaccacactggctctgggtgaagggcctctgctccagcaaagagccctgccgttccctgttaagtgttgtgagtgaaagacctgcttcacagaggagcttggagtttctccatgcctaggaccttgccagtttggattcatgagccttgagggtgccaaccgcatctttcactgcatggtaaatgatgttct

SEQ ID NO: 12089 - protein, 42 aa, Homo sapiens
MFRQFGFPKGHRIGMWHSWLGVSNCVCEQYDFPVSTFSVEAA

SEQ ID NO: 12090 - DNA, 902 bp, Homo sapiens
cgcccacggcccgccgctgcggcagggacctcccctttaacggcggcgctgggcgctccgctgcccccgcggcggctgctgcagcggctgctgctgctactgcggctcctgctgccgccgccgccgccgctcggcctcaggcagctgcatcctcggccgggccgggtccccgccccgcgccgcgcccggccccgccatggtgtcctggatcatctctcgcctggtggtgctcatctttggcaccctgtacccagcctattcttcctacaaggccgtgaagacaaaaaacgtgaaggaatatgtgaaatggatgatgtactggatcgtctttgccttcttcaccacggccgagacgctcacggatatagtgctctcctggttccccttctactttgaactgaagatcgccttcgtgatatggctgctgtccccttacaccaagggctccagcgtgctctaccgcaagttcgtgcacccaacgctgtccaacaaggagaaggagatcgacgagtacatcacgcaggcccgagacaagagctatgagaccatgatgagggtgggcaagaggggcctgaaccttgccgccaatgctgcagtcacagctgccgccaaggtgagatgggggcaggctcagactcccagggcccctaccttgtacaaagggccctggccaggcccctttgcatccaccctgtactcggggctgtagagactctgggctcatgcagctggaggctccagtccaggctctactgctatctggccgagtcactttgattgtccggccatttccccatctgtccccagaggcaaagtgtggccctgccccagccctcagctctgtctgtgtgggactgggtgaggacagtgtggggagggcaccgagcctggggctgctgcca

SEQ ID NO: 12091 - protein, 170 aa, Homo sapiens
MVSWIISRLVVLIFGTLYPAYSSYKAVKTKNVKEYVKWMMYWIVFAFFTTAETLTDIVLSWFPFYFELKIAFVIWLLSPYTKGSSVLYRKFVHPTLSNKEKEIDEYITQARDKSYETMMRVGKRGLNLAANAAVTAAAKVRWGQAQTPRAPTLYKGPWPGPFASTLYSGL

SEQ ID NO: 12092 - DNA, 527 bp, Homo sapiens
ccctttaacggcggcgctgggcgctccgctgcccccgcggcggctgctgcagcggctgctgctgctactgcggctcctgctgccgccgccgccgccgctcggcctcaggcagctgcatcctcggccgggccgggtccccgccccgcgccgcgcccggccccgccatggtgtcctggatcatctctcgcctggtggtgctcatctttggcaccctgtacccagcctattcttcctacaaggccgtgaagacaaaaaacgtgaaggaatatgtgaaatggatgatgtactggatcgtctttgccttcttcaccacggccgagacgctcacggatatagtgctctcctggttccccttctactttgaactgaagatcgccttcgtgatatggctgctgtccccttacaccaagggctccagcgtgctctaccgcaagttcgtgcacccaacgctgtccaacaaggagaaggtttgcccccactctcagctcacctcccagcctgcccccagccaaggcagtccagagcct

SEQ ID NO: 12093 - protein, 120 aa, Homo sapiens
MVSWIISRLVVLIFGTLYPAYSSYKAVKTKNVKEYVKWMMYWIVFAFFTTAETLTDIVLSWFPFYFELKIAFVIWLLSPYTKGSSVLYRKFVHPTLSNKEKVCPHSQLTSQPAPSQGSPE

SEQ ID NO: 12094 - DNA, 2143 bp, Homo sapiens
tttaacggcggcgctgggcgctccgctgcccccgcggcggctgctgcagcggctgctgctgctactgcggctcctgctgccgccgccgccgccgctcggcctcaggcagctgcatcctcggccgggccgggtccccgccccgcgccgcgcccggccccgccatggtgtcctggatcatctctcgcctggtggtgctcatctttggcaccctgtacccagcctattcttcctacaaggccgtgaagacaaaaaacgtgaaggaatatgtgaaatggatgatgtactggatcgtctttgccttcttcaccacggccgagacgctcacggatatagtgctctcctggttccccttctactttgaactgaagatcgccttcgtgatatggctgctgtccccttacaccaagggctccagcgtgctctaccgcaagttcgtgcacccaacgctgtccaacaaggagaaggagatcgacgagtacatcacgcaggcccgagacaagagctatgagaccatgatgagggtgggcaagaggggcctgaaccttgccgccaatgctgcagtcacagctgccgccaagggccagggggtgctgtcagagaagctccgcagcttcagcatgcaggacctgaccctgatccgggacgaggacgcactgcccctgcagaggcctgacggccgcctccgacccagccctggcagcctcctggacaccatcgaggacttaggagatgaccctgccctgagtctaaggtccagcacaaacccggcagattcccggacagaggcttctgaggatgacatgggagacaaagctcccaagagggccaaacccatcaaaaaagcgcccaaagctgagccactggcttccaagacactgaagacccggcccaagaagaagacctctggcgggggcgactcagcttgagcccctccacccccgcaggctgcagagcaaggatgaagcctcaggaggggcctcagacccagcccctgctccacactgtgccagtagcctaggtgtctcaggcccctgggccccgcagatggccatttccggtgcctgcccagtggccactcttctggaaggggcttggaaaagaggaaggaggcccagctgtgggggttgagggtagagggtggaccagaggctgaggactgagccacccaaggaggtggggactgctcggcctccaccgctgttccgctgcagccccgccctgccccacccacccagtgccttgctgaagcccatagcaatccgcttctcagaggtcctgtcgtgtttccactgctcgccttggtttgggagcagggagggggaagtcctagcccagatggaccaaggacgggcctgaaggcacatgggggaaagggagcacacggggaggacgttggggaccctgggtggggcctccaggtgcagctgtggatggaagacagggattggcctgtgcttcagcgaccaggatggccaggccagagctgcagctgggggctcttttcctggtcattgggtggggctgagtgccacatgttcccacattaaaaaggggggtccagggctgtgtgagtgtgtctttctgggtctagggctcggggtagtttgggtcaaggactgtccctccagcagtcgcctcctcccaccctgagccccacagtcatctggccctttccctgctcaaccctccatcctaggctctgagcctcagaggacccagcccatgagagaacggggatctggggggcctctcacctgctcctatgaccttgctcccttttaggtcaccccattgccaccgtgcccctgggctggactcccgtgctcctcagggcccacccctgctctgtctggtacaggcccctgctgagtgggcccctctcctctgcccctggggtccatcccctcttgcccagggtccccatcctgtaccaagcagactgggccctaagacccctggcagaacccagcctctgctcacacccgccccagcttctgccacggcttcagtcagggccaggaggaacacgtgaaggagaaagagaaatgcaggagccgcggggctcccggttccttgggaagagggtgcccattggacctttggcactggatgagccaataaaccaaactctggcacctcattt

SEQ ID NO: 12095 - protein, 254 aa, Homo sapiens
MVSWIISRLVVLIFGTLYPAYSSYKAVKTKNVKEYVKWMMYWIVFAFFTTAETLTDIVLSWFPFYFELKIAFVIWLLSPYTKGSSVLYRKFVHPTLSNKEKEIDEYITQARDKSYETMMRVGKRGLNLAANAAVTAAAKGQGVLSEKLRSFSMQDLTLIRDEDALPLQRPDGRLRPSPGSLLDTIEDLGDDPALSLRSSTNPADSRTEASEDDMGDKAPKRAKPIKKAPKAEPLASKTLKTRPKKKTSGGGDSA

SEQ ID NO: 12096 - DNA, 565 bp, Homo sapiens
caaagtgtggccctgccccagccctcagctctgtctgtgtgggactgggtgaggacagtgtggggagggcaccgagcctggggctgctgccagcaccatggtgaccctagggccagggggtgctgtcagagaagctccgcagcttcagcatgcaggacctgaccctgatccgggacgaggacgcactgcccctgcagaggcctgacggccgcctccgacccagccctggcagcctcctggatcccgtgctcctcagggcccacccctgctctgtctggtacaggcccctgctgagtgggcccctctcctctgcccctggggtccatcccctcttgcccagggtccccatcctgtaccaagcagactgggccctaagacccctggcagaacccagcctctgctcacacccgccccagcttctgccacggcttcagtcagggccaggaggaacacgtgaaggagaaagagaaatgcaggagccgcggggctcccggttccttgggaagagggtgcccattggacctttggcactggatgagccaataaaccaaactctggcacctca

SEQ ID NO: 12097 - protein, 137 aa, Homo sapiens
MQDLTLIRDEDALPLQRPDGRLRPSPGSLLDPVLLRAHPCSVWYRPLLSGPLSSAPGVHPLLPRVPILYQADWALRPLAEPSLCSHPPQLLPRLQSGPGGTREGEREMQEPRGSRFLGKRVPIGPLALDEPINQTLA

SEQ ID NO: 12098 - DNA, 1109 bp, Homo sapiens
aggctgcagagcaaggatgaagcctcaggaggggcctcagacccagcccctgctccacactgtgccagtagcctaggtgtctcaggcccctgggccccgcagatggccatttccggtgcctgcccagtggccactcttctggaaggggcttggaaaagaggaaggaggcccagctgtgggggttgagggtagagggtggaccagaggctgaggactgagccacccaaggaggtggggactgctcggcctccaccgctgttccgctgcagccccgccctgccccacccacccagtgccttgctgaagcccatagcaatccgcttctcagaggtcctgtcgtgtttccactgctcgccttggtttgggagcagggagggggaagtcctagcccagatggaccaaggacgggcctgaaggcacatgggggaaagggagcacacggggaggacgttggggaccctgggtggggcctccaggtgcagctgtggatggaagacagggattggcctgtgcttcagcgaccaggatggccaggccagagctgcagctgggggctcttttcctggtcattgggtggggctgagtgccacatgttcccacattaaaaaggggggtccagggctgtgtgagtgtgtctttctgggtctagggctcggggtagtttgggtcaaggactgtccctccagcagtcgcctcctcccaccctgagccccacagtcatctggccctttccctgctcaaccctccatcctaggctctgagcctcagaggacccagcccatgagagaacggggatctggggggcctctcacctgctcctatgaccttgctcccttttaggtcaccccattgccaccgtgcccctgggctggactcccgtgctcctcagggcccacccctgctctgtctggtacaggcccctgctgagtgggcccccagcctctgctcacacccgccccagcttctgccacggcttcagtcagggccaggaggaacacgtgaaggagaaagagaaatgcaggagccgcggggctcccggttccttgggaagagggtgcccattggacctttggcactggatgagccaataaaccaaactctggcacctc

SEQ ID NO: 12099 - protein, 95 aa, Homo sapiens
MTLLPFRSPHCHRAPGLDSRAPQGPPLLCLVQAPAEWAPSLCSHPPQLLPRLQSGPGGTREGEREMQEPRGSRFLGKRVPIGPLALDEPINQTLA

SEQ ID NO: 12100 - DNA, 805 bp, Homo sapiens
ggggactgctcggcctccaccgctgttccgctgcagccccgccctgccccacccacccagtgccttgctgaagcccatagcaatccgcttctcagaggtcctgtcgtgtttccactgctcgccttggtttgggagcagggagggggaagtcctagcccagatggaccaaggacgggcctgaaggcacatgggggaaagggagcacacggggaggacgggggtccagggctgtgtgagtgtgtctttctgggtctagggctcggggtagtttgggtcaaggactgtccctccagcagtcgcctcctcccaccctgagccccacagtcatctggccctttccctgctcaaccctccatcctaggctctgagcctcagaggacccagcccatgagagaacggggatctggggggcctctcacctgctcctatgaccttgctcccttttaggtcaccccattgccaccgtgcccctgggctggactcccgtgctcctcagggcccacccctgctctgtctggtacaggcccctgctgagtgggcccctctcctctgcccctggggtccatcccctcttgcccagggtccccatcctgtaccaagcagactgggccctaagacccctggcagaacccagcctctgctcacacccgccccagcttctgccacggcttcagtcagggccaggaggaacacgtgaaggagaaagagaaatgcaggagccgcggggctcccggttccttgggaagagggtgcccattggacctttggcactggatgagccaataaaccaaactctggcacctca

SEQ ID NO: 12101 - protein, 89 aa, Homo sapiens
MTLLPFRSPHCHRAPGLDSRAPQGPPLLCLVQAPAEWAPLLCPWGPSPLAQGPHPVPSRLGPKTPGRTQPLLTPAPASATASVRARRNT

SEQ ID NO: 12102 - DNA, 3136 bp, Homo sapiens; identical to SEQ ID NO: 1162

SEQ ID NO: 12103 - protein, 543 aa, Homo sapiens; identical to SEQ ID NO: 1163

SEQ ID NO: 12104 - DNA, 3234 bp, Homo sapiens
gcgcagaacttggggagccgccgccgccatccgccgccgcagccagcttccgccgccgcaggaccggcccctgccccagcctccgcagccgcggcgcgtccacgcccgcccgcgcccagggcgagtcggggtcgccgcctgcacgcttctcagtgttccccgcgccccgcatgtaacccggccaggcccccgcaactgtgtcccctgcagctccagccccgggctgcacccccccgccccgacaccagctctccagcctgctcgtccaggatggccgcggccaaggccgagatgcagctgatgtccccgctgcagatctctgacccgttcggatcctttcctcactcgcccaccatggacaactaccctaagctggaggagatgatgctgctgagcaacggggctccccagttcctcggcgccgccggggccccagagggcagcggcagcaacagcagcagcagcagcagcgggggcggtggaggcggcgggggcggcagcaacagcagcagcagcagcagcaccttcaaccctcaggcggacacgggcgagcagccctacgagcacctgaccgcagagtcttttcctgacatctctctgaacaacgagaaggtgctggtggagaccagttaccccagccaaaccactcgactgccccccatcacctatactggccgcttttccctggagcctgcacccaacagtggcaacaccttgtggcccgagcccctcttcagcttggtcagtggcctagtgagcatgaccaacccaccggcctcctcgtcctcagcaccatctccagcggcctcctccgcctccgcctcccagagcccacccctgagctgcgcagtgccatccaacgacagcagtcccatttactcagcggcacccaccttccccacgccgaacactgacattttccctgagccacaaagccaggccttcccgggctcggcagggacagcgctccagtacccgcctcctgcctaccctgccgccaagggtggcttccaggttcccatgatccccgactacctgtttccacagcagcagggggatctgggcctgggcaccccagaccagaagcccttccagggcctggagagccgcacccagcagccttcgctaacccctctgtctactattaaggcctttgccactcagtcgggctcccaggacctgaaggccctcaataccagctaccagtcccagctcatcaaacccagccgcatgcgcaagtaccccaaccggcccagcaagacgcccccccacgaacgcccttacgcttgcccagtggagtcctgtgatcgccgcttctcccgctccgacgagctcacccgccacatccgcatccacacaggccagaagcccttccagtgccgcatctgcatgcgcaacttcagccgcagcgaccacctcaccacccacatccgcacccacacaggcgaaaagcccttcgcctgcgacatctgtggaagaaagtttgccaggagcgatgaacgcaagaggcataccaagatccacttgcggcagaaggacaagaaagcagacaaaagtgttgtggcctcttcggccacctcctctctctcttcctacccgtccccggttgctacctcttacccgtccccggttactacctcttatccatccccggccaccacctcatacccatcccctgtgcccacctccttctcctctcccggctcctcgacctacccatcccctgtgcacagtggcttcccctccccgtcggtggccaccacgtactcctctgttccccctgctttcccggcccaggtcagcagcttcccttcctcagctgtcaccaactccttcagcgcctccacagggctttcggacatgacagcaaccttttctcccaggacaattgaaatttgctaaagggaaaggggaaagaaagggaaaagggagaaaaagaaacacaagagacttaaaggacaggaggaggagatggccataggagaggagggttcctcttaggtcagatggaggttctcagagccaagtcctccctctctactggagtggaaggtctattggccaacaatcctttctgcccacttccccttccccaattactattccctttgacttcagctgcctgaaacagccatgtccaagttcttcacctctatccaaagaacttgatttgcatggattttggataaatcatttcagtatcatctccatcatatgcctgaccccttgctcccttcaatgctagaaaatcgagttggcaaaatggggtttgggcccctcagagccctgccctgcacccttgtacagtgtctgtgccatggatttcgtttttcttggggtactcttgatgtgaagataatttgcatattctattgtattatttggagttaggtcctcacttgggggaaaaaaaaaaaagaaaagccaagcaaaccaatggtgatcctctattttgtgatgatgctgtgacaataagtttgaacctttttttttgaaacagcagtcccagtattctcagagcatgtgtcagagtgttgttccgttaacctttttgtaaatactgcttgaccgtactctcacatgtggcaaaatatggtttggtttttctttttttttttttttgaaagtgttttttcttcgtccttttggtttaaaaagtttcacgtcttggtgccttttgtgtgatgcgccttgctgatggcttgacatgtgcaattgtgagggacatgctcacctctagccttaaggggggcagggagtgatgatttgggggaggctttgggagcaaaataaggaagagggctgagctgagcttcggttctccagaatgtaagaaaacaaaatctaaaacaaaatctgaactctcaaaagtctatttttttaactgaaaatgtaaatttataaatatattcaggagttggaatgttgtagttacctactgagtaggcggcgatttttgtatgttatgaacatgcagttcattattttgtggttctattttactttgtacttgtgtttgcttaaacaaagtgactgtttggcttataaacacattgaatgcgctttattgcccatgggatatgtggtgtatatccttccaaaaaattaaaacgaaaataaagtagctgcgattgggtatgtgtttcctgggttaggggaaggactctgccctattgagggctgtgaggttttctgaagacttggcctttagagatacaaggatcctccagccag

SEQ ID NO: 12105 - protein, 543 aa, Homo sapiens; identical to SEQ ID NO: 1163

SEQ ID NO: 12106 - DNA, 3037 bp, Homo sapiens
ttggggagccgccgccgccatccgccgccgcagccagcttccgccgccgcaggaccggcccctgccccagcctccgcagccgcggcgcgtccacgcccgcccgcgcccagggcgagtcggggtcgccgcctgcacgcttctcagtgttccccgcgccccgcatgtaacccggccaggcccccgcaactgtgtcccctgcagctccagccccgggctgcacccccccgccccgacaccagctctccagcctgctcgtccaggatggccgcggccaaggccgagatgcagctgatgtccccgctgcagatctctgacccgttcggatcctttcctcactcgcccaccatggacaactaccctaagctggaggagatgatgctgctgagcaacggggctccccagttcctcggcgccgccggggccccagagggcagcggcagcaacagcagcagcagcagcagcgggggcggtggaggcggcgggggcggcagcaacagcagcagcagcagcagcaccttcaaccctcaggcggacacgggcgagcagccctacgagcacctgaccgcagagtcttttcctgacatctctctgaacaacgagaaggtgctggtggagaccagttaccccagccaaaccactcgactgccccccatcacctatactggccgcttttccctggagcctgcacccaacagtggcaacaccttgtggcccgagcccctcttcagcttggtcagtggcctagtgagcatgaccaacccaccggcctcctcgtcctcagcaccatctccagcggcctcctccgcctccgcctcccagagcccacccctgagctgcgcagtgccatccaacgacagcagtcccatttactcagcggcacccaccttccccacgccgaacactgacattttccctgagccacaaagccaggccttcccgggctcggcagggacagcgctccagtacccgcctcctgcctaccctgccgccaagggtggcttccaggttcccatgatccccgactacctgtttccacagcagcagggggatctgggcctgggcaccccagaccagaagcccttccagggcctggagagccgcacccagcagccttcgctaacccctctgtctactattaaggcctttgccactcagtcgggctcccaggacctgaaggccctcaataccagctaccagtcccagctcatcaaacccagccgcatgcgcaagtaccccaaccggcccagcaagacgcccccccacgaacgcccttacgcttgcccagtggagtcctgtgatcgccgcttctcccgctccgacgagctcacccgccacatccgcatccacacaggccagaagcccttccagtgccgcatctgcatgcgcaacttcagccgcagcgaccacctcaccacccacatccgcacccacacaggcgaaaagcccttcgcctgcgacatctgtggaagaaagtttgccaggagcgatgaacgcaagaggcataccaagatccacttgcggcagaaggacaagaaagcagacaaaagtgttgtggcctcttcggccacctcctctctctcttcctacccgtccccggttgctacctcttacccgtccccggttactacctcttatccatccccggccaccacctcatacccatcccctgtgcccacctccttctcctctcccggctcctcgacctacccatcccctgtgcacagtggcttcccctccccgtcggtggccaccacgtactcctctgttccccctgctttcccggcccaggtcagcagcttcccttcctcagctgtcaccaactccttcagcgcctccacagggctttcggacatgacagcaaccttttctcccaggacaattgaaatttgctaaagggaaaggggaaagaaagggaaaagggagaaaaagaaacacaagagacttaaaggacaggaggaggagatggccataggagaggagggttcctcttaggtcagatggaggttctcagagccaagtcctccctctctactggagtggaaggtctattggccaacaatcctttctgcccacttccccttccccaattactattccctttgacttcagctgcctgaaacagccatgtccaagttcttcacctctatccaaagaacttgatttgcatggattttggataaatcatttcagtatcatctccatcatatgcctgaccccttgctcccttcaatgctagaaaatcgagttggcaaaatggggtttgggcccctcagagccctgccctgcacccttgtacagtgtctgtgccatggatttcgtttttcttggggtactcttgatgtgaagataatttgcatattctattgtattatttggagttaggtcctcacttgggggaaaaaaaaaaaagaaaagccaagcaaaccaatggtgatcctctattttgtgatgatgctgtgacaataagtttgaacctttttttttgaaacagcagtcccagtattctcagagcatgtgtcagagtgttgttccgttaacctttttgtaaatactgcttgaccgtactctcacatgtggcaaaatatggtttggtttttctttttttttttttttgaaagtgttttttcttcgtccttttggtttaaaaagtttcacgtcttggtgccttttgtgtgatgcgccttgctgatggcttgacatgtgcaattgtgagggacatgctcacctctagccttaaggggggcagggagtgatgatttgggggaggctttgggagcaaaataaggaagagggctgagctgagcttcggttctccagaatgtaagaaaacaaaatctaaaacaaaatctgaactctcaaaagtctatttttttaactgaaaatgtaaatttataaatatattcaggagttggaatgttgtagttacctactgagtaggcggcgatttttgtatgttatgaacatgcagttcattattttgtggttctattttactttgtacttgtgtttgcttaaacaaagtgactgtttggcttat

SEQ ID NO: 12107 - protein, 543 aa, Homo sapiens; identical to SEQ ID NO: 1163

SEQ ID NO: 12108 - DNA, 2951 bp, Homo sapiens
ttggggagccgccgccgccatccgccgccgcagccagcttccgccgccgcaggaccggcccctgccccagcctccgcagccgcggcgcgtccacgcccgcccgcgcccagggcgagtcggggtcgccgcctgcacgcttctcagtgttccccgcgccccgcatgtaacccggccaggcccccgcaactgtgtcccctgcagctccagccccgggctgcacccccccgccccgacaccagctctccagcctgctcgtccaggatggccgcggccaaggccgagatgcagctgatgtccccgctgcagatctctgacccgttcggatcctttcctcactcgcccaccatggacaactaccctaagctggaggagatgatgctgctgagcaacggggctccccagttcctcggcgccgccggggccccagagggcagcggcagcaacagcagcagcagcagcagcgggggcggtggaggcggcgggggcggcagcaacagcagcagcagcagcagcaccttcaaccctcaggcggacacgggcgagcagccctacgagcacctgaccgcagagtcttttcctgacatctctctgaacaacgagaaggtgctggtggagaccagttaccccagcctccgcctcccagagcccacccctgagctgcgcagtgccatccaacgacagcagtcccatttactcagcggcacccaccttccccacgccgaacactgacattttccctgagccacaaagccaggccttcccgggctcggcagggacagcgctccagtacccgcctcctgcctaccctgccgccaagggtggcttccaggttcccatgatccccgactacctgtttccacagcagcagggggatctgggcctgggcaccccagaccagaagcccttccagggcctggagagccgcacccagcagccttcgctaacccctctgtctactattaaggcctttgccactcagtcgggctcccaggacctgaaggccctcaataccagctaccagtcccagctcatcaaacccagccgcatgcgcaagtaccccaaccggcccagcaagacgcccccccacgaacgcccttacgcttgcccagtggagtcctgtgatcgccgcttctcccgctccgacgagctcacccgccacatccgcatccacacaggccagaagcccttccagtgccgcatctgcatgcgcaacttcagccgcagcgaccacctcaccacccacatccgcacccacacaggcgaaaagcccttcgcctgcgacatctgtggaagaaagtttgccaggagcgatgaacgcaagaggcataccaagatccacttgcggcagaaggacaagaaagcagacaaaagtgttgtggcctcttcggccacctcctctctctcttcctacccgtccccggttgctacctcttacccgtccccggttactacctcttatccatccccggccaccacctcatacccatcccctgtgcccacctccttctcctctcccggctcctcgacctacccatcccctgtgcacagtggcttcccctccccgtcggtggccaccacgtactcctctgttccccctgctttcccggcccaggtcagcagcttcccttcctcagctgtcaccaactccttcagcgcctccacagggctttcggacatgacagcaaccttttctcccaggacaattgaaatttgctaaagggaaaggggaaagaaagggaaaagggagaaaaagaaacacaagagacttaaaggacaggaggaggagatggccataggagaggagggttcctcttaggtcagatggaggttctcagagccaagtcctccctctctactggagtggaaggtctattggccaacaatcctttctgcccacttccccttccccaattactattccctttgacttcagctgcctgaaacagccatgtccaagttcttcacctctatccaaagaacttgatttgcatggattttggataaatcatttcagtatcatctccatcatatgcctgaccccttgctcccttcaatgctagaaaatcgagttggcaaaatggggtttgggcccctcagagccctgccctgcacccttgtacagtgtctgtgccatggatttcgtttttcttggggtactcttgatgtgaagataatttgcatattctattgtattatttggagttaggtcctcacttgggggaaaaaaaaaaaagaaaagccaagcaaaccaatggtgatcctctattttgtgatgatgctgtgacaataagtttgaacctttttttttgaaacagcagtcccagtattctcagagcatgtgtcagagtgttgttccgttaacctttttgtaaatactgcttgaccgtactctcacatgtggcaaaatatggtttggtttttctttttttttttttttgaaagtgttttttcttcgtccttttggtttaaaaagtttcacgtcttggtgccttttgtgtgatgcgccttgctgatggcttgacatgtgcaattgtgagggacatgctcacctctagccttaaggggggcagggagtgatgatttgggggaggctttgggagcaaaataaggaagagggctgagctgagcttcggttctccagaatgtaagaaaacaaaatctaaaacaaaatctgaactctcaaaagtctatttttttaactgaaaatgtaaatttataaatatattcaggagttggaatgttgtagttacctactgagtaggcggcgatttttgtatgttatgaacatgcagttcattattttgtggttctattttactttgtacttgtgtttgcttaaacaaagtgactgtttggcttataaacacattgaatgcgctttattgcccatgggatatgtggtgtatatccttccaaaaaattaaaacgaaaataaagtagctgcgattggg

SEQ ID NO: 12109 - protein, 155 aa, Homo sapiens
MAAAKAEMQLMSPLQISDPFGSFPHSPTMDNYPKLEEMMLLSNGAPQFLGAAGAPEGSGSNSSSSSSGGGGGGGGGSNSSSSSSTFNPQADTGEQPYEHLTAESFPDISLNNEKVLVETSYPSLRLPEPTPELRSAIQRQQSHLLSGTHLPHAEH

SEQ ID NO: 12110 - DNA, 2495 bp, Homo sapiens
tgcaatgtgctgctatcaattattaactacctcgggagtcaatggtagccggcccggtctcttgcctggcagctcgggtcgtcctcgtcctccagtgattgctttccagtaaccaggcctcccgcttctctctctcctgccagagtcttttcctgacatctctctgaacaacgagaaggtgctggtggagaccagttaccccagccaaaccactcgactgccccccatcacctatactggccgcttttccctggagcctgcacccaacagtggcaacaccttgtggcccgagcccctcttcagcttggtcagtggcctagtgagcatgaccaacccaccggccttccccacgccgaacactgacattttccctgagccacaaagccaggccttcccgggctcggcagggacagcgctccagtacccgcctcctgcctaccctgccgccaagggtggcttccaggttcccatgatccccgactacctgtttccacagcagcagggggatctgggcctgggcaccccagaccagaagcccttccagggcctggagagccgcacccagcagccttcgctaacccctctgtctactattaaggcctttgccactcagtcgggctcccaggacctgaaggccctcaataccagctaccagtcccagctcatcaaacccagccgcatgcgcaagtaccccaaccggcccagcaagacgcccccccacgaacgcccttacgcttgcccagtggagtcctgtgatcgccgcttctcccgctccgacgagctcacccgccacatccgcatccacacaggccagaagcccttccagtgccgcatctgcatgcgcaacttcagccgcagcgaccacctcaccacccacatccgcacccacacaggcgaaaagcccttcgcctgcgacatctgtggaagaaagtttgccaggagcgatgaacgcaagaggcataccaagatccacttgcggcagaaggacaagaaagcagacaaaagtgttgtggcctcttcggccacctcctctctctcttcctacccgtccccggttgctacctcttacccgtccccggttactacctcttatccatccccggccaccacctcatacccatcccctgtgcccacctccttctcctctcccggctcctcgacctacccatcccctgtgcacagtggcttcccctccccgtcggtggccaccacgtactcctctgttccccctgctttcccggcccaggtcagcagcttcccttcctcagctgtcaccaactccttcagcgcctccacagggctttcggacatgacagcaaccttttctcccaggacaattgaaatttgctaaagggaaaggggaaagaaagggaaaagggagaaaaagaaacacaagagacttaaaggacaggaggaggagatggccataggagaggagggttcctcttaggtcagatggaggttctcagagccaagtcctccctctctactggagtggaaggtctattggccaacaatcctttctgcccacttccccttccccaattactattccctttgacttcagctgcctgaaacagccatgtccaagttcttcacctctatccaaagaacttgatttgcatggattttggataaatcatttcagtatcatctccatcatatgcctgaccccttgctcccttcaatgctagaaaatcgagttggcaaaatggggtttgggcccctcagagccctgccctgcacccttgtacagtgtctgtgccatggatttcgtttttcttggggtactcttgatgtgaagataatttgcatattctattgtattatttggagttaggtcctcacttgggggaaaaaaaaaaaagaaaagccaagcaaaccaatggtgatcctctattttgtgatgatgctgtgacaataagtttgaacctttttttttgaaacagcagtcccagtattctcagagcatgtgtcagagtgttgttccgttaacctttttgtaaatactgcttgaccgtactctcacatgtggcaaaatatggtttggtttttctttttttttttttttgaaagtgttttttcttcgtccttttggtttaaaaagtttcacgtcttggtgccttttgtgtgatgcgccttgctgatggcttgacatgtgcaattgtgagggacatgctcacctctagccttaaggggggcagggagtgatgatttgggggaggctttgggagcaaaataaggaagagggctgagctgagcttcggttctccagaatgtaagaaaacaaaatctaaaacaaaatctgaactctcaaaagtctatttttttaactgaaaatgtaaatttataaatatattcaggagttggaatgttgtagttacctactgagtaggcggcgatttttgtatgttatgaacatgcagttcattattttgtggttctattttactttgtacttgtgtttgcttaaacaaagtgactgtttggcttat

SEQ ID NO: 12111 - protein, 341 aa, Homo sapiens
MTNPPAFPTPNTDIFPEPQSQAFPGSAGTALQYPPPAYPAAKGGFQVPMIPDYLFPQQQGDLGLGTPDQKPFQGLESRTQQPSLTPLSTIKAFATQSGSQDLKALNTSYQSQLIKPSRMRKYPNRPSKTPPHERPYACPVESCDRRFSRSDELTRHIRIHTGQKPFQCRICMRNFSRSDHLTTHIRTHTGEKPFACDICGRKFARSDERKRHTKIHLRQKDKKADKSVVASSATSSLSSYPSPVATSYPSPVTTSYPSPATTSYPSPVPTSFSSPGSSTYPSPVHSGFPSPSVATTYSSVPPAFPAQVSSFPSSAVTNSFSASTGLSDMTATFSPRTIEIC

SEQ ID NO: 12112 - DNA, 2585 bp, Homo sapiens
tgcaatgtgctgctatcaattattaactacctcgggagtcaatggtagccggcccggtctcttgcctggcagctcgggtcgtcctcgtcctccagtgattgctttccagtaaccaggcctcccgcttctctctctcctgccagagtcttttcctgacatctctctgaacaacgagaaggtgctggtggagaccagttaccccagccaaaccactcgactgccccccatcacctatactggccgcttttccctggagcctgcacccaacagtggcaacaccttgtggcccgagcccctcttcagcttggtcagtggcctagtgagcatgaccaacccaccggccttccccacgccgaacactgacattttccctgagccacaaagccaggccttcccgggctcggcagggacagcgctccagtacccgcctcctgcctaccctgccgccaagggtggcttccaggttcccatgatccccgactacctgtttccacagcagcagggggatctgggcctgggcaccccagaccagaagcccttccagggcctggagagccgcacccagcagccttcgctaacccctctgtctactattaaggcctttgccactcagtcgggctcccaggacctgaaggccctcaataccagctaccagtcccagctcatcaaacccagccgcatgcgcaagtaccccaaccggcccagcaagacgcccccccacgaacgcccttacgcttgcccagtggagtcctgtgatcgccgcttctcccgctccgacgagctcacccgccacatccgcatccacacaggccagaagcccttccagtgccgcatctgcatgcgcaacttcagccgcagcgaccacctcaccacccacatccgcacccacacaggcgaaaagcccttcgcctgcgacatctgtggaagaaagtttgccaggagcgatgaacgcaagaggcataccaagatccacttgcggcagaaggacaagaaagcagacaaaagtgttgtggcctcttcggccacctcctctctctcttcctacccgtccccggttgctacctcttacccgtccccggttactacctcttatccatccccggccaccacctcatacccatcccctgtgcccacctccttctcctctcccggctcctcgacctacccatcccctgtgcacagtggcttcccctccccgtcggtggccaccacgtactcctctgttccccctgctttcccggcccaggtcagcagcttcccttcctcagctgtcaccaactccttcagcgcctccacagggctttcggacatgacagcaaccttttctcccaggacaattgaaatttgctaaagggaaaggggaaagaaagggaaaagggagaaaaagaaacacaagagacttaaaggacaggaggaggagatggccataggagaggagggttcctcttaggtcagatggaggttctcagagccaagtcctccctctctactggagtggaaggtctattggccaacaatcctttctgcccacttccccttccccaattactattccctttgacttcagctgcctgaaacagccatgtccaagttcttcacctctatccaaagaacttgatttgcatggattttggataaatcatttcagtatcatctccatcatatgcctgaccccttgctcccttcaatgctagaaaatcgagttggcaaaatggggtttgggcccctcagagccctgccctgcacccttgtacagtgtctgtgccatggatttcgtttttcttggggtactcttgatgtgaagataatttgcatattctattgtattatttggagttaggtcctcacttgggggaaaaaaaaaaaagaaaagccaagcaaaccaatggtgatcctctattttgtgatgatgctgtgacaataagtttgaacctttttttttgaaacagcagtcccagtattctcagagcatgtgtcagagtgttgttccgttaacctttttgtaaatactgcttgaccgtactctcacatgtggcaaaatatggtttggtttttctttttttttttttttgaaagtgttttttcttcgtccttttggtttaaaaagtttcacgtcttggtgccttttgtgtgatgcgccttgctgatggcttgacatgtgcaattgtgagggacatgctcacctctagccttaaggggggcagggagtgatgatttgggggaggctttgggagcaaaataaggaagagggctgagctgagcttcggttctccagaatgtaagaaaacaaaatctaaaacaaaatctgaactctcaaaagtctatttttttaactgaaaatgtaaatttataaatatattcaggagttggaatgttgtagttacctactgagtaggcggcgatttttgtatgttatgaacatgcagttcattattttgtggttctattttactttgtacttgtgtttgcttaaacaaagtgactgtttggcttataaacacattgaatgcgctttattgcccatgggatatgtggtgtatatccttccaaaaaattaaaacgaaaataaagtagctgcgattggg

SEQ ID NO: 12113 - protein, 341 aa, Homo sapiens; identical to SEQ ID NO: 12111

SEQ ID NO: 12114 - DNA, 2683 bp, Homo sapiens
tgcaatgtgctgctatcaattattaactacctcgggagtcaatggtagccggcccggtctcttgcctggcagctcgggtcgtcctcgtcctccagtgattgctttccagtaaccaggcctcccgcttctctctctcctgccagagtcttttcctgacatctctctgaacaacgagaaggtgctggtggagaccagttaccccagccaaaccactcgactgccccccatcacctatactggccgcttttccctggagcctgcacccaacagtggcaacaccttgtggcccgagcccctcttcagcttggtcagtggcctagtgagcatgaccaacccaccggccttccccacgccgaacactgacattttccctgagccacaaagccaggccttcccgggctcggcagggacagcgctccagtacccgcctcctgcctaccctgccgccaagggtggcttccaggttcccatgatccccgactacctgtttccacagcagcagggggatctgggcctgggcaccccagaccagaagcccttccagggcctggagagccgcacccagcagccttcgctaacccctctgtctactattaaggcctttgccactcagtcgggctcccaggacctgaaggccctcaataccagctaccagtcccagctcatcaaacccagccgcatgcgcaagtaccccaaccggcccagcaagacgcccccccacgaacgcccttacgcttgcccagtggagtcctgtgatcgccgcttctcccgctccgacgagctcacccgccacatccgcatccacacaggccagaagcccttccagtgccgcatctgcatgcgcaacttcagccgcagcgaccacctcaccacccacatccgcacccacacaggcgaaaagcccttcgcctgcgacatctgtggaagaaagtttgccaggagcgatgaacgcaagaggcataccaagatccacttgcggcagaaggacaagaaagcagacaaaagtgttgtggcctcttcggccacctcctctctctcttcctacccgtccccggttgctacctcttacccgtccccggttactacctcttatccatccccggccaccacctcatacccatcccctgtgcccacctccttctcctctcccggctcctcgacctacccatcccctgtgcacagtggcttcccctccccgtcggtggccaccacgtactcctctgttccccctgctttcccggcccaggtcagcagcttcccttcctcagctgtcaccaactccttcagcgcctccacagggctttcggacatgacagcaaccttttctcccaggacaattgaaatttgctaaagggaaaggggaaagaaagggaaaagggagaaaaagaaacacaagagacttaaaggacaggaggaggagatggccataggagaggagggttcctcttaggtcagatggaggttctcagagccaagtcctccctctctactggagtggaaggtctattggccaacaatcctttctgcccacttccccttccccaattactattccctttgacttcagctgcctgaaacagccatgtccaagttcttcacctctatccaaagaacttgatttgcatggattttggataaatcatttcagtatcatctccatcatatgcctgaccccttgctcccttcaatgctagaaaatcgagttggcaaaatggggtttgggcccctcagagccctgccctgcacccttgtacagtgtctgtgccatggatttcgtttttcttggggtactcttgatgtgaagataatttgcatattctattgtattatttggagttaggtcctcacttgggggaaaaaaaaaaaagaaaagccaagcaaaccaatggtgatcctctattttgtgatgatgctgtgacaataagtttgaacctttttttttgaaacagcagtcccagtattctcagagcatgtgtcagagtgttgttccgttaacctttttgtaaatactgcttgaccgtactctcacatgtggcaaaatatggtttggtttttctttttttttttttttgaaagtgttttttcttcgtccttttggtttaaaaagtttcacgtcttggtgccttttgtgtgatgcgccttgctgatggcttgacatgtgcaattgtgagggacatgctcacctctagccttaaggggggcagggagtgatgatttgggggaggctttgggagcaaaataaggaagagggctgagctgagcttcggttctccagaatgtaagaaaacaaaatctaaaacaaaatctgaactctcaaaagtctatttttttaactgaaaatgtaaatttataaatatattcaggagttggaatgttgtagttacctactgagtaggcggcgatttttgtatgttatgaacatgcagttcattattttgtggttctattttactttgtacttgtgtttgcttaaacaaagtgactgtttggcttataaacacattgaatgcgctttattgcccatgggatatgtggtgtatatccttccaaaaaattaaaacgaaaataaagtagctgcgattgggtatgtgtttcctgggttaggggaaggactctgccctattgagggctgtgaggttttctgaagacttggcctttagagatacaaggatcctccagccag

SEQ ID NO: 12115 - protein, 341 aa, Homo sapiens; identical to SEQ ID NO: 12111

SEQ ID NO: 12116 - DNA, 1274 bp, Homo sapiens
cacatttgtgcccggcgtttgggagccctttgtatcaatgttctgacaagggtccctataaccttaacctactcgaaaccggtttgggatggatatgatggggcttctgtgctattgctgggattgggagaaataaaacatgcaatttaagtggaagcgaagaaatttaaagaggattttattttgcttgggtcaatccttgttaaaagggaggtggatgtgttttccttgtgttggatggcatgagattatgtgaatgttttgatttattaaaatgaactgcaaggtttttcacaggaacgacagacatgtatgactgcatgtaattataaactcctgacctcctggtggggttggagcatctgtttcaaatgtgggacttacaagcacttctcacatgagaaattaggggcgggtgggaagggatgggacacagcttctggcaccatggatttaagaccatgttggatccaaaagttggcctgaaaccctgaagcttatgcttcacagctgggctgtaagtcagacttgaacccagctgatatgcaaggtcatggcgtgcccagggtggtgacagttgaacaaagtgtatagtacgtgcccagtggtagcgatggaaaaaagtataccaaatggactttgaaggaccaaaggttttaaaagtcaattggtatcacctccacactgactagggtagtggggtgcatttggttttcaaattgggtacttttaacactttagtgcctgactgctgttctttactgacttgattcagtcactcgtagctttattggtctgaaccagctccttgttcccaggttacagacctgcctatcgttccaataatcctgtttcaagcagtaccttagggttttgccattgtaaatgggtctgatgtgatatgacaagaccagagaaattggatgtaaatttacatttttgaatatgcttgttgtttcacatgatacatttagggtatgcagctccttttgtagtttttatttttactatttaagtttggaaatgatgccaaatttttgtatttctttaatcaatgtgttctcttcggtgatatatattgcattatatattgatgtgtgtatcaatatatattgatatgtattacacttacacatacaaacacatataagagggggtgaaaaccgtagcctttgcattctctatagcctctgcagagagatactaagcagcaaaatcttggtgttgtgatgtacagaaatggagaagagtattaaaccatatttaagaatata

SEQ ID NO: 12117 - protein, 57 aa, Homo sapiens
MTACNYKLLTSWWGWSICFKCGTYKHFSHEKLGAGGKGWDTASGTMDLRPCWIQKLA

SEQ ID NO: 12118 - DNA, 3876 bp, Homo sapiens
gccccatgtgagcggattgcaacacatgcagctgcctggagagagggagccggtgtcctacgtcagagccgccgccgccgcggagccgccgccggggaggagcagccgctgccgcccaggactgggcccttagggaggaggaggcgagaagatggcggacgaccccagtgctgccgacaggaacgtggagatctggaagatcaagaagctcattaagagcttggaggcggcccgcgggtgagcgccgcgtccggcaccctccgtgccctcttggttcccggacccctcaggatggacgcccccgcgccgcatggccggatgaggagaaccaggcactagccaactcccgccttctggatctctgggtagtagcccctgacccaggggcgagggtcggcgcggttggcccgagaaggggtcctttccccgcatggggcaatggcaccagcatgatatcattgatcattcctcccaaagaccagatttcacgagtggcaaaaatgttagcggatgagtttggaactgcatctaacattaagtcacgagtaaaccgcctttcagtcctgggagccattacatctgtacaacaaagactcaaactttataacaaagtacctccaaatggtctggttgtatactgtggaacaattgtaacagaagaaggaaaggaaaagaaagtcaacattgactttgaacctttcaaaccaattaatacgtcattgtatttgtgtgacaacaaattccatacagaggctcttacagcactactttcagatgatagcaagtttggattcattgtaatagatggtagtggtgcactttttggcacactccaaggaaacacaagagaagtcctgcacaaattcactgtggatctcccaaagaaacacggtagaggaggtcagtcagccttgcgttttgcccgtttaagaatggaaaagcgacataactatgttcggaaagtagcagagactgctgtgcagctgtttatttctggggacaaagtgaatgtggctggtctagttttagctggatccgctgactttaaaactgaactaagtcaatctgatatgtttgatcagaggttacaatcaaaagttttaaaattagttgatatatcctatggtggtgaaaatggattcaaccaagctattgagttatctactgaagtcctctccaacgtgaaattcattcaagagaagaaattaataggacgatactttgatgaaatcagccaggacacgggcaagtactgttttggcgttgaagatacactaaaggctttggaaatgggagctgtagaaattctaatagtctatgaaaatctggatataatgagatatgttcttcattgccaaggcacagaagaggagaaaattctctatctaactccagagcaagaaaaggataaatctcatttcacagacaaagagaccggacaggaacatgagcttatcgagagcatgcccctgttggaatggtttgctaacaactataaaaaatttggagctacgttggaaattgtcacagataaatcacaagaagggtctcagtttgtgaaaggatttggtggaattggaggtatcttgcggtaccgagtagatttccagggaatggaataccaaggaggagacgatgaattttttgaccttgatgactactaggtagtcgacatgggtccggcaaaacgtgcctcaccctccagcatccaacccaaggagcatacccatggtggaatccaaacagatccctgccttacaattggaacatttccagaacttaatccatgagcattggatattgaaaagaaaaccgaaacaaaaccagacccagccctacactttggtttgtcatggtgtcagcgcagcagcctacaactaagttcctaaacgccactttggactaatttaaaaaagaatcccagtttttacttttactggatggtgaaattggttgctcttgtattttatgaaaaaaaatgatttttttaaccttcatacatagaagcaaaaatactttaactgctgtaaaccttcaaaagttaatagaagtgagatcatactggtttgtttcttattttgattggagaaaaattaaattgctgcatttcgcagtgacccatttacatggcattctcagcttagactgcgtaagaagaaatatatgtggtgaaatgttggaaccatttctctcttggtctctgtttaatgttgaaagggtgagctaataggaggcactttcaacttcactccctcacgctaccccgtccccctccagactggcagtttcaaggatgcaaattgcattgcaaaatcaaactgactcatgaagcatttgggccagtgcactgtttacttccatctgtttgcagacacatttgtgcccggcgtttgggagccctttgtatcaatgttctgacaagggtccctataaccttaacctactcgaaaccggtttgggatggatatgatggggcttctgtgctattgctgggattgggagaaataaaacatgcaatttaagtggaagcgaagaaatttaaagaggattttattttgcttgggtcaatccttgttaaaagggaggtggatgtgttttccttgtgttggatggcatgagattatgtgaatgttttgatttattaaaatgaactgcaaggtttttcacaggaacgacagacatgtatgactgcatgtaattataaactcctgacctcctggtggggttggagcatctgtttcaaatgtgggacttacaagcacttctcacatgagaaattaggggcgggtgggaagggatgggacacagcttctggcaccatggatttaagaccatgttggatccaaaagttggcctgaaaccctgaagcttatgcttcacagctgggctgtaagtcagacttgaacccagctgatatgcaaggtcatggcgtgcccagggtggtgacagttgaacaaagtgtatagtacgtgcccagtggtagcgatggaaaaaagtataccaaatggactttgaaggaccaaaggttttaaaagtcaattggtatcacctccacactgactagggtagtggggtgcatttggttttcaaattgggtacttttaacactttagtgcctgactgctgttctttactgacttgattcagtcactcgtagctttattggtctgaaccagctccttgttcccaggttacagacctgcctatcgttccaataatcctgtttcacttgaatgaagggagtatgtcttaaatgtaaagtttctggttctcacactgtactctgaggtccaaatactgtctgtcaatgtgtaacctgatgtctcaaccccctgtgagaagagtccattatttggtgttcaccaacgtgggagacttcaccggaacaggcttttttgctttgggctctgctatttgtttgcagaacacccaagagcgagcaaacatgctctcttcacagcagtaccttagggttttgccattgtaaatgggtctgatgtgatatgacaagaccagagaaattggatgtaaatttacatttttgaatatgcttgttgtttcacatgatacatttagggtatgcagctccttttgtagtttttatttttactatttaagtttggaaatgatgccaaatttttgtatttctttaatcaatgtgttctcttcggtgatatatattgcattatatattgatgtgtgtatcaatatatattgatatgtattacacttacacatacaaacacatataagagggggtgaaaaccgtagcctttgcattctctatagcctctgcagagagatactaagcagcaaaatcttggtgttgtgatgtacagaaatggagaagagtattaaaccatatttaagaatata

SEQ ID NO: 12119 - protein, 404 aa, Homo sapiens
MISLIIPPKDQISRVAKMLADEFGTASNIKSRVNRLSVLGAITSVQQRLKLYNKVPPNGLVVYCGTIVTEEGKEKKVNIDFEPFKPINTSLYLCDNKFHTEALTALLSDDSKFGFIVIDGSGALFGTLQGNTREVLHKFTVDLPKKHGRGGQSALRFARLRMEKRHNYVRKVAETAVQLFISGDKVNVAGLVLAGSADFKTELSQSDMFDQRLQSKVLKLVDISYGGENGFNQAIELSTEVLSNVKFIQEKKLIGRYFDEISQDTGKYCFGVEDTLKALEMGAVEILIVYENLDIMRYVLHCQGTEEEKILYLTPEQEKDKSHFTDKETGQEHELIESMPLLEWFANNYKKFGATLEIVTDKSQEGSQFVKGFGGIGGILRYRVDFQGMEYQGGDDEFFDLDDY

SEQ ID NO: 12120 - DNA, 3687 bp, Homo sapiens
gatgtcacaggccccatgtgagcggattgcaacacatgcagctgcctggagagagggagccggtgtcctacgtcagagccgccgccgccgcggagccgccgccggggaggagcagccgctgccgcccaggactgggcccttagggaggaggaggcgagaagatggcggacgaccccagtgctgccgacaggaacgtggagatctggaagatcaagaagctcattaagagcttggaggcggcccgcggcaatggcaccagcatgatatcattgatcattcctcccaaagaccagatttcacgagtggcaaaaatgttagcggatgagtttggaactgcatctaacattaagtcacgagtaaaccgcctttcagtcctgggagccattacatctgtacaacaaagactcaaactttataacaaagtacctccaaatggtctggttgtatactgtggaacaattgtaacagaagaaggaaaggaaaagaaagtcaacattgactttgaacctttcaaaccaattaatacgtcattgtatttgtgtgacaacaaattccatacagaggctcttacagcactactttcagatgatagcaagtttggattcattgtaatagatggtagtggtgcactttttggcacactccaaggaaacacaagagaagtcctgcacaaattcactgtggatctcccaaagaaacacggtagaggaggtcagtcagccttgcgttttgcccgtttaagaatggaaaagcgacataactatgttcggaaagtagcagagactgctgtgcagctgtttatttctggggacaaagtgaatgtggctggtctagttttagctggatccgctgactttaaaactgaactaagtcaatctgatatgtttgatcagaggttacaatcaaaagttttaaaattagttgatatatcctatggtggtgaaaatggattcaaccaagctattgagttatctactgaagtcctctccaacgtgaaattcattcaagagaagaaattaataggacgatactttgatgaaatcagccaggacacgggcaagtactgttttggcgttgaagatacactaaaggctttggaaatgggagctgtagaaattctaatagtctatgaaaatctggatataatgagatatgttcttcattgccaaggcacagaagaggagaaaattctctatctaactccagagcaagaaaaggataaatctcatttcacagacaaagagaccggacaggaacatgagcttatcgagagcatgcccctgttggaatggtttgctaacaactataaaaaatttggagctacgttggaaattgtcacagataaatcacaagaagggtctcagtttgtgaaaggatttggtggaattggaggtatcttgcggtaccgagtagatttccagggaatggaataccaaggaggagacgatgaattttttgaccttgatgactactaggtagtcgacatgggtccggcaaaacgtgcctcaccctccagcatccaacccaaggagcatacccatggtggaatccaaacagatccctgccttacaattggaacatttccagaacttaatccatgagcattggatattgaaaagaaaaccgaaacaaaaccagacccagccctacactttggtttgtcatggtgtcagcgcagcagcctacaactaagttcctaaacgccactttggactaatttaaaaaagaatcccagtttttacttttactggatggtgaaattggttgctcttgtattttatgaaaaaaaatgatttttttaaccttcatacatagaagcaaaaatactttaactgctgtaaaccttcaaaagttaatagaagtgagatcatactggtttgtttcttattttgattggagaaaaattaaattgctgcatttcgcagtgacccatttacatggcattctcagcttagactgcgtaagaagaaatatatgtggtgaaatgttggaaccatttctctcttggtctctgtttaatgttgaaagggtgagctaataggaggcactttcaacttcactccctcacgctaccccgtccccctccagactggcagtttcaaggatgcaaattgcattgcaaaatcaaactgactcatgaagcatttgggccagtgcactgtttacttccatctgtttgcagacacatttgtgcccggcgtttgggagccctttgtatcaatgttctgacaagggtccctataaccttaacctactcgaaaccggtttgggatggatatgatggggcttctgtgctattgctgggattgggagaaataaaacatgcaatttaagtggaagcgaagaaatttaaagaggattttattttgcttgggtcaatccttgttaaaagggaggtggatgtgttttccttgtgttggatggcatgagattatgtgaatgttttgatttattaaaatgaactgcaaggtttttcacaggaacgacagacatgtatgactgcatgtaattataaactcctgacctcctggtggggttggagcatctgtttcaaatgtgggacttacaagcacttctcacatgagaaattaggggcgggtgggaagggatgggacacagcttctggcaccatggatttaagaccatgttggatccaaaagttggcctgaaaccctgaagcttatgcttcacagctgggctgtaagtcagacttgaacccagctgatatgcaaggtcatggcgtgcccagggtggtgacagttgaacaaagtgtatagtacgtgcccagtggtagcgatggaaaaaagtataccaaatggactttgaaggaccaaaggttttaaaagtcaattggtatcacctccacactgactagggtagtggggtgcatttggttttcaaattgggtacttttaacactttagtgcctgactgctgttctttactgacttgattcagtcactcgtagctttattggtctgaaccagctccttgttcccaggttacagacctgcctatcgttccaataatcctgtttcacttgaatgaagggagtatgtcttaaatgtaaagtttctggttctcacactgtactctgaggtccaaatactgtctgtcaatgtgtaacctgatgtctcaaccccctgtgagaagagtccattatttggtgttcaccaacgtgggagacttcaccggaacaggcttttttgctttgggctctgctatttgtttgcagaacacccaagagcgagcaaacatgctctcttcacagcagtaccttagggttttgccattgtaaatgggtctgatgtgatatgacaagaccagagaaattggatgtaaatttacatttttgaatatgcttgttgtttcacatgatacatttagggtatgcagctccttttgtagtttttatttttactatttaagtttggaaatgatgccaaatttttgtatttctttaatcaatgtgttctcttcggtgatatatattgcattatatattgatgtgtgtatcaatatatattgatatgtattacacttacacatacaaacacatataagagggggtgaaaaccgtagcctttgcattctctatagcctctgcagagagatactaagcagcaaaatcttggtgttgtgatgtacagaaatggagaagagtattaaaccatatttaagaatata

SEQ ID NO: 12121 - protein, 437 aa, Homo sapiens; identical to SEQ ID NO: 1165

SEQ ID NO: 12122 - DNA, 2345 bp, Homo sapiens
gatgtcacaggccccatgtgagcggattgcaacacatgcagctgcctggagagagggagccggtgtcctacgtcagagccgccgccgccgcggagccgccgccggggaggagcagccgctgccgcccaggactgggcccttagggaggaggaggcgagaagatggcggacgaccccagtgctgccgacaggaacgtggagatctggaagatcaagaagctcattaagagcttggaggcggcccgcggcaatggcaccagcatgatatcattgatcattcctcccaaagaccagatttcacgagtggcaaaaatgttagcggatgagtttggaactgcatctaacattaagtcacgagtaaaccgcctttcagtcctgggagccattacatctgtacaacaaagactcaaactttataacaaagtacctccaaatggtctggttgtatactgtggaacaattgtaacagaagaaggaaaggaaaagaaagtcaacattgactttgaacctttcaaaccaattaatacgtcattgtatttgtgtgacaacaaattccatacagaggctcttacagcactactttcagatgatagcaagtttggattcattgtaatagatggtagtggtgcactttttggcacactccaaggaaacacaagagaagtcctgcacaaattcactgtggatctcccaaagaaacacggtagaggaggtcagtcagccttgcgttttgcccgtttaagaatggaaaagcgacataactatgttcggaaagtagcagagactgctgtgcagctgtttatttctggggacaaagtgaatgtggctggtctagttttagctggatccgctgactttaaaactgaactaagtcaatctgatatgtttgatcagaggttacaatcaaaagttttaaaattagttgatatatcctatggtggtgaaaatggattcaaccaagctattgagttatctactgaagtcctctccaacgtgaaattcattcaagagaagaaattaataggacgatactttgatgaaatcagccaggacacgggcaagtactgttttggcgttgaagatacactaaaggctttggaaatgggagctgtagaaattctaatagtctatgaaaatctggatataatgagatatgttcttcattgccaaggcacagaagaggagaaaattctctatctaactccagagcaagaaaaggataaatctcatttcacagacaaagagaccggacaggaacatgagcttatcgagagcatgcccctgttggaatggtttgctaacaactataaaaaatttggagctacgttggaaattgtcacagataaatcacaagaagggtctcagtttgtgaaaggatttggtggaattggaggtatcttgcggtaccgagtagatttccagggaatggaataccaaggaggagacgatgaattttttgaccttgatgactactaggtagtcgacatgggtccggcaaaacgtgcctcaccctccagcatccaacccaaggagcatacccatggtggaatccaaacagatccctgccttacaattggaacatttccagaacttaatccatgagcattggatattgaaaagaaaaccgaaacaaaaccagacccagccctacactttggtttgtcatggtgtcagcgcagcagcctacaactaagttcctaaacgccactttggactaatttaaaaaagaatcccagtttttacttttactggatggtgaaattggttgctcttgtattttatgaaaaaaaatgatttttttaaccttcatacatagaagcaaaaatactttaactgctgtaaaccttcaaaagttaatagaagtgagatcatactggtttgtttcttattttgattggagaaaaattaaattgctgcatttcgcagtgacccatttacatggcattctcagcttagactgcgtaagaagaaatatatgtggtgaaatgttggaaccatttctctcttggtctctgtttaatgttgaaagggtgagctaataggaggcactttcaacttcactccctcacgctaccccgtccccctccagactggcagtttcaaggatgcaaattgcattgcaaaatcaaactgactcatgaagcatttgggccagtgcactgtttacttccatctgtttgcagacacatttgtgcccggcgtttgggagccctttgtatcaatgttctgacaagggtccctataaccttaacctactcgaaaccggtttgggatggatatgatggggcttctgtgctattgctgggattgggagaaataaaacatgcaatttaagtggaagcgaag

SEQ ID NO: 12123 - protein, 437 aa, Homo sapiens; identical to SEQ ID NO: 1165

SEQ ID NO: 12124 - DNA, 1871 bp, Homo sapiens
gatgtcacaggccccatgtgagcggattgcaacacatgcagctgcctggagagagggagccggtgtcctacgtcagagccgccgccgccgcggagccgccgccggggaggagcagccgctgccgcccaggactgggcccttagggaggaggaggcgagaagatggcggacgaccccagtgctgccgacaggaacgtggagatctggaagatcaagaagctcattaagagcttggaggcggcccgcggcaatggcaccagcatgatatcattgatcattcctcccaaagaccagatttcacgagtggcaaaaatgttagcggatgagtttggaactgcatctaacattaagtcacgagtaaaccgcctttcagtcctgggagccattacatctgtacaacaaagactcaaactttataacaaagtacctccaaatggtctggttgtatactgtggaacaattgtaacagaagaaggaaaggaaaagaaagtcaacattgactttgaacctttcaaaccaattaatacgtcattgtatttgtgtgacaacaaattccatacagaggctcttacagcactactttcagatgatagcaagtttggattcattgtaatagatggtagtggtgcactttttggcacactccaaggaaacacaagagaagtcctgcacaaattcactgtggatctcccaaagaaacacggtagaggaggtcagtcagccttgcgttttgcccgtttaagaatggaaaagcgacataactatgttcggaaagtagcagagactgctgtgcagctgtttatttctggggacaaagtgaatgtggctggtctagttttagctggatccgctgactttaaaactgaactaagtcaatctgatatgtttgatcagaggttacaatcaaaagttttaaaattagttgatatatcctatggtggtgaaaatggattcaaccaagctattgagttatctactgaagtcctctccaacgtgaaattcattcaagagaagaaattaataggacgatactttgatgaaatcagccaggacacgggcaagtactgttttggcgttgaagatacactaaaggctttggaaatgggagctgtagaaattctaatagtctatgaaaatctggatataatgagatatgttcttcattgccaaggcacagaagaggagaaaattctctatctaactccagagcaagaaaaggataaatctcatttcacagacaaagagaccggacaggaacatgagcttatcgagagcatgcccctgttggaatggtttgctaacaactataaaaaatttggagctacgttggaaattgtcacagataaatcacaagaagggtctcagtttgtgaaaggatttggtggaattggaggtatcttgcggtaccgagtagatttccagggaatggaataccaaggaggagacgatgaattttttgaccttgatgactactaggtagtcgacatgggtccggcaaaacgtgcctcaccctccagcatccaacccaaggagcatacccatggtggaatccaaacagatccctgccttacaattggaacatttccagaacttaatccatgagcattggatattgaaaagaaaaccgaaacaaaaccagacccagccctacactttggtttgtcatggtgtcagcgcagcagcctacaactaagttcctaaacgccactttggactaatttaaaaaagaatcccagtttttacttttactggatggtgaaattggttgctcttgtattttatgaaaaaaaatgatttttttaaccttcatacatagaagcaaaaatactttaactgctgtaaaccttcaaaagttaatagaagtgagatcat

SEQ ID NO: 12125 - protein, 437 aa, Homo sapiens; identical to SEQ ID NO: 1165

SEQ ID NO: 12126 - DNA, 3938 bp, Homo sapiens
gggcagtcgctggcgctgccgctggtggtccctgtgcttgaagtgccggtggtatcggagtccatgcacccaaggcccagcacccagcaacattctctggcccagcagaggggataccccaaaccaagacagatgtctcacaaaacacaagcagagatgtcagtcttcaggcctcgcatggagaagatgaaagagaggggtggcttttccaaagcccagcgtcagcacgaagcttccacgagatgattttccctcttattttgaagtcctgaaatgactgctgtccatgcaggcaacataaacttcaagtgggatcctaaaagtctagagatcaggactctggcagttgagagactgttggagcctcttgttacacaggttacaacccttgtaaacaccaatagtaaagggccctctaataagaagagaggtcgttctaagaaggcccatgttttggctgcatctgttgaacaagcaactgagaatttcttggagaagggggataaaattgcgaaggagagccagtttctcaaggaggagcttgtggctgctgtagaagatgttcgaaaacaaggtgatttgatgaaggctgctgcaggagagttcgcagatgatccctgctcttctgtgaagcgaggcaacatggttcgggcagctcgagctttgctctctgctgttacccggttgctgattttggctgacatggcagatgtctacaaattacttgttcagctgaaagttgtggaagatggtatcttgaagttgaggaatgctggcaatgaacaagacttaggaatccagtataaagccctaaaacctgaagtggataagctgaacattatggcagccaaaagacaacaggaattgaaagatgttggccatcgtgatcagatggctgcagctagaggaatcctgcagaagaacgttccgatcctctatactgcatcccaggcatgcctacagcaccctgatgtcgcagcctataaggccaacagggacctgatatacaagcagctgcagcaggcggtcacaggcatttccaatgcagcccaggccactgcctcagacgatgcctcacagcaccagggtggaggaggaggagaactggcatatgcactcaataactttgacaaacaaatcattgtggaccccttgagcttcagcgaggagcgctttaggccttccctggaggagcgtctggaaagcatcattagtggggctgccttgatggccgactcgtcctgcacgcgtgatgaccgtcgtgagcgaattgtggcagagtgtaatgctgtccgccaggccctgcaggacctgctttcggagtacatgggcaatgctggacgtaaagaaagaagtgatgcactcaattctgcaatagataaaatgaccaagaagaccagggacttgcgtagacagctccgcaaagctgtcatggaccacgtttcagattctttcctggaaaccaatgttccacttttggtattgattgaagctgcaaagaatggaaatgagaaagaagttaaggagtatgcccaagttttccgtgaacatgccaacaaattgattgaggttgccaacttggcctgttccatctcaaataatgaagaaggtgtaaagcttgttcgaatgtctgcaagccagttagaagccctctgtcctcaggttattaatgctgcactggctttagcagcaaaaccacagagtaaactggcccaagagaacatggatctttttaaagaacaatgggaaaaacaagtccgtgttctcacagatgctgtcgatgacattacttccattgatgacttcttggctgtctcagagaatcacattttggaagatgtgaacaaatgtgtcattgctctccaagagaaggatgtggatggcctggaccgcacagctggtgcaattcgaggccgggcagcccgggtcattcacgtagtcacctcagagatggacaactatgagccaggagtctacacagagaaggttctggaagccactaagctgctctccaacacagtcatgccacgttttactgagcaagtagaagcagccgtggaagccctcagctcggaccctgcccagcccatggatgagaatgagtttatcgatgcttcccgcctggtatatgatggcatccgggacatcaggaaagcagtgctgatgataaggacccctgaggagttggatgactctgactttgagacagaagattttgatgtcagaagcaggacgagcgtccagacagaagacgatcagctgatagctggccagagtgcccgggcgatcatggctcagcttccccaggagcaaaaagcgaagattgcggaacaggtggccagcttccaggaagaaaagagcaagctggatgctgaagtgtccaaatgggacgacagtggcaatgacatcattgtgctggccaagcagatgtgcatgattatgatggagatgacagactttacccgaggtaaaggaccactcaaaaatacatcggatgtcatcagtgctgccaagaaaattgctgaggcaggatccaggatggacaagcttggccgcaccattgcagaccattgccccgactcggcttgcaagcaggacctgctggcctacctgcaacgcatcgccctctactgccaccagctgaacatctgcagcaaggtcaaggccgaggtgcagaatctcggcggggagcttgttgtctctggggtggacagcgccatgtccctgatccaggcagccaagaacttgatgaatgctgtggtgcagacagtgaaggcatcctacgtcgcctctaccaaataccaaaagtcacagggtatggcttccctcaaccttcctgctgtgtcatggaagatgaaggcaccagagaaaaagccattggtgaagagagagaaacaggatgagacacagaccaagattaaacgggcatctcagaagaagcacgtgaacccggtgcaggccctcagcgagttcaaagctatggacagcatctaagtctgcccaggccggccgcccccacccctcggggctcctgaatatcagtcactgttcgtcactcaaatgaatttgctaaatacaacactgatactagattccacagggaaatgggcagactgaaccagtccaggtggtgaattttccaagaacatagtttaagttgattaaaaatgcttttagaatgcaggagcctacttctagctgtattttttgtatgcttaaataaaaataaaaattcataaccaaagagaatcccacattagcttgttagtaatgctctgaccaagccgagatgcccattctcttagtgatggcggcgttagggtttgagagaagggaatttggctcaacttcagttgagagggtgcagtccagacagcttgactgcttttaaatgaccaaagatgacctgtggtaagcaacctgggcatcttaggaagcagtccctggagaaggcatgttcccagaaaggtctctggagggacaaactcactcagtaaaacataatgtatcatgaagaaaactgattctctatgacatgaaatgaaaattttaatgcattgttataattactaatgtacgctgctgcaggacattaataaagttgcttttttaggctacagtgtctcgatgccataatcagaacacactttttttcctctttctcccagcttcaaatgcaaattcatcattgggctcacttctaataactgcagtgtttcccgccttgggcttgcagcagaaaaacctgacaacatagtgtttgctaaggcagtaatttagactttaccttatttgtgattactgtagtgattgattgattgattactattaactacaaggtataatttactatcaccttatttaaattttatgaattaatttgaatgttttttacactaactaacttttcccaataaagtccactatgaaaccacgac

SEQ ID NO: 12127 - protein, 906 aa, Homo sapiens; identical to SEQ ID NO: 1167

SEQ ID NO: 12128 - DNA, 4565 bp, Homo sapiens
gggcagtcgctggcgctgccgctggtggtccctgtgcttgaagtgccggtggtatcggagtccatgcacccaaggcccagcacccagcaacattctctggcccagcagaggggataccccaaaccaagacagatgtctcacaaaacacaagcagagatgtcagtcttcaggcctcgcatggagaagatgaaagagaggggtggcttttccaaagcccagcgtcagcacgaagcttccacgagatgattttccctcttattttgaagtcctgaaatgactgctgtccatgcaggcaacataaacttcaagtgggatcctaaaagtctagagatcaggactctggcagttgagagactgttggagcctcttgttacacaggttacaacccttgtaaacaccaatagtaaagggccctctaataagaagagaggtcgttctaagaaggcccatgttttggctgcatctgttgaacaagcaactgagaatttcttggagaagggggataaaattgcgaaggagagccagtttctcaaggaggagcttgtggctgctgtagaagatgttcgaaaacaaggtgatttgatgaaggctgctgcaggagagttcgcagatgatccctgctcttctgtgaagcgaggcaacatggttcgggcagctcgagctttgctctctgctgttacccggttgctgattttggctgacatggcagatgtctacaaattacttgttcagctgaaagttgtggaagatggtatcttgaagttgaggaatgctggcaatgaacaagacttaggaatccagtataaagccctaaaacctgaagtggataagctgaacattatggcagccaaaagacaacaggaattgaaagatgttggccatcgtgatcagatggctgcagctagaggaatcctgcagaagaacgttccgatcctctatactgcatcccaggcatgcctacagcaccctgatgtcgcagcctataaggccaacagggacctgatatacaagcagctgcagcaggcggtcacaggcatttccaatgcagcccaggccactgcctcagacgatgcctcacagcaccagggtggaggaggaggagaactggcatatgcactcaataactttgacaaacaaatcattgtggaccccttgagcttcagcgaggagcgctttaggccttccctggaggagcgtctggaaagcatcattagtggggctgccttgatggccgactcgtcctgcacgcgtgatgaccgtcgtgagcgaattgtggcagagtgtaatgctgtccgccaggccctgcaggacctgctttcggagtacatgggcaatgctggacgtaaagaaagaagtgatgcactcaattctgcaatagataaaatgaccaagaagaccagggacttgcgtagacagctccgcaaagctgtcatggaccacgtttcagattctttcctggaaaccaatgttccacttttggtattgattgaagctgcaaagaatggaaatgagaaagaagttaaggagtatgcccaagttttccgtgaacatgccaacaaattgattgaggttgccaacttggcctgttccatctcaaataatgaagaaggtgtaaagcttgttcgaatgtctgcaagccagttagaagccctctgtcctcaggttattaatgctgcactggctttagcagcaaaaccacagagtaaactggcccaagagaacatggatctttttaaagaacaatgggaaaaacaagtccgtgttctcacagatgctgtcgatgacattacttccattgatgacttcttggctgtctcagagaatcacattttggaagatgtgaacaaatgtgtcattgctctccaagagaaggatgtggatggcctggaccgcacagctggtgcaattcgaggccgggcagcccgggtcattcacgtagtcacctcagagatggacaactatgagccaggagtctacacagagaaggttctggaagccactaagctgctctccaacacagtcatgccacgttttactgagcaagtagaagcagccgtggaagccctcagctcggaccctgcccagcccatggatgagaatgagtttatcgatgcttcccgcctggtatatgatggcatccgggacatcaggaaagcagtgctgatgataaggacccctgaggagttggatgactctgactttgagacagaagattttgatgtcagaagcaggacgagcgtccagacagaagacgatcagctgatagctggccagagtgcccgggcgatcatggctcagcttccccaggagcaaaaagcgaagattgcggaacaggtggccagcttccaggaagaaaagagcaagctggatgctgaagtgtccaaatgggacgacagtggcaatgacatcattgtgctggccaagcagatgtgcatgattatgatggagatgacagactttacccgaggtaaaggaccactcaaaaatacatcggatgtcatcagtgctgccaagaaaattgctgaggcaggatccaggatggacaagcttggccgcaccattgcagaccattgccccgactcggcttgcaagcaggacctgctggcctacctgcaacgcatcgccctctactgccaccagctgaacatctgcagcaaggtcaaggccgaggtgcagaatctcggcggggagcttgttgtctctggggtggacagcgccatgtccctgatccaggcagccaagaacttgatgaatgctgtggtgcagacagtgaaggcatcctacgtcgcctctaccaaataccaaaagtcacagggtatggcttccctcaaccttcctgctgtgtcatggaagatgaaggcaccagagaaaaagccattggtgaagagagagaaacaggatgagacacagaccaagattaaacgggcatctcagaagaagcacgtgaacccggtgcaggccctcagcgagttcaaagctatggacagcatctaagtctgcccaggccggccgcccccacccctcggggctcctgaatatcagtcactgttcgtcactcaaatgaatttgctaaatacaacactgatactagattccacagggaaatgggcagactgaaccagtccaggtggtgaattttccaagaacatagtttaagttgattaaaaatgcttttagaatgcaggagcctacttctagctgtattttttgtatgcttaaataaaaataaaaattcataaccaaagagaatcccacattagcttgttagtaatgctctgaccaagccgagatgcccattctcttagtgatggcggcgttagggtttgagagaagggaatttggctcaacttcagttgagagggtgcagtccagacagcttgactgcttttaaatgaccaaagatgacctgtggtaagcaacctgggcatcttaggaagcagtccctggagaaggcatgttcccagaaaggtctctggagggacaaactcactcagtaaaacataatgtatcatgaagaaaactgattctctatgacatgaaatgaaaattttaatgcattgttataattactaatgtacgctgctgcaggacattaataaagttgcttttttaggctacagtgtctcgatgccataatcagaacacactttttttcctctttctcccagcttcaaatgcaaattcatcattgggctcacttctaataactgcagtgtttcccgccttgggcttgcagcagaaaaacctgacaacatagtgtttgctaaggcagtaatttagactttaccttatttgtgattactgtagtgattgattgattgattactattaactacaaggtataatttactatcaccttatttaaattttatgaattaatttgaatgttttttacactaactaacttttcccaataaagtccactatgaaaccacgacatccaagagcccaaagtcgtcttctctgccttcaagtcatagatttgcccgcagtatctgtggtgctctgggccctcccggtgtccgtctcttccaggatggggatgcccgggagggaaactgtctgtggctctaggctgcacggctcgtgccaacccatcagggagggccatgcccgttgtcctattgagtgccccaccctgcacccccaccttgggaattcacatgtccattccttgaggttcatgtcaacctcggaggcatccctgtcttcattatagctgacccctctcctgcgtccttctgtcagcatatcccttctgcatccttcccgtcacacatacataccaagctatgatgattgattgatagtggccttcgagatgaaaaccatccttaaccccatgatccttcccagctggcatccccaccctaagcaaggttccctaaagagaagcttgttgacattttctccccttcctcacttacagtcagctgtcaccttgctccctccacctcccctcgtcaaggtgactgccttccactgccagccacactggcaattgtcttgagacctcactgtgcaagcggcctgggggcgtggcggggaggaggaggaggacaagg

SEQ ID NO: 12129 - protein, 906 aa, Homo sapiens; identical to SEQ ID NO: 1167

SEQ ID NO: 12130 - DNA, 587 bp, Homo sapiens
cctcccgccgccgccccgcccgctcctcccggccgttccggcctccgcttttggggaaagggaaggcccccaccgcgaagagagtctggcaacgccggaccgggacccccgagggacctcttcctccccgccgcccacctcagaattccttcctccccggcccctagtgggagcttaggccgggagtgacccctgagagggaggaggagcggtgactcctggaacagcccgcgggcggagagggctgcgcgagggcagtggcagagccattgaaaacacaccactctattcagaacccctccagaaacactgagtacgcgtggatacaaaggagaaaaccgaagacacctgggcctacttgagagcggagggtgggaggagcgtgaggatcgaaaaactacctatggcttactacgcttattacctgggtgacaaaataatctttacaccaaacccccatgacatacaattaatttatccatgcacatgtaccctctgaaccaaaaataaaagttggaaagtaaaggaaaaaaaaaatcaccctccagtgcttcccatctcactctgaataaaatttatttgatctc

SEQ ID NO: 12131 - protein, 31 aa, Homo sapiens
MAYYAYYLGDKIIFTPNPHDIQLIYPCTCTL

SEQ ID NO: 12132 - DNA, 3456 bp, Homo sapiens
ccatttcctcctcctagccggactggagggagacaaagcagcgcccgtctgcttcgggcctctggaatttagcgctcgcccagctagccgcagaaatgactgctgtccatgcaggcaacataaacttcaagtgggatcctaaaagtctagagatcaggactctggcagttgagagactgttggagcctcttgttacacaggttacaacccttgtaaacaccaatagtaaagggccctctaataagaagagaggtcgttctaagaaggcccatgttttggctgcatctgttgaacaagcaactgagaatttcttggagaagggggataaaattgcgaaggagagccagtttctcaaggaggagcttgtggctgctgtagaagatgttcgaaaacaaggtgatttgatgaaggctgctgcaggagagttcgcagatgatccctgctcttctgtgaagcgaggcaacatggttcgggcagctcgagctttgctctctgctgttacccggttgctgattttggctgacatggcagatgtctacaaattacttgttcagctgaaagttgtggaagatggtatcttgaagttgaggaatgctggcaatgaacaagacttaggaatccagtataaagccctaaaacctgaagtggataagctgaacattatggcagccaaaagacaacaggaattgaaagatgttggccatcgtgatcagatggctgcagctagaggaatcctgcagaagaacgttccgatcctctatactgcatcccaggcatgcctacagcaccctgatgtcgcagcctataaggccaacagggacctgatatacaagcagctgcagcaggcggtcacaggcatttccaatgcagcccaggccactgcctcagacgatgcctcacagcaccagggtggaggaggaggagaactggcatatgcactcaataactttgacaaacaaatcattgtggaccccttgagcttcagcgaggagcgctttaggccttccctggaggagcgtctggaaagcatcattagtggggctgccttgatggccgactcgtcctgcacgcgtgatgaccgtcgtgagcgaattgtggcagagtgtaatgctgtccgccaggccctgcaggacctgctttcggagtacatgggcaatgctggacgtaaagaaagaagtgatgcactcaattctgcaatagataaaatgaccaagaagaccagggacttgcgtagacagctccgcaaagctgtcatggaccacgtttcagattctttcctggaaaccaatgttccacttttggtattgattgaagctgcaaagaatggaaatgagaaagaagttaaggagtatgcccaagttttccgtgaacatgccaacaaattgattgaggttgccaacttggcctgttccatctcaaataatgaagaaggtgtaaagcttgttcgaatgtctgcaagccagttagaagccctctgtcctcaggttattaatgctgcactggctttagcagcaaaaccacagagtaaactggcccaagagaacatggatctttttaaagaacaatgggaaaaacaagtccgtgttctcacagatgctgtcgatgacattacttccattgatgacttcttggctgtctcagagaatcacattttggaagatgtgaacaaatgtgtcattgctctccaagagaaggatgtggatggcctggaccgcacagctggtgcaattcgaggccgggcagcccgggtcattcacgtagtcacctcagagatggacaactatgagccaggagtctacacagagaaggttctggaagccactaagctgctctccaacacagtcatgccacgttttactgagcaagtagaagcagccgtggaagccctcagctcggaccctgcccagcccatggatgagaatgagtttatcgatgcttcccgcctggtatatgatggcatccgggacatcaggaaagcagtgctgatgataaggacccctgaggagttggatgactctgactttgagacagaagattttgatgtcagaagcaggacgagcgtccagacagaagacgatcagctgatagctggccagagtgcccgggcgatcatggctcagcttccccaggagcaaaaagcgaagattgcggaacaggtggccagcttccaggaagaaaagagcaagctggatgctgaagtgtccaaatgggacgacagtggcaatgacatcattgtgctggccaagcagatgtgcatgattatgatggagatgacagactttacccgaggtaaaggaccactcaaaaatacatcggatgtcatcagtgctgccaagaaaattgctgaggcaggatccaggatggacaagcttggccgcaccattgcagaccattgccccgactcggcttgcaagcaggacctgctggcctacctgcaacgcatcgccctctactgccaccagctgaacatctgcagcaaggtcaaggccgaggtgcagaatctcggcggggagcttgttgtctctggggtggacagcgccatgtccctgatccaggcagccaagaacttgatgaatgctgtggtgcagacagtgaaggcatcctacgtcgcctctaccaaataccaaaagtcacagggtatggcttccctcaaccttcctgctgtgtcatggaagatgaaggcaccagagaaaaagccattggtgaagagagagaaacaggatgagacacagaccaagattaaacgggcatctcagaagaagcacgtgaacccggtgcaggccctcagcgagttcaaagctatggacagcatctaagtctgcccaggccggccgcccccacccctcggggctcctgaatatcagtcactgttcgtcactcaaatgaatttgctaaatacaacactgatactagattccacagggaaatgggcagactgaaccagtccaggtggtgaattttccaagaacatagtttaagttgattaaaaatgcttttagaatgcaggagcctacttctagctgtattttttgtatgcttaaataaaaataaaaattcataaccaaagagaatcccacattagcttgttagtaatgctctgaccaagccgagatgcccattctcttagtgatggcggcgttagggtttgagagaagggaatttggctcaacttcagttgagagggtgcagtccagacagcttgactgcttttaaatgaccaaagatgacctgtggtaagcaacctgggcatcttaggaagcagtccctggagaaggcatgttcccagaaaggtctctggagggacaaactcactcagtaaaacataatgtatcatgaagaaaactgattctctatgacatgaaatgaaaattttaatgcattgttataattactaatgtacgctgctgcaggacattaataaagttgcttttttaggctacagtgtctcgatgccat

SEQ ID NO: 12133 - protein, 906 aa, Homo sapiens; identical to SEQ ID NO: 1167

SEQ ID NO: 12134 - DNA, 3760 bp, Homo sapiens
ccatttcctcctcctagccggactggagggagacaaagcagcgcccgtctgcttcgggcctctggaatttagcgctcgcccagctagccgcagaaatgactgctgtccatgcaggcaacataaacttcaagtgggatcctaaaagtctagagatcaggactctggcagttgagagactgttggagcctcttgttacacaggttacaacccttgtaaacaccaatagtaaagggccctctaataagaagagaggtcgttctaagaaggcccatgttttggctgcatctgttgaacaagcaactgagaatttcttggagaagggggataaaattgcgaaggagagccagtttctcaaggaggagcttgtggctgctgtagaagatgttcgaaaacaaggtgatttgatgaaggctgctgcaggagagttcgcagatgatccctgctcttctgtgaagcgaggcaacatggttcgggcagctcgagctttgctctctgctgttacccggttgctgattttggctgacatggcagatgtctacaaattacttgttcagctgaaagttgtggaagatggtatcttgaagttgaggaatgctggcaatgaacaagacttaggaatccagtataaagccctaaaacctgaagtggataagctgaacattatggcagccaaaagacaacaggaattgaaagatgttggccatcgtgatcagatggctgcagctagaggaatcctgcagaagaacgttccgatcctctatactgcatcccaggcatgcctacagcaccctgatgtcgcagcctataaggccaacagggacctgatatacaagcagctgcagcaggcggtcacaggcatttccaatgcagcccaggccactgcctcagacgatgcctcacagcaccagggtggaggaggaggagaactggcatatgcactcaataactttgacaaacaaatcattgtggaccccttgagcttcagcgaggagcgctttaggccttccctggaggagcgtctggaaagcatcattagtggggctgccttgatggccgactcgtcctgcacgcgtgatgaccgtcgtgagcgaattgtggcagagtgtaatgctgtccgccaggccctgcaggacctgctttcggagtacatgggcaatgctggacgtaaagaaagaagtgatgcactcaattctgcaatagataaaatgaccaagaagaccagggacttgcgtagacagctccgcaaagctgtcatggaccacgtttcagattctttcctggaaaccaatgttccacttttggtattgattgaagctgcaaagaatggaaatgagaaagaagttaaggagtatgcccaagttttccgtgaacatgccaacaaattgattgaggttgccaacttggcctgttccatctcaaataatgaagaaggtgtaaagcttgttcgaatgtctgcaagccagttagaagccctctgtcctcaggttattaatgctgcactggctttagcagcaaaaccacagagtaaactggcccaagagaacatggatctttttaaagaacaatgggaaaaacaagtccgtgttctcacagatgctgtcgatgacattacttccattgatgacttcttggctgtctcagagaatcacattttggaagatgtgaacaaatgtgtcattgctctccaagagaaggatgtggatggcctggaccgcacagctggtgcaattcgaggccgggcagcccgggtcattcacgtagtcacctcagagatggacaactatgagccaggagtctacacagagaaggttctggaagccactaagctgctctccaacacagtcatgccacgttttactgagcaagtagaagcagccgtggaagccctcagctcggaccctgcccagcccatggatgagaatgagtttatcgatgcttcccgcctggtatatgatggcatccgggacatcaggaaagcagtgctgatgataaggacccctgaggagttggatgactctgactttgagacagaagattttgatgtcagaagcaggacgagcgtccagacagaagacgatcagctgatagctggccagagtgcccgggcgatcatggctcagcttccccaggagcaaaaagcgaagattgcggaacaggtggccagcttccaggaagaaaagagcaagctggatgctgaagtgtccaaatgggacgacagtggcaatgacatcattgtgctggccaagcagatgtgcatgattatgatggagatgacagactttacccgaggtaaaggaccactcaaaaatacatcggatgtcatcagtgctgccaagaaaattgctgaggcaggatccaggatggacaagcttggccgcaccattgcagaccattgccccgactcggcttgcaagcaggacctgctggcctacctgcaacgcatcgccctctactgccaccagctgaacatctgcagcaaggtcaaggccgaggtgcagaatctcggcggggagcttgttgtctctggggtggacagcgccatgtccctgatccaggcagccaagaacttgatgaatgctgtggtgcagacagtgaaggcatcctacgtcgcctctaccaaataccaaaagtcacagggtatggcttccctcaaccttcctgctgtgtcatggaagatgaaggcaccagagaaaaagccattggtgaagagagagaaacaggatgagacacagaccaagattaaacgggcatctcagaagaagcacgtgaacccggtgcaggccctcagcgagttcaaagctatggacagcatctaagtctgcccaggccggccgcccccacccctcggggctcctgaatatcagtcactgttcgtcactcaaatgaatttgctaaatacaacactgatactagattccacagggaaatgggcagactgaaccagtccaggtggtgaattttccaagaacatagtttaagttgattaaaaatgcttttagaatgcaggagcctacttctagctgtattttttgtatgcttaaataaaaataaaaattcataaccaaagagaatcccacattagcttgttagtaatgctctgaccaagccgagatgcccattctcttagtgatggcggcgttagggtttgagagaagggaatttggctcaacttcagttgagagggtgcagtccagacagcttgactgcttttaaatgaccaaagatgacctgtggtaagcaacctgggcatcttaggaagcagtccctggagaaggcatgttcccagaaaggtctctggagggacaaactcactcagtaaaacataatgtatcatgaagaaaactgattctctatgacatgaaatgaaaattttaatgcattgttataattactaatgtacgctgctgcaggacattaataaagttgcttttttaggctacagtgtctcgatgccataatcagaacacactttttttcctctttctcccagcttcaaatgcaaattcatcattgggctcacttctaataactgcagtgtttcccgccttgggcttgcagcagaaaaacctgacaacatagtgtttgctaaggcagtaatttagactttaccttatttgtgattactgtagtgattgattgattgattactattaactacaaggtataatttactatcaccttatttaaattttatgaattaatttgaatgttttttacactaactaacttttcccaataaagtccactatgaaaccacgac

SEQ ID NO: 12135 - protein, 906 aa, Homo sapiens; identical to SEQ ID NO: 1167

SEQ ID NO: 12136 - DNA, 4387 bp, Homo sapiens
ccatttcctcctcctagccggactggagggagacaaagcagcgcccgtctgcttcgggcctctggaatttagcgctcgcccagctagccgcagaaatgactgctgtccatgcaggcaacataaacttcaagtgggatcctaaaagtctagagatcaggactctggcagttgagagactgttggagcctcttgttacacaggttacaacccttgtaaacaccaatagtaaagggccctctaataagaagagaggtcgttctaagaaggcccatgttttggctgcatctgttgaacaagcaactgagaatttcttggagaagggggataaaattgcgaaggagagccagtttctcaaggaggagcttgtggctgctgtagaagatgttcgaaaacaaggtgatttgatgaaggctgctgcaggagagttcgcagatgatccctgctcttctgtgaagcgaggcaacatggttcgggcagctcgagctttgctctctgctgttacccggttgctgattttggctgacatggcagatgtctacaaattacttgttcagctgaaagttgtggaagatggtatcttgaagttgaggaatgctggcaatgaacaagacttaggaatccagtataaagccctaaaacctgaagtggataagctgaacattatggcagccaaaagacaacaggaattgaaagatgttggccatcgtgatcagatggctgcagctagaggaatcctgcagaagaacgttccgatcctctatactgcatcccaggcatgcctacagcaccctgatgtcgcagcctataaggccaacagggacctgatatacaagcagctgcagcaggcggtcacaggcatttccaatgcagcccaggccactgcctcagacgatgcctcacagcaccagggtggaggaggaggagaactggcatatgcactcaataactttgacaaacaaatcattgtggaccccttgagcttcagcgaggagcgctttaggccttccctggaggagcgtctggaaagcatcattagtggggctgccttgatggccgactcgtcctgcacgcgtgatgaccgtcgtgagcgaattgtggcagagtgtaatgctgtccgccaggccctgcaggacctgctttcggagtacatgggcaatgctggacgtaaagaaagaagtgatgcactcaattctgcaatagataaaatgaccaagaagaccagggacttgcgtagacagctccgcaaagctgtcatggaccacgtttcagattctttcctggaaaccaatgttccacttttggtattgattgaagctgcaaagaatggaaatgagaaagaagttaaggagtatgcccaagttttccgtgaacatgccaacaaattgattgaggttgccaacttggcctgttccatctcaaataatgaagaaggtgtaaagcttgttcgaatgtctgcaagccagttagaagccctctgtcctcaggttattaatgctgcactggctttagcagcaaaaccacagagtaaactggcccaagagaacatggatctttttaaagaacaatgggaaaaacaagtccgtgttctcacagatgctgtcgatgacattacttccattgatgacttcttggctgtctcagagaatcacattttggaagatgtgaacaaatgtgtcattgctctccaagagaaggatgtggatggcctggaccgcacagctggtgcaattcgaggccgggcagcccgggtcattcacgtagtcacctcagagatggacaactatgagccaggagtctacacagagaaggttctggaagccactaagctgctctccaacacagtcatgccacgttttactgagcaagtagaagcagccgtggaagccctcagctcggaccctgcccagcccatggatgagaatgagtttatcgatgcttcccgcctggtatatgatggcatccgggacatcaggaaagcagtgctgatgataaggacccctgaggagttggatgactctgactttgagacagaagattttgatgtcagaagcaggacgagcgtccagacagaagacgatcagctgatagctggccagagtgcccgggcgatcatggctcagcttccccaggagcaaaaagcgaagattgcggaacaggtggccagcttccaggaagaaaagagcaagctggatgctgaagtgtccaaatgggacgacagtggcaatgacatcattgtgctggccaagcagatgtgcatgattatgatggagatgacagactttacccgaggtaaaggaccactcaaaaatacatcggatgtcatcagtgctgccaagaaaattgctgaggcaggatccaggatggacaagcttggccgcaccattgcagaccattgccccgactcggcttgcaagcaggacctgctggcctacctgcaacgcatcgccctctactgccaccagctgaacatctgcagcaaggtcaaggccgaggtgcagaatctcggcggggagcttgttgtctctggggtggacagcgccatgtccctgatccaggcagccaagaacttgatgaatgctgtggtgcagacagtgaaggcatcctacgtcgcctctaccaaataccaaaagtcacagggtatggcttccctcaaccttcctgctgtgtcatggaagatgaaggcaccagagaaaaagccattggtgaagagagagaaacaggatgagacacagaccaagattaaacgggcatctcagaagaagcacgtgaacccggtgcaggccctcagcgagttcaaagctatggacagcatctaagtctgcccaggccggccgcccccacccctcggggctcctgaatatcagtcactgttcgtcactcaaatgaatttgctaaatacaacactgatactagattccacagggaaatgggcagactgaaccagtccaggtggtgaattttccaagaacatagtttaagttgattaaaaatgcttttagaatgcaggagcctacttctagctgtattttttgtatgcttaaataaaaataaaaattcataaccaaagagaatcccacattagcttgttagtaatgctctgaccaagccgagatgcccattctcttagtgatggcggcgttagggtttgagagaagggaatttggctcaacttcagttgagagggtgcagtccagacagcttgactgcttttaaatgaccaaagatgacctgtggtaagcaacctgggcatcttaggaagcagtccctggagaaggcatgttcccagaaaggtctctggagggacaaactcactcagtaaaacataatgtatcatgaagaaaactgattctctatgacatgaaatgaaaattttaatgcattgttataattactaatgtacgctgctgcaggacattaataaagttgcttttttaggctacagtgtctcgatgccataatcagaacacactttttttcctctttctcccagcttcaaatgcaaattcatcattgggctcacttctaataactgcagtgtttcccgccttgggcttgcagcagaaaaacctgacaacatagtgtttgctaaggcagtaatttagactttaccttatttgtgattactgtagtgattgattgattgattactattaactacaaggtataatttactatcaccttatttaaattttatgaattaatttgaatgttttttacactaactaacttttcccaataaagtccactatgaaaccacgacatccaagagcccaaagtcgtcttctctgccttcaagtcatagatttgcccgcagtatctgtggtgctctgggccctcccggtgtccgtctcttccaggatggggatgcccgggagggaaactgtctgtggctctaggctgcacggctcgtgccaacccatcagggagggccatgcccgttgtcctattgagtgccccaccctgcacccccaccttgggaattcacatgtccattccttgaggttcatgtcaacctcggaggcatccctgtcttcattatagctgacccctctcctgcgtccttctgtcagcatatcccttctgcatccttcccgtcacacatacataccaagctatgatgattgattgatagtggccttcgagatgaaaaccatccttaaccccatgatccttcccagctggcatccccaccctaagcaaggttccctaaagagaagcttgttgacattttctccccttcctcacttacagtcagctgtcaccttgctccctccacctcccctcgtcaaggtgactgccttccactgccagccacactggcaattgtcttgagacctcactgtgcaagcggcctgggggcgtggcggggaggaggaggaggacaagg

SEQ ID NO: 12137 - protein, 906 aa, Homo sapiens; identical to SEQ ID NO: 1167

SEQ ID NO: 12138 - DNA, 3028 bp, Homo sapiens
catttcctcctcctagccggactggagggagacaaagcagcgcccgtctgcttcgggcctctggaatttagcgctcgcccagctagccgcagaaatgactgctgtccatgcaggcaacataaacttcaagtgggatcctaaaagtctagagatcaggactctggcagttgagagactgttggagcctcttgttacacaggttacaacccttgtaaacaccaatagtaaagggccctctaataagaagagaggtcgttctaagaaggcccatgttttggctgcatctgttgaacaacatcattagtggggctgccttgatggccgactcgtcctgcacgcgtgatgaccgtcgtgagcgaattgtggcagagtgtaatgctgtccgccaggccctgcaggacctgctttcggagtacatgggcaatgctggacgtaaagaaagaagtgatgcactcaattctgcaatagataaaatgaccaagaagaccagggacttgcgtagacagctccgcaaagctgtcatggaccacgtttcagattctttcctggaaaccaatgttccacttttggtattgattgaagctgcaaagaatggaaatgagaaagaagttaaggagtatgcccaagttttccgtgaacatgccaacaaattgattgaggttgccaacttggcctgttccatctcaaataatgaagaaggtgtaaagcttgttcgaatgtctgcaagccagttagaagccctctgtcctcaggttattaatgctgcactggctttagcagcaaaaccacagagtaaactggcccaagagaacatggatctttttaaagaacaatgggaaaaacaagtccgtgttctcacagatgctgtcgatgacattacttccattgatgacttcttggctgtctcagagaatcacattttggaagatgtgaacaaatgtgtcattgctctccaagagaaggatgtggatggcctggaccgcacagctggtgcaattcgaggccgggcagcccgggtcattcacgtagtcacctcagagatggacaactatgagccaggagtctacacagagaaggttctggaagccactaagctgctctccaacacagtcatgccacgttttactgagcaagtagaagcagccgtggaagccctcagctcggaccctgcccagcccatggatgagaatgagtttatcgatgcttcccgcctggtatatgatggcatccgggacatcaggaaagcagtgctgatgataaggacccctgaggagttggatgactctgactttgagacagaagattttgatgtcagaagcaggacgagcgtccagacagaagacgatcagctgatagctggccagagtgcccgggcgatcatggctcagcttccccaggagcaaaaagcgaagattgcggaacaggtggccagcttccaggaagaaaagagcaagctggatgctgaagtgtccaaatgggacgacagtggcaatgacatcattgtgctggccaagcagatgtgcatgattatgatggagatgacagactttacccgaggtaaaggaccactcaaaaatacatcggatgtcatcagtgctgccaagaaaattgctgaggcaggatccaggatggacaagcttggccgcaccattgcagaccattgccccgactcggcttgcaagcaggacctgctggcctacctgcaacgcatcgccctctactgccaccagctgaacatctgcagcaaggtcaaggccgaggtgcagaatctcggcggggagcttgttgtctctggggtggacagcgccatgtccctgatccaggcagccaagaacttgatgaatgctgtggtgcagacagtgaaggcatcctacgtcgcctctaccaaataccaaaagtcacagggtatggcttccctcaaccttcctgctgtgtcatggaagatgaaggcaccagagaaaaagccattggtgaagagagagaaacaggatgagacacagaccaagattaaacgggcatctcagaagaagcacgtgaacccggtgcaggccctcagcgagttcaaagctatggacagcatctaagtctgcccaggccggccgcccccacccctcggggctcctgaatatcagtcactgttcgtcactcaaatgaatttgctaaatacaacactgatactagattccacagggaaatgggcagactgaaccagtccaggtggtgaattttccaagaacatagtttaagttgattaaaaatgcttttagaatgcaggagcctacttctagctgtattttttgtatgcttaaataaaaataaaaattcataaccaaagagaatcccacattagcttgttagtaatgctctgaccaagccgagatgcccattctcttagtgatggcggcgttagggtttgagagaagggaatttggctcaacttcagttgagagggtgcagtccagacagcttgactgcttttaaatgaccaaagatgacctgtggtaagcaacctgggcatcttaggaagcagtccctggagaaggcatgttcccagaaaggtctctggagggacaaactcactcagtaaaacataatgtatcatgaagaaaactgattctctatgacatgaaatgaaaattttaatgcattgttataattactaatgtacgctgctgcaggacattaataaagttgcttttttaggctacagtgtctcgatgccataatcagaacacactttttttcctctttctcccagcttcaaatgcaaattcatcattgggctcacttctaataactgcagtgtttcccgccttgggcttgcagcagaaaaacctgacaacatagtgtttgctaaggcagtaatttagactttaccttatttgtgattactgtagtgattgattgattgattactattaactacaaggtataatttactatcaccttatttaaattttatgaattaatttgaatgttttttacactaactaacttttcccaataaagtccactatgaaaccacgac

SEQ ID NO: 12139 - protein, 604 aa, Homo sapiens
MFWLHLLNNIISGAALMADSSCTRDDRRERIVAECNAVRQALQDLLSEYMGNAGRKERSDALNSAIDKMTKKTRDLRRQLRKAVMDHVSDSFLETNVPLLVLIEAAKNGNEKEVKEYAQVFREHANKLIEVANLACSISNNEEGVKLVRMSASQLEALCPQVINAALALAAKPQSKLAQENMDLFKEQWEKQVRVLTDAVDDITSIDDFLAVSENHILEDVNKCVIALQEKDVDGLDRTAGAIRGRAARVIHVVTSEMDNYEPGVYTEKVLEATKLLSNTVMPRFTEQVEAAVEALSSDPAQPMDENEFIDASRLVYDGIRDIRKAVLMIRTPEELDDSDFETEDFDVRSRTSVQTEDDQLIAGQSARAIMAQLPQEQKAKIAEQVASFQEEKSKLDAEVSKWDDSGNDIIVLAKQMCMIMMEMTDFTRGKGPLKNTSDVISAAKKIAEAGSRMDKLGRTIADHCPDSACKQDLLAYLQRIALYCHQLNICSKVKAEVQNLGGELVVSGVDSAMSLIQAAKNLMNAVVQTVKASYVASTKYQKSQGMASLNLPAVSWKMKAPEKKPLVKREKQDETQTKIKRASQKKHVNPVQALSEFKAMDSI

SEQ ID NO: 12140 - DNA, 3655 bp, Homo sapiens
catttcctcctcctagccggactggagggagacaaagcagcgcccgtctgcttcgggcctctggaatttagcgctcgcccagctagccgcagaaatgactgctgtccatgcaggcaacataaacttcaagtgggatcctaaaagtctagagatcaggactctggcagttgagagactgttggagcctcttgttacacaggttacaacccttgtaaacaccaatagtaaagggccctctaataagaagagaggtcgttctaagaaggcccatgttttggctgcatctgttgaacaacatcattagtggggctgccttgatggccgactcgtcctgcacgcgtgatgaccgtcgtgagcgaattgtggcagagtgtaatgctgtccgccaggccctgcaggacctgctttcggagtacatgggcaatgctggacgtaaagaaagaagtgatgcactcaattctgcaatagataaaatgaccaagaagaccagggacttgcgtagacagctccgcaaagctgtcatggaccacgtttcagattctttcctggaaaccaatgttccacttttggtattgattgaagctgcaaagaatggaaatgagaaagaagttaaggagtatgcccaagttttccgtgaacatgccaacaaattgattgaggttgccaacttggcctgttccatctcaaataatgaagaaggtgtaaagcttgttcgaatgtctgcaagccagttagaagccctctgtcctcaggttattaatgctgcactggctttagcagcaaaaccacagagtaaactggcccaagagaacatggatctttttaaagaacaatgggaaaaacaagtccgtgttctcacagatgctgtcgatgacattacttccattgatgacttcttggctgtctcagagaatcacattttggaagatgtgaacaaatgtgtcattgctctccaagagaaggatgtggatggcctggaccgcacagctggtgcaattcgaggccgggcagcccgggtcattcacgtagtcacctcagagatggacaactatgagccaggagtctacacagagaaggttctggaagccactaagctgctctccaacacagtcatgccacgttttactgagcaagtagaagcagccgtggaagccctcagctcggaccctgcccagcccatggatgagaatgagtttatcgatgcttcccgcctggtatatgatggcatccgggacatcaggaaagcagtgctgatgataaggacccctgaggagttggatgactctgactttgagacagaagattttgatgtcagaagcaggacgagcgtccagacagaagacgatcagctgatagctggccagagtgcccgggcgatcatggctcagcttccccaggagcaaaaagcgaagattgcggaacaggtggccagcttccaggaagaaaagagcaagctggatgctgaagtgtccaaatgggacgacagtggcaatgacatcattgtgctggccaagcagatgtgcatgattatgatggagatgacagactttacccgaggtaaaggaccactcaaaaatacatcggatgtcatcagtgctgccaagaaaattgctgaggcaggatccaggatggacaagcttggccgcaccattgcagaccattgccccgactcggcttgcaagcaggacctgctggcctacctgcaacgcatcgccctctactgccaccagctgaacatctgcagcaaggtcaaggccgaggtgcagaatctcggcggggagcttgttgtctctggggtggacagcgccatgtccctgatccaggcagccaagaacttgatgaatgctgtggtgcagacagtgaaggcatcctacgtcgcctctaccaaataccaaaagtcacagggtatggcttccctcaaccttcctgctgtgtcatggaagatgaaggcaccagagaaaaagccattggtgaagagagagaaacaggatgagacacagaccaagattaaacgggcatctcagaagaagcacgtgaacccggtgcaggccctcagcgagttcaaagctatggacagcatctaagtctgcccaggccggccgcccccacccctcggggctcctgaatatcagtcactgttcgtcactcaaatgaatttgctaaatacaacactgatactagattccacagggaaatgggcagactgaaccagtccaggtggtgaattttccaagaacatagtttaagttgattaaaaatgcttttagaatgcaggagcctacttctagctgtattttttgtatgcttaaataaaaataaaaattcataaccaaagagaatcccacattagcttgttagtaatgctctgaccaagccgagatgcccattctcttagtgatggcggcgttagggtttgagagaagggaatttggctcaacttcagttgagagggtgcagtccagacagcttgactgcttttaaatgaccaaagatgacctgtggtaagcaacctgggcatcttaggaagcagtccctggagaaggcatgttcccagaaaggtctctggagggacaaactcactcagtaaaacataatgtatcatgaagaaaactgattctctatgacatgaaatgaaaattttaatgcattgttataattactaatgtacgctgctgcaggacattaataaagttgcttttttaggctacagtgtctcgatgccataatcagaacacactttttttcctctttctcccagcttcaaatgcaaattcatcattgggctcacttctaataactgcagtgtttcccgccttgggcttgcagcagaaaaacctgacaacatagtgtttgctaaggcagtaatttagactttaccttatttgtgattactgtagtgattgattgattgattactattaactacaaggtataatttactatcaccttatttaaattttatgaattaatttgaatgttttttacactaactaacttttcccaataaagtccactatgaaaccacgacatccaagagcccaaagtcgtcttctctgccttcaagtcatagatttgcccgcagtatctgtggtgctctgggccctcccggtgtccgtctcttccaggatggggatgcccgggagggaaactgtctgtggctctaggctgcacggctcgtgccaacccatcagggagggccatgcccgttgtcctattgagtgccccaccctgcacccccaccttgggaattcacatgtccattccttgaggttcatgtcaacctcggaggcatccctgtcttcattatagctgacccctctcctgcgtccttctgtcagcatatcccttctgcatccttcccgtcacacatacataccaagctatgatgattgattgatagtggccttcgagatgaaaaccatccttaaccccatgatccttcccagctggcatccccaccctaagcaaggttccctaaagagaagcttgttgacattttctccccttcctcacttacagtcagctgtcaccttgctccctccacctcccctcgtcaaggtgactgccttccactgccagccacactggcaattgtcttgagacctcactgtgcaagcggcctgggggcgtggcggggaggaggaggaggacaagg

SEQ ID NO: 12141 - protein, 604 aa, Homo sapiens; identical to SEQ ID NO: 12139

SEQ ID NO: 12142 - DNA, 4213 bp, Homo sapiens
ccggactggagggagacaaagcagcgcccgtctgcttcgggcctctggaatttagcgctcgcccagctagccgcaggaagaatgaagaatgagtgtaggagttacctatagtttctgcctaattatttaccaatctggacttttgaacaaacattttttttaaagacggggtctccgtcgcccgggctggagcgcagtgacacgatcatgactcactgcggcttctgtctcctgggctcaagtgatccccccacctcggcttccgaagtagttgggactacaggcacgcgccaccacatccgtctaatttttgtatttttggtagagatggtgtctcgctgtcttgcccaagctggtctcgaactcctgggctcaagtggtcctcctgcctcagcctcccaaagtgttgtgattacaggcctgagccagggtgcctgaccccatctggatatttattcagcgaaagaataattttttaatccacctaagagctcacagtgtaataggggagacacacaccccaggtgtagtacagagcggactgcaaaatgactgctgtccatgcaggcaacataaacttcaagtgggatcctaaaagtctagagatcaggactctggcagttgagagactgttggagcctcttgttacacaggttacaacccttgtaaacaccaatagtaaagggccctctaataagaagagaggtcgttctaagaaggcccatgttttggctgcatctgttgaacaagcaactgagaatttcttggagaagggggataaaattgcgaaggagagccagtttctcaaggaggagcttgtggctgctgtagaagatgttcgaaaacaaggtgatttgatgaaggctgctgcaggagagttcgcagatgatccctgctcttctgtgaagcgaggcaacatggttcgggcagctcgagctttgctctctgctgttacccggttgctgattttggctgacatggcagatgtctacaaattacttgttcagctgaaagttgtggaagatggtatcttgaagttgaggaatgctggcaatgaacaagacttaggaatccagtataaagccctaaaacctgaagtggataagctgaacattatggcagccaaaagacaacaggaattgaaagatgttggccatcgtgatcagatggctgcagctagaggaatcctgcagaagaacgttccgatcctctatactgcatcccaggcatgcctacagcaccctgatgtcgcagcctataaggccaacagggacctgatatacaagcagctgcagcaggcggtcacaggcatttccaatgcagcccaggccactgcctcagacgatgcctcacagcaccagggtggaggaggaggagaactggcatatgcactcaataactttgacaaacaaatcattgtggaccccttgagcttcagcgaggagcgctttaggccttccctggaggagcgtctggaaagcatcattagtggggctgccttgatggccgactcgtcctgcacgcgtgatgaccgtcgtgagcgaattgtggcagagtgtaatgctgtccgccaggccctgcaggacctgctttcggagtacatgggcaatgctggacgtaaagaaagaagtgatgcactcaattctgcaatagataaaatgaccaagaagaccagggacttgcgtagacagctccgcaaagctgtcatggaccacgtttcagattctttcctggaaaccaatgttccacttttggtattgattgaagctgcaaagaatggaaatgagaaagaagttaaggagtatgcccaagttttccgtgaacatgccaacaaattgattgaggttgccaacttggcctgttccatctcaaataatgaagaaggtgtaaagcttgttcgaatgtctgcaagccagttagaagccctctgtcctcaggttattaatgctgcactggctttagcagcaaaaccacagagtaaactggcccaagagaacatggatctttttaaagaacaatgggaaaaacaagtccgtgttctcacagatgctgtcgatgacattacttccattgatgacttcttggctgtctcagagaatcacattttggaagatgtgaacaaatgtgtcattgctctccaagagaaggatgtggatggcctggaccgcacagctggtgcaattcgaggccgggcagcccgggtcattcacgtagtcacctcagagatggacaactatgagccaggagtctacacagagaaggttctggaagccactaagctgctctccaacacagtcatgccacgttttactgagcaagtagaagcagccgtggaagccctcagctcggaccctgcccagcccatggatgagaatgagtttatcgatgcttcccgcctggtatatgatggcatccgggacatcaggaaagcagtgctgatgataaggacccctgaggagttggatgactctgactttgagacagaagattttgatgtcagaagcaggacgagcgtccagacagaagacgatcagctgatagctggccagagtgcccgggcgatcatggctcagcttccccaggagcaaaaagcgaagattgcggaacaggtggccagcttccaggaagaaaagagcaagctggatgctgaagtgtccaaatgggacgacagtggcaatgacatcattgtgctggccaagcagatgtgcatgattatgatggagatgacagactttacccgaggtaaaggaccactcaaaaatacatcggatgtcatcagtgctgccaagaaaattgctgaggcaggatccaggatggacaagcttggccgcaccattgcagaccattgccccgactcggcttgcaagcaggacctgctggcctacctgcaacgcatcgccctctactgccaccagctgaacatctgcagcaaggtcaaggccgaggtgcagaatctcggcggggagcttgttgtctctggggtggacagcgccatgtccctgatccaggcagccaagaacttgatgaatgctgtggtgcagacagtgaaggcatcctacgtcgcctctaccaaataccaaaagtcacagggtatggcttccctcaaccttcctgctgtgtcatggaagatgaaggcaccagagaaaaagccattggtgaagagagagaaacaggatgagacacagaccaagattaaacgggcatctcagaagaagcacgtgaacccggtgcaggccctcagcgagttcaaagctatggacagcatctaagtctgcccaggccggccgcccccacccctcggggctcctgaatatcagtcactgttcgtcactcaaatgaatttgctaaatacaacactgatactagattccacagggaaatgggcagactgaaccagtccaggtggtgaattttccaagaacatagtttaagttgattaaaaatgcttttagaatgcaggagcctacttctagctgtattttttgtatgcttaaataaaaataaaaattcataaccaaagagaatcccacattagcttgttagtaatgctctgaccaagccgagatgcccattctcttagtgatggcggcgttagggtttgagagaagggaatttggctcaacttcagttgagagggtgcagtccagacagcttgactgcttttaaatgaccaaagatgacctgtggtaagcaacctgggcatcttaggaagcagtccctggagaaggcatgttcccagaaaggtctctggagggacaaactcactcagtaaaacataatgtatcatgaagaaaactgattctctatgacatgaaatgaaaattttaatgcattgttataattactaatgtacgctgctgcaggacattaataaagttgcttttttaggctacagtgtctcgatgccataatcagaacacactttttttcctctttctcccagcttcaaatgcaaattcatcattgggctcacttctaataactgcagtgtttcccgccttgggcttgcagcagaaaaacctgacaacatagtgtttgctaaggcagtaatttagactttaccttatttgtgattactgtagtgattgattgattgattactattaactacaaggtataatttactatcaccttatttaaattttatgaattaatttgaatgttttttacactaactaacttttcccaataaagtccactatgaaaccacgac

SEQ ID NO: 12143 - protein, 906 aa, Homo sapiens; identical to SEQ ID NO: 1167

SEQ ID NO: 12144 - DNA, 4840 bp, Homo sapiens
ccggactggagggagacaaagcagcgcccgtctgcttcgggcctctggaatttagcgctcgcccagctagccgcaggaagaatgaagaatgagtgtaggagttacctatagtttctgcctaattatttaccaatctggacttttgaacaaacattttttttaaagacggggtctccgtcgcccgggctggagcgcagtgacacgatcatgactcactgcggcttctgtctcctgggctcaagtgatccccccacctcggcttccgaagtagttgggactacaggcacgcgccaccacatccgtctaatttttgtatttttggtagagatggtgtctcgctgtcttgcccaagctggtctcgaactcctgggctcaagtggtcctcctgcctcagcctcccaaagtgttgtgattacaggcctgagccagggtgcctgaccccatctggatatttattcagcgaaagaataattttttaatccacctaagagctcacagtgtaataggggagacacacaccccaggtgtagtacagagcggactgcaaaatgactgctgtccatgcaggcaacataaacttcaagtgggatcctaaaagtctagagatcaggactctggcagttgagagactgttggagcctcttgttacacaggttacaacccttgtaaacaccaatagtaaagggccctctaataagaagagaggtcgttctaagaaggcccatgttttggctgcatctgttgaacaagcaactgagaatttcttggagaagggggataaaattgcgaaggagagccagtttctcaaggaggagcttgtggctgctgtagaagatgttcgaaaacaaggtgatttgatgaaggctgctgcaggagagttcgcagatgatccctgctcttctgtgaagcgaggcaacatggttcgggcagctcgagctttgctctctgctgttacccggttgctgattttggctgacatggcagatgtctacaaattacttgttcagctgaaagttgtggaagatggtatcttgaagttgaggaatgctggcaatgaacaagacttaggaatccagtataaagccctaaaacctgaagtggataagctgaacattatggcagccaaaagacaacaggaattgaaagatgttggccatcgtgatcagatggctgcagctagaggaatcctgcagaagaacgttccgatcctctatactgcatcccaggcatgcctacagcaccctgatgtcgcagcctataaggccaacagggacctgatatacaagcagctgcagcaggcggtcacaggcatttccaatgcagcccaggccactgcctcagacgatgcctcacagcaccagggtggaggaggaggagaactggcatatgcactcaataactttgacaaacaaatcattgtggaccccttgagcttcagcgaggagcgctttaggccttccctggaggagcgtctggaaagcatcattagtggggctgccttgatggccgactcgtcctgcacgcgtgatgaccgtcgtgagcgaattgtggcagagtgtaatgctgtccgccaggccctgcaggacctgctttcggagtacatgggcaatgctggacgtaaagaaagaagtgatgcactcaattctgcaatagataaaatgaccaagaagaccagggacttgcgtagacagctccgcaaagctgtcatggaccacgtttcagattctttcctggaaaccaatgttccacttttggtattgattgaagctgcaaagaatggaaatgagaaagaagttaaggagtatgcccaagttttccgtgaacatgccaacaaattgattgaggttgccaacttggcctgttccatctcaaataatgaagaaggtgtaaagcttgttcgaatgtctgcaagccagttagaagccctctgtcctcaggttattaatgctgcactggctttagcagcaaaaccacagagtaaactggcccaagagaacatggatctttttaaagaacaatgggaaaaacaagtccgtgttctcacagatgctgtcgatgacattacttccattgatgacttcttggctgtctcagagaatcacattttggaagatgtgaacaaatgtgtcattgctctccaagagaaggatgtggatggcctggaccgcacagctggtgcaattcgaggccgggcagcccgggtcattcacgtagtcacctcagagatggacaactatgagccaggagtctacacagagaaggttctggaagccactaagctgctctccaacacagtcatgccacgttttactgagcaagtagaagcagccgtggaagccctcagctcggaccctgcccagcccatggatgagaatgagtttatcgatgcttcccgcctggtatatgatggcatccgggacatcaggaaagcagtgctgatgataaggacccctgaggagttggatgactctgactttgagacagaagattttgatgtcagaagcaggacgagcgtccagacagaagacgatcagctgatagctggccagagtgcccgggcgatcatggctcagcttccccaggagcaaaaagcgaagattgcggaacaggtggccagcttccaggaagaaaagagcaagctggatgctgaagtgtccaaatgggacgacagtggcaatgacatcattgtgctggccaagcagatgtgcatgattatgatggagatgacagactttacccgaggtaaaggaccactcaaaaatacatcggatgtcatcagtgctgccaagaaaattgctgaggcaggatccaggatggacaagcttggccgcaccattgcagaccattgccccgactcggcttgcaagcaggacctgctggcctacctgcaacgcatcgccctctactgccaccagctgaacatctgcagcaaggtcaaggccgaggtgcagaatctcggcggggagcttgttgtctctggggtggacagcgccatgtccctgatccaggcagccaagaacttgatgaatgctgtggtgcagacagtgaaggcatcctacgtcgcctctaccaaataccaaaagtcacagggtatggcttccctcaaccttcctgctgtgtcatggaagatgaaggcaccagagaaaaagccattggtgaagagagagaaacaggatgagacacagaccaagattaaacgggcatctcagaagaagcacgtgaacccggtgcaggccctcagcgagttcaaagctatggacagcatctaagtctgcccaggccggccgcccccacccctcggggctcctgaatatcagtcactgttcgtcactcaaatgaatttgctaaatacaacactgatactagattccacagggaaatgggcagactgaaccagtccaggtggtgaattttccaagaacatagtttaagttgattaaaaatgcttttagaatgcaggagcctacttctagctgtattttttgtatgcttaaataaaaataaaaattcataaccaaagagaatcccacattagcttgttagtaatgctctgaccaagccgagatgcccattctcttagtgatggcggcgttagggtttgagagaagggaatttggctcaacttcagttgagagggtgcagtccagacagcttgactgcttttaaatgaccaaagatgacctgtggtaagcaacctgggcatcttaggaagcagtccctggagaaggcatgttcccagaaaggtctctggagggacaaactcactcagtaaaacataatgtatcatgaagaaaactgattctctatgacatgaaatgaaaattttaatgcattgttataattactaatgtacgctgctgcaggacattaataaagttgcttttttaggctacagtgtctcgatgccataatcagaacacactttttttcctctttctcccagcttcaaatgcaaattcatcattgggctcacttctaataactgcagtgtttcccgccttgggcttgcagcagaaaaacctgacaacatagtgtttgctaaggcagtaatttagactttaccttatttgtgattactgtagtgattgattgattgattactattaactacaaggtataatttactatcaccttatttaaattttatgaattaatttgaatgttttttacactaactaacttttcccaataaagtccactatgaaaccacgacatccaagagcccaaagtcgtcttctctgccttcaagtcatagatttgcccgcagtatctgtggtgctctgggccctcccggtgtccgtctcttccaggatggggatgcccgggagggaaactgtctgtggctctaggctgcacggctcgtgccaacccatcagggagggccatgcccgttgtcctattgagtgccccaccctgcacccccaccttgggaattcacatgtccattccttgaggttcatgtcaacctcggaggcatccctgtcttcattatagctgacccctctcctgcgtccttctgtcagcatatcccttctgcatccttcccgtcacacatacataccaagctatgatgattgattgatagtggccttcgagatgaaaaccatccttaaccccatgatccttcccagctggcatccccaccctaagcaaggttccctaaagagaagcttgttgacattttctccccttcctcacttacagtcagctgtcaccttgctccctccacctcccctcgtcaaggtgactgccttccactgccagccacactggcaattgtcttgagacctcactgtgcaagcggcctgggggcgtggcggggaggaggaggaggacaagg

SEQ ID NO: 12145 - protein, 906 aa, Homo sapiens; identical to SEQ ID NO: 1167

SEQ ID NO: 12146 - DNA, 782 bp, Homo sapiens
gagggagacaaagcagcgcccgtctgcttcgggcctctggaatttagcgctcgcccagctagccgcagattgctgatttggtcaagatgtaaacatatcgtagagctccagcatgggggctcacgcctgtaatacaaacactttggaaggccaagggcctcactctgtcacctaggctggagtgcaatggtgtgatcatggctcactgcagccttgactttccaagttcaagcaatcctcccacttcagcctctcgagtagcatagctgggaccacaggcacatgctaccatgcccagctaatttttgtattttttgtagagacagggtttcaccatgttgcccaggttggtcttgaaccctggctcaagcaatccacctgccgtggcctcccaaagtgctggaattatgggcgtaagccattgcacccaggttcaaagagttaaaattaattggtaaaccctcagcaggaagagcacaactaaggaaattaagagagccaacaaagcatgaggatctgtaatgatattcctggtttcattcttgatacagtttttgttcctgtttcccatttctcaccttcctgtgacaaaccaagtctgaagattcagccgtacgtgggatcctgcagggacagcctgccctaaaagccaagaagagaaaaggctcatgaggtacaaggtctttggaaggctgtcgggatggccagcaagccaacaggacttactagttcatgaagacacgactcagctgtgttcagttacctcctcaatccacccatcc

SEQ ID NO: 12147 - protein, 45 aa, Homo sapiens
MRICNDIPGFILDTVFVPVSHFSPSCDKPSLKIQPYVGSCRDSLP

SEQ ID NO: 12148 - DNA, 3883 bp, Homo sapiens
ggagacaaagcagcgcccgtctgcttcgggcctctggaatttagcgctcgcccagctagccgcagatggagttttgctcttgttgcccaggctggagtgcaatggcgtgatgtcggctcactgcaacctctgtctcctgggttcaagtgattcttctgcctcagcctcccaagtagctgggattacaggcatgtgccaccacacctggctaatctgaaatgactgctgtccatgcaggcaacataaacttcaagtgggatcctaaaagtctagagatcaggactctggcagttgagagactgttggagcctcttgttacacaggttacaacccttgtaaacaccaatagtaaagggccctctaataagaagagaggtcgttctaagaaggcccatgttttggctgcatctgttgaacaagcaactgagaatttcttggagaagggggataaaattgcgaaggagagccagtttctcaaggaggagcttgtggctgctgtagaagatgttcgaaaacaaggtgatttgatgaaggctgctgcaggagagttcgcagatgatccctgctcttctgtgaagcgaggcaacatggttcgggcagctcgagctttgctctctgctgttacccggttgctgattttggctgacatggcagatgtctacaaattacttgttcagctgaaagttgtggaagatggtatcttgaagttgaggaatgctggcaatgaacaagacttaggaatccagtataaagccctaaaacctgaagtggataagctgaacattatggcagccaaaagacaacaggaattgaaagatgttggccatcgtgatcagatggctgcagctagaggaatcctgcagaagaacgttccgatcctctatactgcatcccaggcatgcctacagcaccctgatgtcgcagcctataaggccaacagggacctgatatacaagcagctgcagcaggcggtcacaggcatttccaatgcagcccaggccactgcctcagacgatgcctcacagcaccagggtggaggaggaggagaactggcatatgcactcaataactttgacaaacaaatcattgtggaccccttgagcttcagcgaggagcgctttaggccttccctggaggagcgtctggaaagcatcattagtggggctgccttgatggccgactcgtcctgcacgcgtgatgaccgtcgtgagcgaattgtggcagagtgtaatgctgtccgccaggccctgcaggacctgctttcggagtacatgggcaatgctggacgtaaagaaagaagtgatgcactcaattctgcaatagataaaatgaccaagaagaccagggacttgcgtagacagctccgcaaagctgtcatggaccacgtttcagattctttcctggaaaccaatgttccacttttggtattgattgaagctgcaaagaatggaaatgagaaagaagttaaggagtatgcccaagttttccgtgaacatgccaacaaattgattgaggttgccaacttggcctgttccatctcaaataatgaagaaggtgtaaagcttgttcgaatgtctgcaagccagttagaagccctctgtcctcaggttattaatgctgcactggctttagcagcaaaaccacagagtaaactggcccaagagaacatggatctttttaaagaacaatgggaaaaacaagtccgtgttctcacagatgctgtcgatgacattacttccattgatgacttcttggctgtctcagagaatcacattttggaagatgtgaacaaatgtgtcattgctctccaagagaaggatgtggatggcctggaccgcacagctggtgcaattcgaggccgggcagcccgggtcattcacgtagtcacctcagagatggacaactatgagccaggagtctacacagagaaggttctggaagccactaagctgctctccaacacagtcatgccacgttttactgagcaagtagaagcagccgtggaagccctcagctcggaccctgcccagcccatggatgagaatgagtttatcgatgcttcccgcctggtatatgatggcatccgggacatcaggaaagcagtgctgatgataaggacccctgaggagttggatgactctgactttgagacagaagattttgatgtcagaagcaggacgagcgtccagacagaagacgatcagctgatagctggccagagtgcccgggcgatcatggctcagcttccccaggagcaaaaagcgaagattgcggaacaggtggccagcttccaggaagaaaagagcaagctggatgctgaagtgtccaaatgggacgacagtggcaatgacatcattgtgctggccaagcagatgtgcatgattatgatggagatgacagactttacccgaggtaaaggaccactcaaaaatacatcggatgtcatcagtgctgccaagaaaattgctgaggcaggatccaggatggacaagcttggccgcaccattgcagaccattgccccgactcggcttgcaagcaggacctgctggcctacctgcaacgcatcgccctctactgccaccagctgaacatctgcagcaaggtcaaggccgaggtgcagaatctcggcggggagcttgttgtctctggggtggacagcgccatgtccctgatccaggcagccaagaacttgatgaatgctgtggtgcagacagtgaaggcatcctacgtcgcctctaccaaataccaaaagtcacagggtatggcttccctcaaccttcctgctgtgtcatggaagatgaaggcaccagagaaaaagccattggtgaagagagagaaacaggatgagacacagaccaagattaaacgggcatctcagaagaagcacgtgaacccggtgcaggccctcagcgagttcaaagctatggacagcatctaagtctgcccaggccggccgcccccacccctcggggctcctgaatatcagtcactgttcgtcactcaaatgaatttgctaaatacaacactgatactagattccacagggaaatgggcagactgaaccagtccaggtggtgaattttccaagaacatagtttaagttgattaaaaatgcttttagaatgcaggagcctacttctagctgtattttttgtatgcttaaataaaaataaaaattcataaccaaagagaatcccacattagcttgttagtaatgctctgaccaagccgagatgcccattctcttagtgatggcggcgttagggtttgagagaagggaatttggctcaacttcagttgagagggtgcagtccagacagcttgactgcttttaaatgaccaaagatgacctgtggtaagcaacctgggcatcttaggaagcagtccctggagaaggcatgttcccagaaaggtctctggagggacaaactcactcagtaaaacataatgtatcatgaagaaaactgattctctatgacatgaaatgaaaattttaatgcattgttataattactaatgtacgctgctgcaggacattaataaagttgcttttttaggctacagtgtctcgatgccataatcagaacacactttttttcctctttctcccagcttcaaatgcaaattcatcattgggctcacttctaataactgcagtgtttcccgccttgggcttgcagcagaaaaacctgacaacatagtgtttgctaaggcagtaatttagactttaccttatttgtgattactgtagtgattgattgattgattactattaactacaaggtataatttactatcaccttatttaaattttatgaattaatttgaatgttttttacactaactaacttttcccaataaagtccactatgaaaccacgac

SEQ ID NO: 12149 - protein, 906 aa, Homo sapiens; identical to SEQ ID NO: 1167

SEQ ID NO: 12150 - DNA, 4510 bp, Homo sapiens
ggagacaaagcagcgcccgtctgcttcgggcctctggaatttagcgctcgcccagctagccgcagatggagttttgctcttgttgcccaggctggagtgcaatggcgtgatgtcggctcactgcaacctctgtctcctgggttcaagtgattcttctgcctcagcctcccaagtagctgggattacaggcatgtgccaccacacctggctaatctgaaatgactgctgtccatgcaggcaacataaacttcaagtgggatcctaaaagtctagagatcaggactctggcagttgagagactgttggagcctcttgttacacaggttacaacccttgtaaacaccaatagtaaagggccctctaataagaagagaggtcgttctaagaaggcccatgttttggctgcatctgttgaacaagcaactgagaatttcttggagaagggggataaaattgcgaaggagagccagtttctcaaggaggagcttgtggctgctgtagaagatgttcgaaaacaaggtgatttgatgaaggctgctgcaggagagttcgcagatgatccctgctcttctgtgaagcgaggcaacatggttcgggcagctcgagctttgctctctgctgttacccggttgctgattttggctgacatggcagatgtctacaaattacttgttcagctgaaagttgtggaagatggtatcttgaagttgaggaatgctggcaatgaacaagacttaggaatccagtataaagccctaaaacctgaagtggataagctgaacattatggcagccaaaagacaacaggaattgaaagatgttggccatcgtgatcagatggctgcagctagaggaatcctgcagaagaacgttccgatcctctatactgcatcccaggcatgcctacagcaccctgatgtcgcagcctataaggccaacagggacctgatatacaagcagctgcagcaggcggtcacaggcatttccaatgcagcccaggccactgcctcagacgatgcctcacagcaccagggtggaggaggaggagaactggcatatgcactcaataactttgacaaacaaatcattgtggaccccttgagcttcagcgaggagcgctttaggccttccctggaggagcgtctggaaagcatcattagtggggctgccttgatggccgactcgtcctgcacgcgtgatgaccgtcgtgagcgaattgtggcagagtgtaatgctgtccgccaggccctgcaggacctgctttcggagtacatgggcaatgctggacgtaaagaaagaagtgatgcactcaattctgcaatagataaaatgaccaagaagaccagggacttgcgtagacagctccgcaaagctgtcatggaccacgtttcagattctttcctggaaaccaatgttccacttttggtattgattgaagctgcaaagaatggaaatgagaaagaagttaaggagtatgcccaagttttccgtgaacatgccaacaaattgattgaggttgccaacttggcctgttccatctcaaataatgaagaaggtgtaaagcttgttcgaatgtctgcaagccagttagaagccctctgtcctcaggttattaatgctgcactggctttagcagcaaaaccacagagtaaactggcccaagagaacatggatctttttaaagaacaatgggaaaaacaagtccgtgttctcacagatgctgtcgatgacattacttccattgatgacttcttggctgtctcagagaatcacattttggaagatgtgaacaaatgtgtcattgctctccaagagaaggatgtggatggcctggaccgcacagctggtgcaattcgaggccgggcagcccgggtcattcacgtagtcacctcagagatggacaactatgagccaggagtctacacagagaaggttctggaagccactaagctgctctccaacacagtcatgccacgttttactgagcaagtagaagcagccgtggaagccctcagctcggaccctgcccagcccatggatgagaatgagtttatcgatgcttcccgcctggtatatgatggcatccgggacatcaggaaagcagtgctgatgataaggacccctgaggagttggatgactctgactttgagacagaagattttgatgtcagaagcaggacgagcgtccagacagaagacgatcagctgatagctggccagagtgcccgggcgatcatggctcagcttccccaggagcaaaaagcgaagattgcggaacaggtggccagcttccaggaagaaaagagcaagctggatgctgaagtgtccaaatgggacgacagtggcaatgacatcattgtgctggccaagcagatgtgcatgattatgatggagatgacagactttacccgaggtaaaggaccactcaaaaatacatcggatgtcatcagtgctgccaagaaaattgctgaggcaggatccaggatggacaagcttggccgcaccattgcagaccattgccccgactcggcttgcaagcaggacctgctggcctacctgcaacgcatcgccctctactgccaccagctgaacatctgcagcaaggtcaaggccgaggtgcagaatctcggcggggagcttgttgtctctggggtggacagcgccatgtccctgatccaggcagccaagaacttgatgaatgctgtggtgcagacagtgaaggcatcctacgtcgcctctaccaaataccaaaagtcacagggtatggcttccctcaaccttcctgctgtgtcatggaagatgaaggcaccagagaaaaagccattggtgaagagagagaaacaggatgagacacagaccaagattaaacgggcatctcagaagaagcacgtgaacccggtgcaggccctcagcgagttcaaagctatggacagcatctaagtctgcccaggccggccgcccccacccctcggggctcctgaatatcagtcactgttcgtcactcaaatgaatttgctaaatacaacactgatactagattccacagggaaatgggcagactgaaccagtccaggtggtgaattttccaagaacatagtttaagttgattaaaaatgcttttagaatgcaggagcctacttctagctgtattttttgtatgcttaaataaaaataaaaattcataaccaaagagaatcccacattagcttgttagtaatgctctgaccaagccgagatgcccattctcttagtgatggcggcgttagggtttgagagaagggaatttggctcaacttcagttgagagggtgcagtccagacagcttgactgcttttaaatgaccaaagatgacctgtggtaagcaacctgggcatcttaggaagcagtccctggagaaggcatgttcccagaaaggtctctggagggacaaactcactcagtaaaacataatgtatcatgaagaaaactgattctctatgacatgaaatgaaaattttaatgcattgttataattactaatgtacgctgctgcaggacattaataaagttgcttttttaggctacagtgtctcgatgccataatcagaacacactttttttcctctttctcccagcttcaaatgcaaattcatcattgggctcacttctaataactgcagtgtttcccgccttgggcttgcagcagaaaaacctgacaacatagtgtttgctaaggcagtaatttagactttaccttatttgtgattactgtagtgattgattgattgattactattaactacaaggtataatttactatcaccttatttaaattttatgaattaatttgaatgttttttacactaactaacttttcccaataaagtccactatgaaaccacgacatccaagagcccaaagtcgtcttctctgccttcaagtcatagatttgcccgcagtatctgtggtgctctgggccctcccggtgtccgtctcttccaggatggggatgcccgggagggaaactgtctgtggctctaggctgcacggctcgtgccaacccatcagggagggccatgcccgttgtcctattgagtgccccaccctgcacccccaccttgggaattcacatgtccattccttgaggttcatgtcaacctcggaggcatccctgtcttcattatagctgacccctctcctgcgtccttctgtcagcatatcccttctgcatccttcccgtcacacatacataccaagctatgatgattgattgatagtggccttcgagatgaaaaccatccttaaccccatgatccttcccagctggcatccccaccctaagcaaggttccctaaagagaagcttgttgacattttctccccttcctcacttacagtcagctgtcaccttgctccctccacctcccctcgtcaaggtgactgccttccactgccagccacactggcaattgtcttgagacctcactgtgcaagcggcctgggggcgtggcggggaggaggaggaggacaagg

SEQ ID NO: 12151 - protein, 906 aa, Homo sapiens; identical to SEQ ID NO: 1167

SEQ ID NO: 12152 - DNA, 743 bp, Homo sapiens
gacaaagcagcgcccgtctgcttcgggcctctggaatttagcgctcgcccagctagccgcagagacagagtttcaccgtgtttcccaggctggtctcaaactcctgagctcaagtgatccacctgccttggcctcccaaagagctgagattacaggcgtgacccactgcgcctggcccactttgaagtcctaaagaaatttaggttattattctatgcatgttggaggatttaagtcttattagcagcttctgttttctgtaaggaaaaagttaaaacacatctggaagagtctcatagagcagcactttctgaaacttgcctgggtaccagtatgcctgcttccagaccttgaagatattacatgtactgcttggtgatctgccctgtcccccacatgttgtgggcctggattgaatggactgaacagtgtggggaattagtccagcgtgacttgccttgtctcatgctgtttgctcacttgtgagagcactatactgaattatccattattgaaagttccaagtgtgcaaagaaccacacttcaaaaataaaatgtcaacattgccctttctctgttagagccttaaatgttcattattttctttagtttttttttataactatcaaacttatttttctccatgtggaagtatgccacaactccatttctaatggagcttgaaattagcatgtatttccacttacttgttgatgggctgtcatcgatcaacccctcttttt

SEQ ID NO: 12153 - protein, 40 aa, Homo sapiens
MYCLVICPVPHMLWAWIEWTEQCGELVQRDLPCLMLFAHL

SEQ ID NO: 12154 - DNA, 442 bp, Homo sapiens
cttcaagtgggatcctaaaagtctagagatcaggactctggcagttgagagactgttggagcctcttgttacacaggttacaacccttgtaaacaccaatagtaaagggccctctaataagaagagaggtcgttctaagaaggcccatgttttggctgcatttcagttgagagggtgcagtccagacagcttgactgcttttaaatgaccaaagatgacctgtggtaagcaacctgggcatcttaggaagcagtccctggagaaggcatgttcccagaaaggtctctggagggacaaactcactcagtaaaacataatgtatcatgaagaaaactgattctctatgacatgaaatgaaaattttaatgcattgttataattactaatgtacgctgctgcaggacattaataaagttgcttttttaggctacagtgtctcgat

SEQ ID NO: 12155 - protein, 31 aa, Homo sapiens
MTCGKQPGHLRKQSLEKACSQKGLWRDKLTQ

SEQ ID NO: 12156 - DNA, 751 bp, Homo sapiens
cttcaagtgggatcctaaaagtctagagatcaggactctggcagttgagagactgttggagcctcttgttacacaggttacaacccttgtaaacaccaatagtaaagggccctctaataagaagagaggtcgttctaagaaggcccatgttttggctgcatttcagttgagagggtgcagtccagacagcttgactgcttttaaatgaccaaagatgacctgtggtaagcaacctgggcatcttaggaagcagtccctggagaaggcatgttcccagaaaggtctctggagggacaaactcactcagtaaaacataatgtatcatgaagaaaactgattctctatgacatgaaatgaaaattttaatgcattgttataattactaatgtacgctgctgcaggacattaataaagttgcttttttaggctacagtgtctcgatgccataatcagaacacactttttttcctctttctcccagcttcaaatgcaaattcatcattgggctcacttctaataactgcagtgtttcccgccttgggcttgcagcagaaaaacctgacaacatagtgtttgctaaggcagtaatttagactttaccttatttgtgattactgtagtgattgattgattgattactattaactacaaggtataatttactatcaccttatttaaattttatgaattaatttgaatgttttttacactaactaacttttcccaataaagtccactatgaaaccacgac

SEQ ID NO: 12157 - protein, 31 aa, Homo sapiens; identical to SEQ ID NO: 12155

SEQ ID NO: 12158 - DNA, 1378 bp, Homo sapiens
cttcaagtgggatcctaaaagtctagagatcaggactctggcagttgagagactgttggagcctcttgttacacaggttacaacccttgtaaacaccaatagtaaagggccctctaataagaagagaggtcgttctaagaaggcccatgttttggctgcatttcagttgagagggtgcagtccagacagcttgactgcttttaaatgaccaaagatgacctgtggtaagcaacctgggcatcttaggaagcagtccctggagaaggcatgttcccagaaaggtctctggagggacaaactcactcagtaaaacataatgtatcatgaagaaaactgattctctatgacatgaaatgaaaattttaatgcattgttataattactaatgtacgctgctgcaggacattaataaagttgcttttttaggctacagtgtctcgatgccataatcagaacacactttttttcctctttctcccagcttcaaatgcaaattcatcattgggctcacttctaataactgcagtgtttcccgccttgggcttgcagcagaaaaacctgacaacatagtgtttgctaaggcagtaatttagactttaccttatttgtgattactgtagtgattgattgattgattactattaactacaaggtataatttactatcaccttatttaaattttatgaattaatttgaatgttttttacactaactaacttttcccaataaagtccactatgaaaccacgacatccaagagcccaaagtcgtcttctctgccttcaagtcatagatttgcccgcagtatctgtggtgctctgggccctcccggtgtccgtctcttccaggatggggatgcccgggagggaaactgtctgtggctctaggctgcacggctcgtgccaacccatcagggagggccatgcccgttgtcctattgagtgccccaccctgcacccccaccttgggaattcacatgtccattccttgaggttcatgtcaacctcggaggcatccctgtcttcattatagctgacccctctcctgcgtccttctgtcagcatatcccttctgcatccttcccgtcacacatacataccaagctatgatgattgattgatagtggccttcgagatgaaaaccatccttaaccccatgatccttcccagctggcatccccaccctaagcaaggttccctaaagagaagcttgttgacattttctccccttcctcacttacagtcagctgtcaccttgctccctccacctcccctcgtcaaggtgactgccttccactgccagccacactggcaattgtcttgagacctcactgtgcaagcggcctgggggcgtggcggggaggaggaggaggacaagg

SEQ ID NO: 12159 - protein, 97 aa, Homo sapiens
MKPRHPRAQSRLLCLQVIDLPAVSVVLWALPVSVSSRMGMPGRETVCGSRLHGSCQPIREGHARCPIECPTLHPHLGNSHVHSLRFMSTSEASLSSL

SEQ ID NO: 12160 - DNA, 982 bp, Homo sapiens
ggccctctaataagaagagaggtcgttctaagaaggcccatgttttggctgcatctgttgaacaagcaactgagaattttcccagcttcaaatgcaaattcatcattgggctcacttctaataactgcagtgtttcccgccttgggcttgcagcagaaaaacctgacaacatagtgtttgctaaggcagtaatttagactttaccttatttgtgattactgtagtgattgattgattgattactattaactacaaggtataatttactatcaccttatttaaattttatgaattaatttgaatgttttttacactaactaacttttcccaataaagtccactatgaaaccacgacatccaagagcccaaagtcgtcttctctgccttcaagtcatagatttgcccgcagtatctgtggtgctctgggccctcccggtgtccgtctcttccaggatggggatgcccgggagggaaactgtctgtggctctaggctgcacggctcgtgccaacccatcagggagggccatgcccgttgtcctattgagtgccccaccctgcacccccaccttgggaattcacatgtccattccttgaggttcatgtcaacctcggaggcatccctgtcttcattatagctgacccctctcctgcgtccttctgtcagcatatcccttctgcatccttcccgtcacacatacataccaagctatgatgattgattgatagtggccttcgagatgaaaaccatccttaaccccatgatccttcccagctggcatccccaccctaagcaaggttccctaaagagaagcttgttgacattttctccccttcctcacttacagtcagctgtcaccttgctccctccacctcccctcgtcaaggtgactgccttccactgccagccacactggcaattgtcttgagacctcactgtgcaagcggcctgggggcgtggcggggaggaggaggaggacaagg

SEQ ID NO: 12161 - protein, 44 aa, Homo sapiens [sequence omitted]

SEQ ID NO: 12162 - DNA, 719 bp, Homo sapiens
aggaattgaaagatgttggccatcgtgatcagatggctgcagctagaggaatcctgcagaagaacgttccgatcctctatactgcatcccaggcatgcctacagcaccctgatgtcgcagcctataaggccaacagggacctgatatacaagcagagcttgactgcttttaaatgaccaaagatgacctgtggtaagcaacctgggcatcttaggaagcagtccctggagaaggcatgttcccagaaaggtctctggagggacaaactcactcagtaaaacataatgtatcatgaagaaaactgattctctatgacatgaaatgaaaattttaatgcattgttataattactaatgtacgctgctgcaggacattaataaagttgcttttttaggctacagtgtctcgatgccataatcagaacacactttttttcctctttctcccagcttcaaatgcaaattcatcattgggctcacttctaataactgcagtgtttcccgccttgggcttgcagcagaaaaacctgacaacatagtgtttgctaaggcagtaatttagactttaccttatttgtgattactgtagtgattgattgattgattactattaactacaaggtataatttactatcaccttatttaaattttatgaattaatttgaatgttttttacactaactaacttttcccaataaagtccactatgaaaccacgac

SEQ ID NO: 12163 - protein, 47 aa, Homo sapiens
MAAARGILQKNVPILYTASQACLQHPDVAAYKANRDLIYKQSLTAFK

SEQ ID NO: 12164 - DNA, 1346 bp, Homo sapiens
aggaattgaaagatgttggccatcgtgatcagatggctgcagctagaggaatcctgcagaagaacgttccgatcctctatactgcatcccaggcatgcctacagcaccctgatgtcgcagcctataaggccaacagggacctgatatacaagcagagcttgactgcttttaaatgaccaaagatgacctgtggtaagcaacctgggcatcttaggaagcagtccctggagaaggcatgttcccagaaaggtctctggagggacaaactcactcagtaaaacataatgtatcatgaagaaaactgattctctatgacatgaaatgaaaattttaatgcattgttataattactaatgtacgctgctgcaggacattaataaagttgcttttttaggctacagtgtctcgatgccataatcagaacacactttttttcctctttctcccagcttcaaatgcaaattcatcattgggctcacttctaataactgcagtgtttcccgccttgggcttgcagcagaaaaacctgacaacatagtgtttgctaaggcagtaatttagactttaccttatttgtgattactgtagtgattgattgattgattactattaactacaaggtataatttactatcaccttatttaaattttatgaattaatttgaatgttttttacactaactaacttttcccaataaagtccactatgaaaccacgacatccaagagcccaaagtcgtcttctctgccttcaagtcatagatttgcccgcagtatctgtggtgctctgggccctcccggtgtccgtctcttccaggatggggatgcccgggagggaaactgtctgtggctctaggctgcacggctcgtgccaacccatcagggagggccatgcccgttgtcctattgagtgccccaccctgcacccccaccttgggaattcacatgtccattccttgaggttcatgtcaacctcggaggcatccctgtcttcattatagctgacccctctcctgcgtccttctgtcagcatatcccttctgcatccttcccgtcacacatacataccaagctatgatgattgattgatagtggccttcgagatgaaaaccatccttaaccccatgatccttcccagctggcatccccaccctaagcaaggttccctaaagagaagcttgttgacattttctccccttcctcacttacagtcagctgtcaccttgctccctccacctcccctcgtcaaggtgactgccttccactgccagccacactggcaattgtcttgagacctcactgtgcaagcggcctgggggcgtggcggggaggaggaggaggacaagg

SEQ ID NO: 12165 - protein, 47 aa, Homo sapiens; identical to SEQ ID NO: 12163

SEQ ID NO: 12166 - DNA, 416 bp, Homo sapiens
gcacgcgtgatgaccgtcgtgagcgaattgtggcagagtgtaatgctgtccgccaggccctgcaggacctgctttcggagtacatgggcaatgctggacgtaaagaaagaagtgatgcactcaattctgcaatagataaaatgaccaagaagaccagggacttgcgtagacagctccgcaaagctgtcatggaccacgtttcagattctttcctggaaaccaatgttccacttttggtattgattgaagctgcaaagaatggaaatgagaaagaagttaaggagtatgcccaagttttccgtgaacatgccaacaaattgattgaggtaagtgaattagcagtttcattgacttgtaggcaacttggtgaagtgtggtgagttttaatcacattatttaatcagttaaaatttgta

SEQ ID NO: 12167 - protein, 98 aa, Homo sapiens
MGNAGRKERSDALNSAIDKMTKKTRDLRRQLRKAVMDHVSDSFLETNVPLLVLIEAAKNGNEKEVKEYAQVFREHANKLIEVSELAVSLTCRQLGEVW

SEQ ID NO: 12168 - DNA, 6078 bp, Homo sapiens
agttctgtgtggtcgcagcacataagcaaatccattcttgtgccgtttctcggaaaagcttttcagtaaatgcactcatgctgctccaggagctcttctctgcaacaagccacccatctgccatcaacaagttaagaccaagagaactaacggctgcggaaaggagactgaagctttgattaaccagctgagcagttagaggtggagaaatttaataacttatattcaaaactgatttagggatcagagcaatcacagaaaatgaaaccaatgctttccagagggatatcctaaggaaaaaacaactcgtcctggtggattcaattttacttggaaagcctgggacacagaaaacaggaaactggtcaaaggctcctacatgttagagccttttacagactcactgcgttgagtctaacaaccgcgactgaatgcagcctccaatgtgctcagaagaatgggcttacatttcaagtggccattaggggcccctatgctggcagcaatatatgcaatgagtatggttttaaaaatgctgcctgccctgggtatggcgtgtccacccaaatgccgctgcgagaagctgctcttctactgcgactctcagggcttccactcagtgccaaacgccacagacaagggctctctgggcctgtccctgaggcacaatcacatcacagagctcgaaagagatcaatttgccagcttcagtcaacttacttggctccacttagatcacaatcaaatttcaacagtaaaagaagatgcttttcaaggactatataaacttaaggaattaatcttaagttccaacaaaatattttacttgccaaacacaacttttacccaactgattaacctgcaaaatttggacctgtcttttaatcagctgtcatctctgcacccagagctcttctatggccttcggaagctgcagaccttgcatttacgttccaactccctgcggactatcccagtacgcctgttctgggactgtcgtagtctggagtttctggatttgagcacaaatcgtttgcgaagtttggctcgcaatggatttgcaggattaattaaactgagagagcttcacctagagcacaaccagctgacgaagattaattttgctcatttcctacggctaagcagtctgcacacgctcttcttacaatggaacaaaatcagcaacttgacatgtgggatggagtggacctggggcactttagaaaagctagacctgactggaaatgaaatcaaagccatcgacttgacagtgtttgaaacgatgcccaatcttaaaatactcctcatggataacaacaagttaaacagccttgattccaagatcttaaactccctgagatccctcacaaccgttggtctctctggcaatctgtgggaatgcagcgcccgaatatgtgctctggcctcctggctgggcagtttccaaggtcggtgggaacactccatcctatgccacagtcctgaccacacccaaggagaggatattctagatgcagtccatggatttcagctctgctggaatttgtcaaccactgtcactgtcatggctacaacttatagagatccaaccactgaatatacaaaaagaataagctcatcaagttaccatgtgggagacaaagaaatcccaactactgcaggcatagcagttactaccgaggaacactttcctgaaccagacaatgccatcttcactcagcgggtaattacgggaacaatggctttattgttttctttcttttttattatttttatagtgttcatctccaggaagtgctgccctcccactttaagaagaattaggcagtgctcaatggttcagaaccacaggcagctccgatcccaaacacgactccatatgtcaaacatgtcagaccaaggaccgtataatgaatatgaacccacccatgaaggacccttcatcatcattaatggttatggacagtgcaagtgtcagcagctgccatacaaagaatgtgaagtataatatctacccatcatcaaaaatcacatcagataagtaacctattttacatagtagaggctaaatacatatctaatttttaccaatggtgacattaagcctaattttccaaactaagtggagacttagtttttgaagtgttgaagtatttttaattttttaaatgaaaccatattttaagtgttaaatgaatcaatgctcacattaatttgcactcctgttggaaagtctaaaatgcttacttcaaaataagaaatgtatgtaattatatacaatcgtgtgtaaacctttacactaaggtctccatatactatttttttctactgaaaacaatttagaaagaagctattgggcagaaacagatatagatcaatacctgtttgatcactgctctccatcccatgtaccacaactatcttgctgcttaaaaggagacttagtaaagttctcttgtatgataatttggtatttactcaaatcttcaatttcttgccagggtgggaagtagaatttcatgtatgctgaagactggtaaatattaaacattctccttccagagtttctgcctgggttagtagatattatcaaagtccatatcatgaattcagaaccctttaatgtaattctaataagctgagtgactctttaatatatttacacaatgaatccaagtgactgtgaaaaggtctcattacaatgaaaccaatcctaaataattacaccaacttcttatacatttctcgtttgacttataatggacatgatttttgtggcatttagacaactgttttaaactagcattaaactgtcattgtactaattaatgtactaaatcctatgtttacattaatatgtgaaaaaagatttagaagatattttggagataaacaagacaaactgagtcaatttaacaatcctgacatgctccctccaatttaaaagcgcacacacacacacacacacacacacacacacacacacacactctcgcgctctctctctcaactatcatgatcaaagatgccttgacaaaggggtttaaacctctttcttctgctttttcctgatcttcaaacctcaaagagccaagttaaaaataattggctagcaacaggcttaacactgattcttattgtattacaaaggaaccatgaaaaaaaacactttccaactattatataatacatttcgatctttcaataaagatacgcattcacgctgtaagtgtagttcagtgtaggtgaagaaaacagcaccactgagatgaatctcatggcagaacaactcgacatgcctatgcagccacacagtggtaacttgaaggcagcacagaggtgagggattaaaaggaaaggcagattttgaaatctgactctcaggttagctggagttacaaggcagccaacaatgattatacacaatctgcaccaaacagggaaaggacctgctgctgaaaagggaagaggggtagatcctccaatgtaaatataaacatgccatagttaacaaatgataaggatgccacatttttcatgcagaaaagaaccacaggtattcagtttcttgtattatgatttctaaagaaaacctattaaatatttggaatttagatgcaagctactcattcacacagaacttttccataaacattgttccacatattgaaaaaactgtaaaattatagcactaacttgattttagaaaatgagcattttttacaactgccatttactgtatgtagaaaaaagacataaaaccttagagaaagccactaccatttttcaagttatcttttccccaacatcaacatcaacatgatatccttcattcagggcatattttttcttcccaggatcaaactgaaaacatgttaaggctatagtttagccagtaagatttaatcacaatttttcttctttaatactaagagatgggtaccttagtacccttcacctaacatctctcggtaaaaagcagacaagatcacaaattacagtaaaaatgtgctcttttttaaggtgggcagattagtttgtcaaagtctcagcccagttcaattcagttgatctcgagtggtgagtattttgtctcttgttaaaccagaccctgggcttgtctgggcagagacagaagctgatttaacagcatagagcacagcgccctacttccccacagacaggctgaattagaagcccctattacaaataagagcaccacgagctaaaatttaccaacccatttatcaggatgaccattgccatttgtcaggtgacagacagcttggtcacaacacaactgtgtcctgagcacacaagattccatcagccctgaaggacagcagaggagtattttccatcatttcaaaccacaaacaaaattaagatttaaactgtgggatgggtaagaaatccccttctttggctgggaatctccaccttaatccttaaaggaccataactggcaaaatccttagtgtacggacaaaagcaaattggaaaagccagccatttactaattcagaggaacagcatagccaaggctagcgaggcatactttccagttgaaaaaaatcaaaattttttgccttccatttttctgggtaatgtcctttaagaaaagtgaatgacagtagtaccaaaaaggtattttcctttctcatttaaaagcaaaaacctccctttttaattgcctgtagaaggcaagattttctttcatttttgtccatttgtgtttcagaatcagcacaggtttgaagattagactgttagtcatctgtgctttctttaccaactggctagaacggaacagcatcacagcaacgctgcggatcttggttacacagtgtcagagcttttgttttttgatggggttttatcctcttcaccaccactacccactccattttttttctatttttaagattagaggaaaatgaccattaagaaccagaaaaataattaatctctctggaaaaaggaaagctaaagaagactatgataccatacccatctagaaaccaagaactagtttgaaatcgtttatattcatttctgtagcatgacagggatttcaatcacctttctgaaaagagtgggctgataaacttgtaaatccacacacaactctgagaatacccactgccagcatcaaaaagcaaagatactaattttttaagccaaaaatctgtactaacacatgtaatttcttaatgtgcctaagttaatttctgtatcaattcaataaatggaattgactgaacttcccaacgccactaattattaaaatccatctgcttattctaatgctagtcaccaagagctagactccatctttccaataaaaatgagccctatgtagcactaggtttgaattctaaaattcaaaacaggcatttcattttcttaaggcacacttcctacacacagctatcaggggaaaaagctataaatgtcctgttctttttctgaagtgtggatatcaatataaaatttgttaaagaatatttttaacagctgacttacatgatcgttttcctaatacaggaatacagcgacagacctatctgaaaagtctgtttgggggcatacttttcatatcttattgactaaagcccttgagccaggaaaaaaaaaaaaaaagagagagagacagtaaggccatctatagataattaaatatttctctatctaacctggggcaaactcatagtacttgaataaggccaaaaacaaatagaaaattactgtttaagctttcattctgctattgcaaacatttggaaacctctgcaactctttcaactaacatttttgtccttagcggtttttttttttttttttaagtctgatatatggaatgtttggtgaaccttcctatcaacactgagactggaaactcaaagtacagtccaaatacattgtgttcaatcaccttcaagagccatttttctttttgggtgggaggtgggcagatgggttgagggtgggaagaaaatactattatgcagggtgttttgggaggggggagggtaacataaagagcagtgtacaggcaagttttgttattaaaattgt

SEQ ID NO: 12169 - protein, 516 aa, Homo sapiens; identical to SEQ ID NO: 4679

SEQ ID NO: 12170 - DNA, 2140 bp, Homo sapiens
agttctgtgtggtcgcagcacataagcaaatccattcttgtgccgtttctcggaaaagcttttcagtaaatgcactcatgctgctccaggagctcttctctgcaacaagccacccatctgccatcaacaagttaagaccaagagaactaacggctgcggaaaggagactgaagctttgattaaccagctgagcagttagaggtggagaaatttaataacttatattcaaaactgatttagggatcagagcaatcacagaaaatgaaaccaatgctttccagagggatatcctaaggaaaaaacaactcgtcctggtggattcaattttacttggaaagcctgggacacagaaaacaggaaactggtcaaaggctcctacatgttagagccttttacagactcactgcgttgagtctaacaaccgcgactgaatgcagcctccaatgtgctcagaagaatggctgtcatctctgcacccagagctcttctatggccttcggaagctgcagaccttgcatttacgttccaactccctgcggactatcccagtacgcctgttctgggactgtcgtagtctggagtttctggatttgagcacaaatcgtttgcgaagtttggctcgcaatggatttgcaggattaattaaactgagagagcttcacctagagcacaaccagctgacgaagattaattttgctcatttcctacggctaagcagtctgcacacgctcttcttacaatggaacaaaatcagcaacttgacatgtgggatggagtggacctggggcactttagaaaagctagacctgactggaaatgaaatcaaagccatcgacttgacagtgtttgaaacgatgcccaatcttaaaatactcctcatggataacaacaagttaaacagccttgattccaagatcttaaactccctgagatccctcacaaccgttggtctctctggcaatctgtgggaatgcagcgcccgaatatgtgctctggcctcctggctgggcagtttccaaggtcggtgggaacactccatcctatgccacagtcctgaccacacccaaggagaggatattctagatgcagtccatggatttcagctctgctggaatttgtcaaccactgtcactgtcatggctacaacttatagagatccaaccactgaatatacaaaaagaataagctcatcaagttaccatgtgggagacaaagaaatcccaactactgcaggcatagcagttactaccgaggaacactttcctgaaccagacaatgccatcttcactcagcgggtaattacgggaacaatggctttattgttttctttcttttttattatttttatagtgttcatctccaggaagtgctgccctcccactttaagaagaattaggcagtgctcaatggttcagaaccacaggcagctccgatcccaaacacgactccatatgtcaaacatgtcagaccaaggaccgtataatgaatatgaacccacccatgaaggacccttcatcatcattaatggttatggacagtgcaagtgtcagcagctgccatacaaagaatgtgaagtataatatctacccatcatcaaaaatcacatcagataagtaacctattttacatagtagaggctaaatacatatctaatttttaccaatggtgacattaagcctaattttccaaactaagtggagacttagtttttgaagtgttgaagtatttttaattttttaaatgaaaccatattttaagtgttaaatgaatcaatgctcacattaatttgcactcctgttggaaagtctaaaatgcttacttcaaaataagaaatgtatgtaattatatacaatcgtgtgtaaacctttacactaaggtctccatatactatttttttctactgaaaacaatttagaaagaagctattgggcagaaacagatatagatcaatacctgtttgatcactgctctccatcccatgtaccacaactatcttgctgcttaaaaggagacttagtaaagttctcttgtatgataatttggtatttactcaaatcttcaatttcttgccagggtgggaagtagaatttcatgtatgctgaagactggtaaatattaaacattctccttccagagtttc

SEQ ID NO: 12171 - protein, 382 aa, Homo sapiens
MQPPMCSEEWLSSLHPELFYGLRKLQTLHLRSNSLRTIPVRLFWDCRSLEFLDLSTNRLRSLARNGFAGLIKLRELHLEHNQLTKINFAHFLRLSSLHTLFLQWNKISNLTCGMEWTWGTLEKLDLTGNEIKAIDLTVFETMPNLKILLMDNNKLNSLDSKILNSLRSLTTVGLSGNLWECSARICALASWLGSFQGRWEHSILCHSPDHTQGEDILDAVHGFQLCWNLSTTVTVMATTYRDPTTEYTKRISSSSYHVGDKEIPTTAGIAVTTEEHFPEPDNAIFTQRVITGTMALLFSFFFIIFIVFISRKCCPPTLRRIRQCSMVQNHRQLRSQTRLHMSNMSDQGPYNEYEPTHEGPFIIINGYGQCKCQQLPYKECEV

SEQ ID NO: 12172 - DNA, 551 bp, Homo sapiens
gtttgggttttccagaagctttactgttataaagcaccatgctttgtaacagcatcggggtcgttgcaggaccccctgattacaataaagcgagaaagaagaactcctgacttaaaaacatgatattccttcagtgtaggaagcagcagtgaggttgtaataaaggctgcattcaagaagacccatctgaacagtgagttgggttagcagagtgatgatttttaatgcttgtgagagccagtgttagactgccgattctgcatagagagatcatctaaatgggcagaagcctgcacaatttatgaagtgctgatttaacaccagcctatgcaagacaaggtctcactgtgttgcccaggttggagtgcagtggcgtaacctcccaggctccattgatctccctccttagcctcccagatagctgggactacagatggcccaaggggctatacaaagaaagctgtttgcacaggatagaattaagagcagcatgtcagcattccgtctgcagttgagatgttgattcctccttgtattgcacattgctgaaa

SEQ ID NO: 12173 - protein, 69 aa, Homo sapiens
SADLTPAYARQGLTVLPRLECSGVTSQAPLISLLSLPDSWDYRWPKGLYKESCLHRIELRAACQHSVCS

SEQ ID NO: 12174 - DNA, 536 bp, Homo sapiens
gttataaagcaccatgctttgtaacagcatcggggtcgttgcaggaccccctgattacaataaagcgagaaagaagaactcctgacttaaaaacatgatattccttcagtgtaggaagcagcagtgaggttgtaataaaggctgcattcaagaagacccatctgaacagctggacgtaaagaaagaagtgatgcactcaattctgcaatagataaaatgaccaagaagaccagggacttgcgtagacagctccgcaaagctgtcatggaccacgtttcagattctttcctggaaaccaatgttccacttttggtattgattgaagctgcaaagaatggaaatgagaaagaagttaaggagtatgcccaagttttccgtgaacatgccaacaaattgattgaggtaagtgaattagcagtttcattgacttgtaggcaacttggtgaagtgtggtgagttttaatcacattatttaatcagttaaaatttgtaagggctcgcttaacatacaacatgtctgagatgatagtctttca

SEQ ID NO: 12175 - protein, 79 aa, Homo sapiens
MTKKTRDLRRQLRKAVMDHVSDSFLETNVPLLVLIEAAKNGNEKEVKEYAQVFREHANKLIEVSELAVSLTCRQLGEVW

SEQ ID NO: 12176 - DNA, 2896 bp, Homo sapiens
ctttgtaacagcatcggggtcgttgcaggaccccctgattacaataaagcgagaaagaagaactcctgacttaaaaacatgatattccttcagtgtaggaagcagcagtgaggttgtaataaaggctgcattcaagaagacccatctgaacagtgagttgggttagcagagtgatgatttttaatgcttgtgagagccagtgttagactgccgattctgcatagagagatcatctaaatgggcagaagcctgcacaatttatgaagtgctgatttaacaccagcctatgcaaggctggacgtaaagaaagaagtgatgcactcaattctgcaatagataaaatgaccaagaagaccagggacttgcgtagacagctccgcaaagctgtcatggaccacgtttcagattctttcctggaaaccaatgttccacttttggtattgattgaagctgcaaagaatggaaatgagaaagaagttaaggagtatgcccaagttttccgtgaacatgccaacaaattgattgaggttgccaacttggcctgttccatctcaaataatgaagaaggtgtaaagcttgttcgaatgtctgcaagccagttagaagccctctgtcctcaggttattaatgctgcactggctttagcagcaaaaccacagagtaaactggcccaagagaacatggatctttttaaagaacaatgggaaaaacaagtccgtgttctcacagatgctgtcgatgacattacttccattgatgacttcttggctgtctcagagaatcacattttggaagatgtgaacaaatgtgtcattgctctccaagagaaggatgtggatggcctggaccgcacagctggtgcaattcgaggccgggcagcccgggtcattcacgtagtcacctcagagatggacaactatgagccaggagtctacacagagaaggttctggaagccactaagctgctctccaacacagtcatgccacgttttactgagcaagtagaagcagccgtggaagccctcagctcggaccctgcccagcccatggatgagaatgagtttatcgatgcttcccgcctggtatatgatggcatccgggacatcaggaaagcagtgctgatgataaggacccctgaggagttggatgactctgactttgagacagaagattttgatgtcagaagcaggacgagcgtccagacagaagacgatcagctgatagctggccagagtgcccgggcgatcatggctcagcttccccaggagcaaaaagcgaagattgcggaacaggtggccagcttccaggaagaaaagagcaagctggatgctgaagtgtccaaatgggacgacagtggcaatgacatcattgtgctggccaagcagatgtgcatgattatgatggagatgacagactttacccgaggtaaaggaccactcaaaaatacatcggatgtcatcagtgctgccaagaaaattgctgaggcaggatccaggatggacaagcttggccgcaccattgcagaccattgccccgactcggcttgcaagcaggacctgctggcctacctgcaacgcatcgccctctactgccaccagctgaacatctgcagcaaggtcaaggccgaggtgcagaatctcggcggggagcttgttgtctctggggtggacagcgccatgtccctgatccaggcagccaagaacttgatgaatgctgtggtgcagacagtgaaggcatcctacgtcgcctctaccaaataccaaaagtcacagggtatggcttccctcaaccttcctgctgtgtcatggaagatgaaggcaccagagaaaaagccattggtgaagagagagaaacaggatgagacacagaccaagattaaacgggcatctcagaagaagcacgtgaacccggtgcaggccctcagcgagttcaaagctatggacagcatctaagtctgcccaggccggccgcccccacccctcggggctcctgaatatcagtcactgttcgtcactcaaatgaatttgctaaatacaacactgatactagattccacagggaaatgggcagactgaaccagtccaggtggtgaattttccaagaacatagtttaagttgattaaaaatgcttttagaatgcaggagcctacttctagctgtattttttgtatgcttaaataaaaataaaaattcataaccaaagagaatcccacattagcttgttagtaatgctctgaccaagccgagatgcccattctcttagtgatggcggcgttagggtttgagagaagggaatttggctcaacttcagttgagagggtgcagtccagacagcttgactgcttttaaatgaccaaagatgacctgtggtaagcaacctgggcatcttaggaagcagtccctggagaaggcatgttcccagaaaggtctctggagggacaaactcactcagtaaaacataatgtatcatgaagaaaactgattctctatgacatgaaatgaaaattttaatgcattgttataattactaatgtacgctgctgcaggacattaataaagttgcttttttaggctacagtgtctcgatgccataatcagaacacactttttttcctctttctcccagcttcaaatgcaaattcatcattgggctcacttctaataactgcagtgtttcccgccttgggcttgcagcagaaaaacctgacaacatagtgtttgctaaggcagtaatttagactttaccttatttgtgattactgtagtgattgattgattgattactattaactacaaggtataatttactatcaccttatttaaattttatgaattaatttgaatgttttttacactaactaacttttcccaataaagtccactatgaaaccacgac

SEQ ID NO: 12177 - protein, 536 aa, Homo sapiens
MTKKTRDLRRQLRKAVMDHVSDSFLETNVPLLVLIEAAKNGNEKEVKEYAQVFREHANKLIEVANLACSISNNEEGVKLVRMSASQLEALCPQVINAALALAAKPQSKLAQENMDLFKEQWEKQVRVLTDAVDDITSIDDFLAVSENHILEDVNKCVIALQEKDVDGLDRTAGAIRGRAARVIHVVTSEMDNYEPGVYTEKVLEATKLLSNTVMPRFTEQVEAAVEALSSDPAQPMDENEFIDASRLVYDGIRDIRKAVLMIRTPEELDDSDFETEDFDVRSRTSVQTEDDQLIAGQSARAIMAQLPQEQKAKIAEQVASFQEEKSKLDAEVSKWDDSGNDIIVLAKQMCMIMMEMTDFTRGKGPLKNTSDVISAAKKIAEAGSRMDKLGRTIADHCPDSACKQDLLAYLQRIALYCHQLNICSKVKAEVQNLGGELVVSGVDSAMSLIQAAKNLMNAVVQTVKASYVASTKYQKSQGMASLNLPAVSWKMKAPEKKPLVKREKQDETQTKIKRASQKKHVNPVQALSEFKAMDSI

SEQ ID NO: 12178 - DNA, 1246 bp, Homo sapiens
cagtggcaatgacatcattgtgctggccaagcagatgtgcatgattatgatggagatgacagactttacccgaggtaaaggaccactcaaaaatacatcggatgtcatcagtgctgccaagaaaattgctgaggcaggatccaggatggacaagcttggccgcaccattgcagaccatgtaagtgacagacttgccaggtgggtctccaagctcctcctggggctcaggcagcccagcctggtccattcagggtaagtttcatgggccacagcacttttgccactcatctctaaaaatggttcttattaatcccagcatagatttgtaaggattctctagagcggatgtgtatgtcctggaatcttccatcgcttggtagccaaaattaacctctgctattgtctcttatgtctcagttccctctctccccctctgggcaggggccgagagcagccagaagccatgtggccagtgctgtggaaggctggtgtgcctagatgggcccaggtttcttcatcctcagcactgtgtttctcagccaccccgtcttcatccccctattccctcacactgataggtacaaaaatacggttcctaccgcctggaaattgtacaatacatttcatttggtgttttaagcctgatcaagagaagctctttctcagttacagtttttctctgtagttaacaagcctccccaccattttccctgaaatagccaaactctcagcctcatctaggccacaggatgtgtgagacacaagcctccttacacaagccaaagattgtaaaggcatccttgactcccacacaatcggtaatagggcctattgcttccattggccaaatgtatcttgacacaaaccagtcttgtcctttctgcagatctccatagccacttggactactgtggccgctcccgatttcctgttctttcctctctccacttccttctgcatccagctgtcaatactgtcatctgaaaatgcagatcacatggctctgccctgcttccatgactacttagaatacagctcatctccagtatggtctgcggggtctcagttcataccactctctgtggtgtactttgctccagcctcactggaagaaaatgtttgcttgctataaacacttgagaggtgctctgtgtttctccctttgggtaaagctttctaggctggtcctaatctgggagcctctaaaactctgagatgtggagcgagacaggaactgggcaggggc

SEQ ID NO: 12179 - protein, 73 aa, Homo sapiens
MCMIMMEMTDFTRGKGPLKNTSDVISAAKKIAEAGSRMDKLGRTIADHVSDRLARWVSKLLLGLRQPSLVHSG

SEQ ID NO: 12180 - DNA, 670 bp, Homo sapiens
atgacagactttacccgaggtaaaggaccactcaaaaatacatcggatgtcatcagtgctgccaagaaaattgctgaggcaggatccaggatggacaagcttggccgcaccattgcagaccatgtggacagcgccatgtccctgatccaggcagccaagaacttgatgaatgctgtggtgcagacagtgaaggcatcctacgtcgcctctaccaaataccaaaagtcacagggtatggcttccctcaaccttcctgctgtgtcatggaagatgaaggcaccagagaaaaagccattggtgaagagagagaaacaggatgagacacagaccaagattaaacgggcatctcagaagaagcacgtgaacccggtgcaggccctcagcgagttcaaagctatggacagcatctaagtctgcccaggccggccgcccccacccctcggggctcctgaatatcagtcactgttcgtcactcaaatgaatttgctaaatacaacactgatactagattccacagggaaatgggcagactgaaccagtccaggtggtgaattttccaagaacatagtttaagttgattaaaaatgcttttagaatgcaggagcctacttctagctgtattttttgtatgcttaaataaaaataaaaattcataaccaaagagaatccc

SEQ ID NO: 12181 - protein, 136 aa, Homo sapiens
MTDFTRGKGPLKNTSDVISAAKKIAEAGSRMDKLGRTIADHVDSAMSLIQAAKNLMNAVVQTVKASYVASTKYQKSQGMASLNLPAVSWKMKAPEKKPLVKREKQDETQTKIKRASQKKHVNPVQALSEFKAMDSI

SEQ ID NO: 12182 - DNA, 1051 bp, Homo sapiens
atgacagactttacccgaggtaaaggaccactcaaaaatacatcggatgtcatcagtgctgccaagaaaattgctgaggcaggatccaggatggacaagcttggccgcaccattgcagaccatgtggacagcgccatgtccctgatccaggcagccaagaacttgatgaatgctgtggtgcagacagtgaaggcatcctacgtcgcctctaccaaataccaaaagtcacagggtatggcttccctcaaccttcctgctgtgtcatggaagatgaaggcaccagagaaaaagccattggtgaagagagagaaacaggatgagacacagaccaagattaaacgggcatctcagaagaagcacgtgaacccggtgcaggccctcagcgagttcaaagctatggacagcatctaagtctgcccaggccggccgcccccacccctcggggctcctgaatatcagtcactgttcgtcactcaaatgaatttgctaaatacaacactgatactagattccacagggaaatgggcagactgaaccagtccaggtggtgaattttccaagaacatagtttaagttgattaaaaatgcttttagaatgcaggagcctacttctagctgtattttttgtatgcttaaataaaaataaaaattcataaccaaagagaatcccacattagcttgttagtaatgctctgaccaagccgagatgcccattctcttagtgatggcggcgttagggtttgagagaagggaatttggctcaacttcagttgagagggtgcagtccagacagcttgactgcttttaaatgaccaaagatgacctgtggtaagcaacctgggcatcttaggaagcagtccctggagaaggcatgttcccagaaaggtctctggagggacaaactcactcagtaaaacataatgtatcatgaagaaaactgattctctatgacatgaaatgaaaattttaatgcattgttataattactaatgtacgctgctgcaggacattaataaagttgcttttttaggctacagtgtctcgatgccat

SEQ ID NO: 12183 - protein, 136 aa, Homo sapiens; identical to SEQ ID NO: 12181

SEQ ID NO: 12184 - DNA, 1355 bp, Homo sapiens
atgacagactttacccgaggtaaaggaccactcaaaaatacatcggatgtcatcagtgctgccaagaaaattgctgaggcaggatccaggatggacaagcttggccgcaccattgcagaccatgtggacagcgccatgtccctgatccaggcagccaagaacttgatgaatgctgtggtgcagacagtgaaggcatcctacgtcgcctctaccaaataccaaaagtcacagggtatggcttccctcaaccttcctgctgtgtcatggaagatgaaggcaccagagaaaaagccattggtgaagagagagaaacaggatgagacacagaccaagattaaacgggcatctcagaagaagcacgtgaacccggtgcaggccctcagcgagttcaaagctatggacagcatctaagtctgcccaggccggccgcccccacccctcggggctcctgaatatcagtcactgttcgtcactcaaatgaatttgctaaatacaacactgatactagattccacagggaaatgggcagactgaaccagtccaggtggtgaattttccaagaacatagtttaagttgattaaaaatgcttttagaatgcaggagcctacttctagctgtattttttgtatgcttaaataaaaataaaaattcataaccaaagagaatcccacattagcttgttagtaatgctctgaccaagccgagatgcccattctcttagtgatggcggcgttagggtttgagagaagggaatttggctcaacttcagttgagagggtgcagtccagacagcttgactgcttttaaatgaccaaagatgacctgtggtaagcaacctgggcatcttaggaagcagtccctggagaaggcatgttcccagaaaggtctctggagggacaaactcactcagtaaaacataatgtatcatgaagaaaactgattctctatgacatgaaatgaaaattttaatgcattgttataattactaatgtacgctgctgcaggacattaataaagttgcttttttaggctacagtgtctcgatgccataatcagaacacactttttttcctctttctcccagcttcaaatgcaaattcatcattgggctcacttctaataactgcagtgtttcccgccttgggcttgcagcagaaaaacctgacaacatagtgtttgctaaggcagtaatttagactttaccttatttgtgattactgtagtgattgattgattgattactattaactacaaggtataatttactatcaccttatttaaattttatgaattaatttgaatgttttttacactaactaacttttcccaataaagtccactatgaaaccacgac

SEQ ID NO: 12185 - protein, 136 aa, Homo sapiens; identical to SEQ ID NO: 12181

SEQ ID NO: 12186 - DNA, 1982 bp, Homo sapiens
atgacagactttacccgaggtaaaggaccactcaaaaatacatcggatgtcatcagtgctgccaagaaaattgctgaggcaggatccaggatggacaagcttggccgcaccattgcagaccatgtggacagcgccatgtccctgatccaggcagccaagaacttgatgaatgctgtggtgcagacagtgaaggcatcctacgtcgcctctaccaaataccaaaagtcacagggtatggcttccctcaaccttcctgctgtgtcatggaagatgaaggcaccagagaaaaagccattggtgaagagagagaaacaggatgagacacagaccaagattaaacgggcatctcagaagaagcacgtgaacccggtgcaggccctcagcgagttcaaagctatggacagcatctaagtctgcccaggccggccgcccccacccctcggggctcctgaatatcagtcactgttcgtcactcaaatgaatttgctaaatacaacactgatactagattccacagggaaatgggcagactgaaccagtccaggtggtgaattttccaagaacatagtttaagttgattaaaaatgcttttagaatgcaggagcctacttctagctgtattttttgtatgcttaaataaaaataaaaattcataaccaaagagaatcccacattagcttgttagtaatgctctgaccaagccgagatgcccattctcttagtgatggcggcgttagggtttgagagaagggaatttggctcaacttcagttgagagggtgcagtccagacagcttgactgcttttaaatgaccaaagatgacctgtggtaagcaacctgggcatcttaggaagcagtccctggagaaggcatgttcccagaaaggtctctggagggacaaactcactcagtaaaacataatgtatcatgaagaaaactgattctctatgacatgaaatgaaaattttaatgcattgttataattactaatgtacgctgctgcaggacattaataaagttgcttttttaggctacagtgtctcgatgccataatcagaacacactttttttcctctttctcccagcttcaaatgcaaattcatcattgggctcacttctaataactgcagtgtttcccgccttgggcttgcagcagaaaaacctgacaacatagtgtttgctaaggcagtaatttagactttaccttatttgtgattactgtagtgattgattgattgattactattaactacaaggtataatttactatcaccttatttaaattttatgaattaatttgaatgttttttacactaactaacttttcccaataaagtccactatgaaaccacgacatccaagagcccaaagtcgtcttctctgccttcaagtcatagatttgcccgcagtatctgtggtgctctgggccctcccggtgtccgtctcttccaggatggggatgcccgggagggaaactgtctgtggctctaggctgcacggctcgtgccaacccatcagggagggccatgcccgttgtcctattgagtgccccaccctgcacccccaccttgggaattcacatgtccattccttgaggttcatgtcaacctcggaggcatccctgtcttcattatagctgacccctctcctgcgtccttctgtcagcatatcccttctgcatccttcccgtcacacatacataccaagctatgatgattgattgatagtggccttcgagatgaaaaccatccttaaccccatgatccttcccagctggcatccccaccctaagcaaggttccctaaagagaagcttgttgacattttctccccttcctcacttacagtcagctgtcaccttgctccctccacctcccctcgtcaaggtgactgccttccactgccagccacactggcaattgtcttgagacctcactgtgcaagcggcctgggggcgtggcggggaggaggaggaggacaagg

SEQ ID NO: 12187 - protein, 136 aa, Homo sapiens; identical to SEQ ID NO: 12181

SEQ ID NO: 12188 - DNA, 1085 bp, Homo sapiens
gctttgtggacaatcttctttttctactccaactgtgaggggcttcacatacaataatccttgttctcttccctcttctcagaggtaaaggaccactcaaaaatacatcggatgtcatcagtgctgccaagaaaattgctgaggcaggatccaggatggacaagcttggccgcaccattgcagaccatgtaagtgacagacttgccaggtgggtctccaagctcctcctggggctcaggcagcccagcctggtccattcagggtaagtttcatgggccacagcacttttgccactcatctctaaaaatggttcttattaatcccagcatagatttgtaaggattctctagagcggatgtgtatgtcctggaatcttccatcgcttggtagccaaaattaacctctgctattgtctcttatgtctcagttccctctctccccctctgggcaggggccgagagcagccagaagccatgtggccagtgctgtggaaggctggtgtgcctagatgggcccaggtttcttcatcctcagcactgtgtttctcagccaccccgtcttcatccccctattccctcacatgaaccagtccaggtggtgaattttccaagaacatagtttaagttgattaaaaatgcttttagaatgcaggagcctacttctagctgtattttttgtatgcttaaataaaaataaaaattcataaccaaagagaatcccacattagcttgttagtaatgctctgaccaagccgagatgcccattctcttagtgatggcggcgttagggtttgagagaagggaatttggctcaacttcagttgagagggtgcagtccagacagcttgactgcttttaaatgaccaaagatgacctgtggtaagcaacctgggcatcttaggaagcagtccctggagaaggcatgttcccagaaaggtctctggagggacaaactcactcagtaaaacataatgtatcatgaagaaaactgattctctatgacatgaaatgaaaattttaatgcattgttataattactaatgtacgctgctgcaggacattaataaagttgcttttttaggctac

SEQ ID NO: 12189 - protein, 36 aa, Homo sapiens
MWPVLWKAGVPRWAQVSSSSALCFSATPSSSPYSLT

SEQ ID NO: 12190 - DNA, 1479 bp, Homo sapiens
attccctcacactgataggtacaaaaatacggttcctaccgcctggaaattgtacaatacatttcatttggtgttttaagcctgatcaagagaagctctttctcagttacagtttttctctgtagttaacaagcctccccaccattttccctgaaatagccaaactctcagcctcatctaggccacaggatgtgtgagacacaagcctccttacacaagccaaagattgtaaaggcatccttgactcccacacaatcggtaatagggcctattgcttccattggccaaatgtatcttgacacaaaccagtcttgtcctttctgcagatctccatagccacttggactactgtggccgctcccgatttcctgttctttcctctctccacttccttctgcatccagctgtcaatactgtcatctgaaaatgcagatcacatggctctgccctgcttccatgactacttagaatacagctcatctccagtatggtctgcggggtctcagttcataccactctctgtggtgtactttgctccagcctcactggaagaaaatgtttgcttgctataaacacttgagaggtgctctgtgtttctccctttgggtaaagctttctaggctggtcctaatctgggagcctctaaaactctgagatgtggagcgagacaggaactgggcaggggccacccttttctctttgaccatccccaactgctttttttcttgctttactttactcacttgtcttccacctcagcctgcagtgagtggcttttgtcatcaggcattaataacgcaaagtgctcggcttgcaagcaggacctgctggcctacctgcaacgcatcgccctctactgccaccagctgaacatctgcagcaaggtcaaggccgaggtgcagaatctcggcggggagcttgttgtctctggggtggacagcgccatgtccctgatccaggcagccaagaacttgatgaatgctgtggtgcagacagtgaaggcatcctacgtcgcctctaccaaataccaaaagtcacagggtatggcttccctcaaccttcctgctgtgtcatggaagatgaaggcaccagagaaaaagccattggtgaagagagagaaacaggatgagacacagaccaagattaaacgggcatctcagaagaagcacgtgaacccggtgcaggccctcagcgagttcaaagctatggacagcatctaagtctgcccaggccggccgcccccacccctcggggctcctgaatatcagtcactgttcgtcactcaaatgaatttgctaaatacaacactgatactagattccacagggaaatgggcagactgaaccagtccaggtggtgaattttccaagaacatagtttaagttgattaaaaatgcttttagaatgcaggagcctacttctagctgtattttttgtatgcttaaataaaaataaaaattcataaccaaagagaatccc

SEQ ID NO: 12191 - protein, 91 aa, Homo sapiens
MSLIQAAKNLMNAVVQTVKASYVASTKYQKSQGMASLNLPAVSWKMKAPEKKPLVKREKQDETQTKIKRASQKKHVNPVQALSEFKAMDSI

SEQ ID NO: 12192 - DNA, 1860 bp, Homo sapiens
attccctcacactgataggtacaaaaatacggttcctaccgcctggaaattgtacaatacatttcatttggtgttttaagcctgatcaagagaagctctttctcagttacagtttttctctgtagttaacaagcctccccaccattttccctgaaatagccaaactctcagcctcatctaggccacaggatgtgtgagacacaagcctccttacacaagccaaagattgtaaaggcatccttgactcccacacaatcggtaatagggcctattgcttccattggccaaatgtatcttgacacaaaccagtcttgtcctttctgcagatctccatagccacttggactactgtggccgctcccgatttcctgttctttcctctctccacttccttctgcatccagctgtcaatactgtcatctgaaaatgcagatcacatggctctgccctgcttccatgactacttagaatacagctcatctccagtatggtctgcggggtctcagttcataccactctctgtggtgtactttgctccagcctcactggaagaaaatgtttgcttgctataaacacttgagaggtgctctgtgtttctccctttgggtaaagctttctaggctggtcctaatctgggagcctctaaaactctgagatgtggagcgagacaggaactgggcaggggccacccttttctctttgaccatccccaactgctttttttcttgctttactttactcacttgtcttccacctcagcctgcagtgagtggcttttgtcatcaggcattaataacgcaaagtgctcggcttgcaagcaggacctgctggcctacctgcaacgcatcgccctctactgccaccagctgaacatctgcagcaaggtcaaggccgaggtgcagaatctcggcggggagcttgttgtctctggggtggacagcgccatgtccctgatccaggcagccaagaacttgatgaatgctgtggtgcagacagtgaaggcatcctacgtcgcctctaccaaataccaaaagtcacagggtatggcttccctcaaccttcctgctgtgtcatggaagatgaaggcaccagagaaaaagccattggtgaagagagagaaacaggatgagacacagaccaagattaaacgggcatctcagaagaagcacgtgaacccggtgcaggccctcagcgagttcaaagctatggacagcatctaagtctgcccaggccggccgcccccacccctcggggctcctgaatatcagtcactgttcgtcactcaaatgaatttgctaaatacaacactgatactagattccacagggaaatgggcagactgaaccagtccaggtggtgaattttccaagaacatagtttaagttgattaaaaatgcttttagaatgcaggagcctacttctagctgtattttttgtatgcttaaataaaaataaaaattcataaccaaagagaatcccacattagcttgttagtaatgctctgaccaagccgagatgcccattctcttagtgatggcggcgttagggtttgagagaagggaatttggctcaacttcagttgagagggtgcagtccagacagcttgactgcttttaaatgaccaaagatgacctgtggtaagcaacctgggcatcttaggaagcagtccctggagaaggcatgttcccagaaaggtctctggagggacaaactcactcagtaaaacataatgtatcatgaagaaaactgattctctatgacatgaaatgaaaattttaatgcattgttataattactaatgtacgctgctgcaggacattaataaagttgcttttttaggctacagtgtctcgatgccat

SEQ ID NO: 12193 - protein, 91 aa, Homo sapiens; identical to SEQ ID NO: 12191

SEQ ID NO: 12194 - DNA, 2164 bp, Homo sapiens
attccctcacactgataggtacaaaaatacggttcctaccgcctggaaattgtacaatacatttcatttggtgttttaagcctgatcaagagaagctctttctcagttacagtttttctctgtagttaacaagcctccccaccattttccctgaaatagccaaactctcagcctcatctaggccacaggatgtgtgagacacaagcctccttacacaagccaaagattgtaaaggcatccttgactcccacacaatcggtaatagggcctattgcttccattggccaaatgtatcttgacacaaaccagtcttgtcctttctgcagatctccatagccacttggactactgtggccgctcccgatttcctgttctttcctctctccacttccttctgcatccagctgtcaatactgtcatctgaaaatgcagatcacatggctctgccctgcttccatgactacttagaatacagctcatctccagtatggtctgcggggtctcagttcataccactctctgtggtgtactttgctccagcctcactggaagaaaatgtttgcttgctataaacacttgagaggtgctctgtgtttctccctttgggtaaagctttctaggctggtcctaatctgggagcctctaaaactctgagatgtggagcgagacaggaactgggcaggggccacccttttctctttgaccatccccaactgctttttttcttgctttactttactcacttgtcttccacctcagcctgcagtgagtggcttttgtcatcaggcattaataacgcaaagtgctcggcttgcaagcaggacctgctggcctacctgcaacgcatcgccctctactgccaccagctgaacatctgcagcaaggtcaaggccgaggtgcagaatctcggcggggagcttgttgtctctggggtggacagcgccatgtccctgatccaggcagccaagaacttgatgaatgctgtggtgcagacagtgaaggcatcctacgtcgcctctaccaaataccaaaagtcacagggtatggcttccctcaaccttcctgctgtgtcatggaagatgaaggcaccagagaaaaagccattggtgaagagagagaaacaggatgagacacagaccaagattaaacgggcatctcagaagaagcacgtgaacccggtgcaggccctcagcgagttcaaagctatggacagcatctaagtctgcccaggccggccgcccccacccctcggggctcctgaatatcagtcactgttcgtcactcaaatgaatttgctaaatacaacactgatactagattccacagggaaatgggcagactgaaccagtccaggtggtgaattttccaagaacatagtttaagttgattaaaaatgcttttagaatgcaggagcctacttctagctgtattttttgtatgcttaaataaaaataaaaattcataaccaaagagaatcccacattagcttgttagtaatgctctgaccaagccgagatgcccattctcttagtgatggcggcgttagggtttgagagaagggaatttggctcaacttcagttgagagggtgcagtccagacagcttgactgcttttaaatgaccaaagatgacctgtggtaagcaacctgggcatcttaggaagcagtccctggagaaggcatgttcccagaaaggtctctggagggacaaactcactcagtaaaacataatgtatcatgaagaaaactgattctctatgacatgaaatgaaaattttaatgcattgttataattactaatgtacgctgctgcaggacattaataaagttgcttttttaggctacagtgtctcgatgccataatcagaacacactttttttcctctttctcccagcttcaaatgcaaattcatcattgggctcacttctaataactgcagtgtttcccgccttgggcttgcagcagaaaaacctgacaacatagtgtttgctaaggcagtaatttagactttaccttatttgtgattactgtagtgattgattgattgattactattaactacaaggtataatttactatcaccttatttaaattttatgaattaatttgaatgttttttacactaactaacttttcccaataaagtccactatgaaaccacgac

SEQ ID NO: 12195 - protein, 91 aa, Homo sapiens; identical to SEQ ID NO: 12191

SEQ ID NO: 12196 - DNA, 2791 bp, Homo sapiens
attccctcacactgataggtacaaaaatacggttcctaccgcctggaaattgtacaatacatttcatttggtgttttaagcctgatcaagagaagctctttctcagttacagtttttctctgtagttaacaagcctccccaccattttccctgaaatagccaaactctcagcctcatctaggccacaggatgtgtgagacacaagcctccttacacaagccaaagattgtaaaggcatccttgactcccacacaatcggtaatagggcctattgcttccattggccaaatgtatcttgacacaaaccagtcttgtcctttctgcagatctccatagccacttggactactgtggccgctcccgatttcctgttctttcctctctccacttccttctgcatccagctgtcaatactgtcatctgaaaatgcagatcacatggctctgccctgcttccatgactacttagaatacagctcatctccagtatggtctgcggggtctcagttcataccactctctgtggtgtactttgctccagcctcactggaagaaaatgtttgcttgctataaacacttgagaggtgctctgtgtttctccctttgggtaaagctttctaggctggtcctaatctgggagcctctaaaactctgagatgtggagcgagacaggaactgggcaggggccacccttttctctttgaccatccccaactgctttttttcttgctttactttactcacttgtcttccacctcagcctgcagtgagtggcttttgtcatcaggcattaataacgcaaagtgctcggcttgcaagcaggacctgctggcctacctgcaacgcatcgccctctactgccaccagctgaacatctgcagcaaggtcaaggccgaggtgcagaatctcggcggggagcttgttgtctctggggtggacagcgccatgtccctgatccaggcagccaagaacttgatgaatgctgtggtgcagacagtgaaggcatcctacgtcgcctctaccaaataccaaaagtcacagggtatggcttccctcaaccttcctgctgtgtcatggaagatgaaggcaccagagaaaaagccattggtgaagagagagaaacaggatgagacacagaccaagattaaacgggcatctcagaagaagcacgtgaacccggtgcaggccctcagcgagttcaaagctatggacagcatctaagtctgcccaggccggccgcccccacccctcggggctcctgaatatcagtcactgttcgtcactcaaatgaatttgctaaatacaacactgatactagattccacagggaaatgggcagactgaaccagtccaggtggtgaattttccaagaacatagtttaagttgattaaaaatgcttttagaatgcaggagcctacttctagctgtattttttgtatgcttaaataaaaataaaaattcataaccaaagagaatcccacattagcttgttagtaatgctctgaccaagccgagatgcccattctcttagtgatggcggcgttagggtttgagagaagggaatttggctcaacttcagttgagagggtgcagtccagacagcttgactgcttttaaatgaccaaagatgacctgtggtaagcaacctgggcatcttaggaagcagtccctggagaaggcatgttcccagaaaggtctctggagggacaaactcactcagtaaaacataatgtatcatgaagaaaactgattctctatgacatgaaatgaaaattttaatgcattgttataattactaatgtacgctgctgcaggacattaataaagttgcttttttaggctacagtgtctcgatgccataatcagaacacactttttttcctctttctcccagcttcaaatgcaaattcatcattgggctcacttctaataactgcagtgtttcccgccttgggcttgcagcagaaaaacctgacaacatagtgtttgctaaggcagtaatttagactttaccttatttgtgattactgtagtgattgattgattgattactattaactacaaggtataatttactatcaccttatttaaattttatgaattaatttgaatgttttttacactaactaacttttcccaataaagtccactatgaaaccacgacatccaagagcccaaagtcgtcttctctgccttcaagtcatagatttgcccgcagtatctgtggtgctctgggccctcccggtgtccgtctcttccaggatggggatgcccgggagggaaactgtctgtggctctaggctgcacggctcgtgccaacccatcagggagggccatgcccgttgtcctattgagtgccccaccctgcacccccaccttgggaattcacatgtccattccttgaggttcatgtcaacctcggaggcatccctgtcttcattatagctgacccctctcctgcgtccttctgtcagcatatcccttctgcatccttcccgtcacacatacataccaagctatgatgattgattgatagtggccttcgagatgaaaaccatccttaaccccatgatccttcccagctggcatccccaccctaagcaaggttccctaaagagaagcttgttgacattttctccccttcctcacttacagtcagctgtcaccttgctccctccacctcccctcgtcaaggtgactgccttccactgccagccacactggcaattgtcttgagacctcactgtgcaagcggcctgggggcgtggcggggaggaggaggaggacaagg

SEQ ID NO: 12197 - protein, 97 aa, Homo sapiens; identical to SEQ ID NO: 12159

SEQ ID NO: 12198 - DNA, 2239 bp, Homo sapiens
ttccttctgcatccagctgtcaatactgtcatctgaaaatgcagatcacatggctctgccctgcttccatgactacttagaatacagctcatctccagtatggtctgcggggtctcagttcataccactctctgtggtgtactttgctccagcctcactggaagaaaatgtttgcttgctataaacacttgagaggtgctctgtgtttctccctttgggtaaagctttctaggctggtcctaatctgggagcctctaaaactctgagatgtggagcgagacaggaactgggcaggggccacccttttctctttgaccatccccaactgctttttttcttgctttactttactcacttgtcttccacctcagcctgcagtgagtggcttttgtcatcaggcattaataacgcaaagtgcctcagagcagaagagttaactatttgtttacttagctaaaaacatctggacttttctccatagccaggctcctgcttgctgagccggcttgttctcacctcgaggggcatgggcctccaccctgccgtttggggtgaggggatccttggccagggtggtttccccgccgtcataggagggaagtcagtgggaggctcagaaggccttggctatacaaccagtgccatgcggcgcagtcagggtcccatggacgacttccatcagctcacccgcctccatccccaagcagagtgtaggcaagggctgtgactgcctcaggtaattgggtgattttgctccagcaagaggagaggaagcatgtgagtgccacactgaacctttcagaaacagccgtggggtcgggggtgcttgggccaggccaggatacttggtgttaagcctgctctctcttcagtgccccgactcggcttgcaagcaggacctgctggcctacctgcaacgcatcgccctctactgccaccagctgaacatctgcagcaaggtcaaggccgaggtgcagaatctcggcggggagcttgttgtctctggggtggacagcgccatgtccctgatccaggcagccaagaacttgatgaatgctgtggtgcagacagtgaaggcatcctacgtcgcctctaccaaataccaaaagtcacagggtatggcttccctcaaccttcctgctgtgtcatggaagatgaaggcaccagagaaaaagccattggtgaagagagagaaacaggatgagacacagaccaagattaaacgggcatctcagaagaagcacgtgaacccggtgcaggccctcagcgagttcaaagctatggacagcatctaagtctgcccaggccggccgcccccacccctcggggctcctgaatatcagtcactgttcgtcactcaaatgaatttgctaaatacaacactgatactagattccacagggaaatgggcagactgaaccagtccaggtggtgaattttccaagaacatagtttaagttgattaaaaatgcttttagaatgcaggagcctacttctagctgtattttttgtatgcttaaataaaaataaaaattcataaccaaagagaatcccacattagcttgttagtaatgctctgaccaagccgagatgcccattctcttagtgatggcggcgttagggtttgagagaagggaatttggctcaacttcagttgagagggtgcagtccagacagcttgactgcttttaaatgaccaaagatgacctgtggtaagcaacctgggcatcttaggaagcagtccctggagaaggcatgttcccagaaaggtctctggagggacaaactcactcagtaaaacataatgtatcatgaagaaaactgattctctatgacatgaaatgaaaattttaatgcattgttataattactaatgtacgctgctgcaggacattaataaagttgcttttttaggctacagtgtctcgatgccataatcagaacacactttttttcctctttctcccagcttcaaatgcaaattcatcattgggctcacttctaataactgcagtgtttcccgccttgggcttgcagcagaaaaacctgacaacatagtgtttgctaaggcagtaatttagactttaccttatttgtgattactgtagtgattgattgattgattactattaactacaaggtataatttactatcaccttatttaaattttatgaattaatttgaatgttttttacactaactaacttttcccaataaagtccactatgaaaccacgac

SEQ ID NO: 12199 - protein, 91 aa, Homo sapiens; identical to SEQ ID NO: 12191

SEQ ID NO: 12200 - DNA, 2866 bp, Homo sapiens
ttccttctgcatccagctgtcaatactgtcatctgaaaatgcagatcacatggctctgccctgcttccatgactacttagaatacagctcatctccagtatggtctgcggggtctcagttcataccactctctgtggtgtactttgctccagcctcactggaagaaaatgtttgcttgctataaacacttgagaggtgctctgtgtttctccctttgggtaaagctttctaggctggtcctaatctgggagcctctaaaactctgagatgtggagcgagacaggaactgggcaggggccacccttttctctttgaccatccccaactgctttttttcttgctttactttactcacttgtcttccacctcagcctgcagtgagtggcttttgtcatcaggcattaataacgcaaagtgcctcagagcagaagagttaactatttgtttacttagctaaaaacatctggacttttctccatagccaggctcctgcttgctgagccggcttgttctcacctcgaggggcatgggcctccaccctgccgtttggggtgaggggatccttggccagggtggtttccccgccgtcataggagggaagtcagtgggaggctcagaaggccttggctatacaaccagtgccatgcggcgcagtcagggtcccatggacgacttccatcagctcacccgcctccatccccaagcagagtgtaggcaagggctgtgactgcctcaggtaattgggtgattttgctccagcaagaggagaggaagcatgtgagtgccacactgaacctttcagaaacagccgtggggtcgggggtgcttgggccaggccaggatacttggtgttaagcctgctctctcttcagtgccccgactcggcttgcaagcaggacctgctggcctacctgcaacgcatcgccctctactgccaccagctgaacatctgcagcaaggtcaaggccgaggtgcagaatctcggcggggagcttgttgtctctggggtggacagcgccatgtccctgatccaggcagccaagaacttgatgaatgctgtggtgcagacagtgaaggcatcctacgtcgcctctaccaaataccaaaagtcacagggtatggcttccctcaaccttcctgctgtgtcatggaagatgaaggcaccagagaaaaagccattggtgaagagagagaaacaggatgagacacagaccaagattaaacgggcatctcagaagaagcacgtgaacccggtgcaggccctcagcgagttcaaagctatggacagcatctaagtctgcccaggccggccgcccccacccctcggggctcctgaatatcagtcactgttcgtcactcaaatgaatttgctaaatacaacactgatactagattccacagggaaatgggcagactgaaccagtccaggtggtgaattttccaagaacatagtttaagttgattaaaaatgcttttagaatgcaggagcctacttctagctgtattttttgtatgcttaaataaaaataaaaattcataaccaaagagaatcccacattagcttgttagtaatgctctgaccaagccgagatgcccattctcttagtgatggcggcgttagggtttgagagaagggaatttggctcaacttcagttgagagggtgcagtccagacagcttgactgcttttaaatgaccaaagatgacctgtggtaagcaacctgggcatcttaggaagcagtccctggagaaggcatgttcccagaaaggtctctggagggacaaactcactcagtaaaacataatgtatcatgaagaaaactgattctctatgacatgaaatgaaaattttaatgcattgttataattactaatgtacgctgctgcaggacattaataaagttgcttttttaggctacagtgtctcgatgccataatcagaacacactttttttcctctttctcccagcttcaaatgcaaattcatcattgggctcacttctaataactgcagtgtttcccgccttgggcttgcagcagaaaaacctgacaacatagtgtttgctaaggcagtaatttagactttaccttatttgtgattactgtagtgattgattgattgattactattaactacaaggtataatttactatcaccttatttaaattttatgaattaatttgaatgttttttacactaactaacttttcccaataaagtccactatgaaaccacgacatccaagagcccaaagtcgtcttctctgccttcaagtcatagatttgcccgcagtatctgtggtgctctgggccctcccggtgtccgtctcttccaggatggggatgcccgggagggaaactgtctgtggctctaggctgcacggctcgtgccaacccatcagggagggccatgcccgttgtcctattgagtgccccaccctgcacccccaccttgggaattcacatgtccattccttgaggttcatgtcaacctcggaggcatccctgtcttcattatagctgacccctctcctgcgtccttctgtcagcatatcccttctgcatccttcccgtcacacatacataccaagctatgatgattgattgatagtggccttcgagatgaaaaccatccttaaccccatgatccttcccagctggcatccccaccctaagcaaggttccctaaagagaagcttgttgacattttctccccttcctcacttacagtcagctgtcaccttgctccctccacctcccctcgtcaaggtgactgccttccactgccagccacactggcaattgtcttgagacctcactgtgcaagcggcctgggggcgtggcggggaggaggaggaggacaagg

SEQ ID NO: 12201 - protein, 97 aa, Homo sapiens; identical to SEQ ID NO: 12159

SEQ ID NO: 12202 - DNA, 723 bp, Homo sapiens
ccaggccaggatacttggtgttaagcctgctctctcttcagtgccccgactcggcttgcaagcaggacctgctggcctacctgcaacgcatcgccctctactgccaccagctgaacatctgcagcaaggtcaaggccgaggtgcagaatctcggcggggagcttgttgtctctggggtggacagcgccatgtccctgatccaggcagccaagaacttgatgaatgctgtggtgcagacagtgaaggcatcctacgtcgcctctaccaaataccaaaagtcacagggtatggcttccctcaaccttcctgctgtgtcatggaagatgaaggcaccagagaaaaagccattggtgaagagagagaaacaggatgagacacagaccaagattaaacgggcatctcagaagaagcacgtgaacccggtgcaggccctcagcgagttcaaagctatggacagcatctaagtctgcccaggccggccgcccccacccctcggggctcctgaatatcagtcactgttcgtcactcaaatgaatttgctaaatacaacactgatactagattccacagggaaatgggcagactgaaccagtccaggtggtgaattttccaagaacatagtttaagttgattaaaaatgcttttagaatgcaggagcctacttctagctgtattttttgtatgcttaaataaaaataaaaattcataaccaaagagaatccc

SEQ ID NO: 12203 - protein, 91 aa, Homo sapiens; identical to SEQ ID NO: 12191

SEQ ID NO: 12204 - DNA, 2064 bp, Homo sapiens
tatttaaattttatgaattaatttgaatgttttttacactaactaacttttcccaataaagtccactatgaaaccacgacatccaagagcccaaagtcgtcttctctgccttcaagtcatagatttgcccgcagtatctgtggtgctctgggccctcccggtgtccgtctcttccaggatggggatgcccgggagggaaactgtctgtggctctaggctgcacggctcgtgccaacccatcagggagggccatgcccgttgtcctattgagtgccccaccctgcacccccaccttgggaattcacatgtccattccttgaggttcatgtcaacctcggaggcatccctgtcttcattatagctgacccctctcctgcgtccttctgtcagcatatcccttctgcatccttcccgtcacacatacataccaagctatgatgattgattgatagtggccttcgagatgaaaaccatccttaaccccatgatccttcccagctggcatccccaccctaagcaaggttccctaaagagaagcttgttgacattttctccccttcctcacttacagtcagctgtcaccttgctccctccacctcccctcgtcaaggtgactgccttccactgccagccacactggcaattgtcttgagacctcactgtgcaagcggcctgggggcgtggcggggaggaggaggaggacaaggactcctgaacgctgctcactcggcttccaggacaccccgctcaggttctgcctgccttactgggggctccttctcctttcctggggctgagaggttgtgtctgtgcccactctcctgagctcagccagaatctcgcatgtaaagacatccaaatgccgacttcttctccccagagcctggcttttataactgactgccgcctcacgctccattcggatgtctaatgaatctctcagacttgacctgtccaaactgcttgccacctctactcgccaccgcccacccccacaccctccataccgttttccccacgtcactgcccctcccccccttcctcttgccaaatgcctaaaaataaaaattctgaggtggatctgtagcacaatgggcttctagtgacaaatcaaaattctgatctttaaaatgtatgcacaatttacctgttaccgcctggcctaagccatcctgctgttactgctgtgtagcaagttgcagccaaagcgacctcacacggctcctgaaggtcaagaatctgggagcagctcagctggatggctgtgactcggggtctcatgaagtggccaagatgccagctaaggctgccgtctctgaaggcttgacctggcgaggatttgcttccagactcactcgcgtggctattgacagaaggcctcagttccatgccacatggcccgttccacagagcagctcacagcttggtagtagctggcttccccagagcggtatctgcgagcagcgtccagatggaagccatggtgttcccttaaaacctgatatggagggtgattccccatcatgtctgtattctgtgggtcacacagaccaaggccggtccactgtggaaggcaaggacgaggttgccagtgcccggcggtgggtggccacagccagcctccctgccagtgtcccccacagacaagttgtccctgtaagacaggtcagctcaggtcattccgagctcagaccttccaacggcgtccatgtccctcagtaaaagccagagtcctaaaggcctcttgcctgctctggcctcctctcaccattctctgccatcctccatctgcccctggtgtccctgaagtcttgaacatgccgagcacatcctgcctcgtatgcttcctggcctggaatgcacttgccccgggacaccctgtgctggctttagtgtttccttcctgtctcctcaagtcaccttattatcaaaaggactccgacaggctaagtgtggtggctcatgcctgtagtcccagcactcgggaaggccgaggtgggaggatcgcttgagcccaggagttcaggacctgcctgggcaacatggcaaaactttgtctctctt

SEQ ID NO: 12205 - protein, 195 aa, Homo sapiens [sequence omitted]

SEQ ID NO: 12206 - DNA, 573 bp, Homo sapiens
gctcatttgaaggcagatttccagactgcctgctgcctggaacaccaggggacaaactcatgacttcgtgggccttccctgcagtccaggggataatcttcctatctgaaaatcagccaattagcaacctcagttccatctgcaacctggattcgctttctgccatgtaacataacatgcgcaggcccagggattaggatgtgggcatctctggaagccattattctgcctaacacaagctgctgaaacccactcaacaatagataacctgtgtagccctacaggtactaaagaaatggaatttactgtttaaaacccttccacagagaaaactccagacctatgtggtttcactagcaaattctaccaactaataccaattttatacagtctcctccagaaaatagaagaaaacatttccaaactcatttcatgaggccagcattgccctgacaccaatactagacaatgatatatcttttcttttcttttcttttcttttctttcttttcgacagagtctcactctgttgctcaggcaggagtgcagtggcacggtctcggctcactgcaa

SEQ ID NO: 12207 - protein, 36 aa, Homo sapiens
MTSWAFPAVQGIIFLSENQPISNLSSICNLDSLSAM

SEQ ID NO: 12208 - DNA, 796 bp, Homo sapiens
gggtgcagaggagagacctgatgtaacccacctcagcctccaaagtagctgggaccacaggtgcaagctgtcacgcccagctaatttttttcatttttttgtagaggtctccctatgttttccaggcttgtcttgagctcctgggctcaagcgatcctgctgcctcaacctcccaaagtgctgggattacaggtgtgagcccctgtgcccggcctcaccttttcttactgttgtggtgagaatagatgacacaggggccaggaggggcagggagcccagggcagcatccagggggcagctggacaaggatgtggggcagggtgaagacataggactgtgagaagtgtgcagactccagatggggctgaggcagagctcagggctctgctggcgggatgcagggtgtggggagaggagtcgaggggatggagcagatgggcgtggggaggagctggtaccagagtgggagcttggagaacaggggagtgactggggctctgaggtggaccctgttgatgtttatatggagatgtcagcaggacatccaggtgggggtgctgacaggcagcagcagacagcctggagctgagagagaggctgggtgggggatactgaccaggcctgggaacctcacacaagggagccgcagggttcagaatgtggccagctggttgttaaacacagccattattaaaactaaatgatgcaagtgtacaattaagtaacaccaagaaagcaaaggtaatttttaaaaactagtaaaagaagagcaaattaaaaccaaaggaagcagaag

SEQ ID NO: 12209 - protein, 102 aa, Homo sapiens [sequence omitted]

SEQ ID NO: 12210 - DNA, 1115 bp, Homo sapiens
ggaccttgaagcttgttcctggtcagaatagaagtggggagctatcttcattccattcagccagctttgggggcacgcctgctgtgtgtcgggccctctcctcaaccccaaggtccaggtggaggccatcgaagggggagccctgcagaagctgctggtcatcctggccacggagcagccgctcactgcaaagaagaaggtcctgtttgcactgtgctccctgctgcgccacttcccctatgcccagcggcagttcctgaagctcggggggctgcaggtcctgaggaccctggtgcaggagaagggcacggaggtgctcgccgtgcgcgtggtcacactgctctacgacctggtcacggagaagatgttcgccgaggaggaggctgagctgacccaggagatgtccccagagaagctgcagcagtatcgccaggtacacctcctgccaggcctgtgggaacagggctggtgcgagatcacggcccacctcctggcgctgcccgagcatgatgcccgtgagaaggtgctgcagacactgggcgtcctcctgaccacctgccgggaccgctaccgtcaggacccccagctcggcaggacactggccagcctgcaggctgagtaccaggtgctggccagcctggagctgcaggatggtgaggacgagggctacttccaggagctgctgggctctgtcaacagcttgctgaaggagctgagatgaggccccacaccaggactggactgggatgccgctagtgaggctgaggggtgccagcgtgggtgggcttctcaggcaggaggacatcttggcagtgctggcttggccattaaatggaaacctgaaggccatcctctttctgctgtgtgtctgtgtagactgggcacagccctgtggccggggggtcaggtgagtggttgggtgatgggctctgctgacgtgcagggctcagcccagggcatccaggaacaggctccagggcaggaacctgggcccaggagttgcaagtctctgcttcttaccaagcagcagctctgtaccttgggaagtcgcttaattgctctgagcttgtttcctcatctgtcaggagtgccattaaaggagaaaaatcacgtag

SEQ ID NO: 12211 - protein, 118 aa, Homo sapiens [sequence omitted]

SEQ ID NO: 12212 - DNA, 1818 bp, Homo sapiens
tgttcccagcaccttgcactagtacacggtccctgactatggctccccagagcctgccttcatctaggatggctcctctgggcatgctgcttgggctgctgatggccgcctgcttcaccttctgcctcagtcatcagaacctgaaggagtttgccctgaccaacccagagaagagcagcaccaaagaaacagagagaaaagaaaccaaagccgaggaggagctggatgccgaagtcctggaggtgttccacccgacgcatgagtggcaggcccttcagccagggcaggctgtccctgcaggatcccacgtacggctgaatcttcagactggggaaagagaggcaaaactccaatatgaggacaagttccgaaataatttgaaaggcaaaaggctggatatcaacaccaacacctacacatctcaggatctcaagagtgcactggcaaaattcaaggagggggcagagatggagagttcaaaggaagacaaggcaaggcaggctgaggtaaagcggctcttccgccccattgaggaactgaagaaagactttgatgagctgaatgttgtcattgagactgacatgcagatcatggtacggctgatcaacaagttcaatagttccagctccagtttggaagagaagattgctgcgctctttgatcttgaatattatgtccatcagatggacaatgcgcaggacctgctttcctttggtggtcttcaagtggtgatcaatgggctgaacagcacagagcccctcgtgaaggagtatgctgcgtttgtgctgggcgctgccttttccagcaaccccaaggtccaggtggaggccatcgaagggggagccctgcagaagctgctggtcatcctggccacggagcagccgctcactgcaaagaagaaggtcctgtttgcactgtgctccctgctgcgccacttcccctatgcccagcggcagttcctgaagctcggggggctgcaggtcctgaggaccctggtgcaggagaagggcacggaggtgctcgccgtgcgcgtggtcacactgctctacgacctggtcacggagaagatgttcgccgaggaggaggctgagctgacccaggagatgtccccagagaagctgcagcagtatcgccaggtacacctcctgccaggcctgtgggaacagggctggtgcgagatcacggcccacctcctggcgctgcccgagcatgatgcccgtgagaaggtgctgcagacactgggcgtcctcctgaccacctgccgggaccgctaccgtcaggacccccagctcggcaggacactggccagcctgcaggctgagtaccaggtgctggccagcctggagctgcaggatggtgaggacgagggctacttccaggagctgctgggctctgtcaacagcttgctgaaggagctgagatgaggccccacaccaggactggactgggatgccgctagtgaggctgaggggtgccagcgtgggtgggcttctcaggcaggaggacatcttggcagtgctggcttggccattaaatggaaacctgaaggccatcctctttctgctgtgtgtctgtgtagactgggcacagccctgtggccggggggtcaggtgagtggttgggtgatgggctctgctgacgtgcagggctcagcccagggcatccaggaacaggctccagggcaggaacctgggcccaggagttgcaagtctctgcttcttaccaagcagcagctctgtaccttgggaagtcgcttaattgctctgagcttgtttcctcatctgtcaggagtgccattaaaggagaaaaatcacgtag

SEQ ID NO: 12213 - protein, 461 aa, Homo sapiens; identical to SEQ ID NO: 1169

SEQ ID NO: 12214 - DNA, 1938 bp, Homo sapiens
ctctctctctctctctctcactctgtgtacgtgtgtgtgtatactgaggaaaggccatgtgaagacatggcaagagggcagccatctgcaagctaagatgagagtcttcagctggaaccttgatcttggacttctggccttcagaattgtccctgactatggctccccagagcctgccttcatctaggatggctcctctgggcatgctgcttgggctgctgatggccgcctgcttcaccttctgcctcagtcatcagaacctgaaggagtttgccctgaccaacccagagaagagcagcaccaaagaaacagagagaaaagaaaccaaagccgaggaggagctggatgccgaagtcctggaggtgttccacccgacgcatgagtggcaggcccttcagccagggcaggctgtccctgcaggatcccacgtacggctgaatcttcagactggggaaagagaggcaaaactccaatatgaggacaagttccgaaataatttgaaaggcaaaaggctggatatcaacaccaacacctacacatctcaggatctcaagagtgcactggcaaaattcaaggagggggcagagatggagagttcaaaggaagacaaggcaaggcaggctgaggtaaagcggctcttccgccccattgaggaactgaagaaagactttgatgagctgaatgttgtcattgagactgacatgcagatcatggtacggctgatcaacaagttcaatagttccagctccagtttggaagagaagattgctgcgctctttgatcttgaatattatgtccatcagatggacaatgcgcaggacctgctttcctttggtggtcttcaagtggtgatcaatgggctgaacagcacagagcccctcgtgaaggagtatgctgcgtttgtgctgggcgctgccttttccagcaaccccaaggtccaggtggaggccatcgaagggggagccctgcagaagctgctggtcatcctggccacggagcagccgctcactgcaaagaagaaggtcctgtttgcactgtgctccctgctgcgccacttcccctatgcccagcggcagttcctgaagctcggggggctgcaggtcctgaggaccctggtgcaggagaagggcacggaggtgctcgccgtgcgcgtggtcacactgctctacgacctggtcacggagaagatgttcgccgaggaggaggctgagctgacccaggagatgtccccagagaagctgcagcagtatcgccaggtacacctcctgccaggcctgtgggaacagggctggtgcgagatcacggcccacctcctggcgctgcccgagcatgatgcccgtgagaaggtgctgcagacactgggcgtcctcctgaccacctgccgggaccgctaccgtcaggacccccagctcggcaggacactggccagcctgcaggctgagtaccaggtgctggccagcctggagctgcaggatggtgaggacgagggctacttccaggagctgctgggctctgtcaacagcttgctgaaggagctgagatgaggccccacaccaggactggactgggatgccgctagtgaggctgaggggtgccagcgtgggtgggcttctcaggcaggaggacatcttggcagtgctggcttggccattaaatggaaacctgaaggccatcctctttctgctgtgtgtctgtgtagactgggcacagccctgtggccggggggtcaggtgagtggttgggtgatgggctctgctgacgtgcagggctcagcccagggcatccaggaacaggctccagggcaggaacctgggcccaggagttgcaagtctctgcttcttaccaagcagcagctctgtaccttgggaagtcgcttaattgctctgagcttgtttcctcatctgtcaggagtgccattaaaggagaaaaatcacgtag

SEQ ID NO: 12215 - protein, 461 aa, Homo sapiens; identical to SEQ ID NO: 1169

SEQ ID NO: 12216 - DNA, 2013 bp, Homo sapiens
attacttctctactgaggccaactgtgagccctggtgtgtttcattggcaggagaagaggctaattaagtgaaactgaaagaacaaataaaatgatgagtccagtttctgtggctgatttcacagacccctcgagagacagcacggctatggaaagagcatggctttggggccaaactggctttgaattctgactctactgctctgtggctgcatgaactctggtccctgactatggctccccagagcctgccttcatctaggatggctcctctgggcatgctgcttgggctgctgatggccgcctgcttcaccttctgcctcagtcatcagaacctgaaggagtttgccctgaccaacccagagaagagcagcaccaaagaaacagagagaaaagaaaccaaagccgaggaggagctggatgccgaagtcctggaggtgttccacccgacgcatgagtggcaggcccttcagccagggcaggctgtccctgcaggatcccacgtacggctgaatcttcagactggggaaagagaggcaaaactccaatatgaggacaagttccgaaataatttgaaaggcaaaaggctggatatcaacaccaacacctacacatctcaggatctcaagagtgcactggcaaaattcaaggagggggcagagatggagagttcaaaggaagacaaggcaaggcaggctgaggtaaagcggctcttccgccccattgaggaactgaagaaagactttgatgagctgaatgttgtcattgagactgacatgcagatcatggtacggctgatcaacaagttcaatagttccagctccagtttggaagagaagattgctgcgctctttgatcttgaatattatgtccatcagatggacaatgcgcaggacctgctttcctttggtggtcttcaagtggtgatcaatgggctgaacagcacagagcccctcgtgaaggagtatgctgcgtttgtgctgggcgctgccttttccagcaaccccaaggtccaggtggaggccatcgaagggggagccctgcagaagctgctggtcatcctggccacggagcagccgctcactgcaaagaagaaggtcctgtttgcactgtgctccctgctgcgccacttcccctatgcccagcggcagttcctgaagctcggggggctgcaggtcctgaggaccctggtgcaggagaagggcacggaggtgctcgccgtgcgcgtggtcacactgctctacgacctggtcacggagaagatgttcgccgaggaggaggctgagctgacccaggagatgtccccagagaagctgcagcagtatcgccaggtacacctcctgccaggcctgtgggaacagggctggtgcgagatcacggcccacctcctggcgctgcccgagcatgatgcccgtgagaaggtgctgcagacactgggcgtcctcctgaccacctgccgggaccgctaccgtcaggacccccagctcggcaggacactggccagcctgcaggctgagtaccaggtgctggccagcctggagctgcaggatggtgaggacgagggctacttccaggagctgctgggctctgtcaacagcttgctgaaggagctgagatgaggccccacaccaggactggactgggatgccgctagtgaggctgaggggtgccagcgtgggtgggcttctcaggcaggaggacatcttggcagtgctggcttggccattaaatggaaacctgaaggccatcctctttctgctgtgtgtctgtgtagactgggcacagccctgtggccggggggtcaggtgagtggttgggtgatgggctctgctgacgtgcagggctcagcccagggcatccaggaacaggctccagggcaggaacctgggcccaggagttgcaagtctctgcttcttaccaagcagcagctctgtaccttgggaagtcgcttaattgctctgagcttgtttcctcatctgtcaggagtgccattaaaggagaaaaatcacgtag

SEQ ID NO: 12217 - protein, 461 aa, Homo sapiens; identical to SEQ ID NO: 1169

SEQ ID NO: 12218 - DNA, 1935 bp, Homo sapiens
gagttgtgtctgccactcggctgccggaggccgaagggcatatctcttgttggatggctggacccaccatggtagatggaggcttcagaattatctagaagtggtagaagactcgttatacctctatgcaggaaatgtctgacatgtccctgactatggctccccagagcctgccttcatctaggatggctcctctgggcatgctgcttgggctgctgatggccgcctgcttcaccttctgcctcagtcatcagaacctgaaggagtttgccctgaccaacccagagaagagcagcaccaaagaaacagagagaaaagaaaccaaagccgaggaggagctggatgccgaagtcctggaggtgttccacccgacgcatgagtggcaggcccttcagccagggcaggctgtccctgcaggatcccacgtacggctgaatcttcagactggggaaagagaggcaaaactccaatatgaggacaagttccgaaataatttgaaaggcaaaaggctggatatcaacaccaacacctacacatctcaggatctcaagagtgcactggcaaaattcaaggagggggcagagatggagagttcaaaggaagacaaggcaaggcaggctgaggtaaagcggctcttccgccccattgaggaactgaagaaagactttgatgagctgaatgttgtcattgagactgacatgcagatcatggtacggctgatcaacaagttcaatagttccagctccagtttggaagagaagattgctgcgctctttgatcttgaatattatgtccatcagatggacaatgcgcaggacctgctttcctttggtggtcttcaagtggtgatcaatgggctgaacagcacagagcccctcgtgaaggagtatgctgcgtttgtgctgggcgctgccttttccagcaaccccaaggtccaggtggaggccatcgaagggggagccctgcagaagctgctggtcatcctggccacggagcagccgctcactgcaaagaagaaggtcctgtttgcactgtgctccctgctgcgccacttcccctatgcccagcggcagttcctgaagctcggggggctgcaggtcctgaggaccctggtgcaggagaagggcacggaggtgctcgccgtgcgcgtggtcacactgctctacgacctggtcacggagaagatgttcgccgaggaggaggctgagctgacccaggagatgtccccagagaagctgcagcagtatcgccaggtacacctcctgccaggcctgtgggaacagggctggtgcgagatcacggcccacctcctggcgctgcccgagcatgatgcccgtgagaaggtgctgcagacactgggcgtcctcctgaccacctgccgggaccgctaccgtcaggacccccagctcggcaggacactggccagcctgcaggctgagtaccaggtgctggccagcctggagctgcaggatggtgaggacgagggctacttccaggagctgctgggctctgtcaacagcttgctgaaggagctgagatgaggccccacaccaggactggactgggatgccgctagtgaggctgaggggtgccagcgtgggtgggcttctcaggcaggaggacatcttggcagtgctggcttggccattaaatggaaacctgaaggccatcctctttctgctgtgtgtctgtgtagactgggcacagccctgtggccggggggtcaggtgagtggttgggtgatgggctctgctgacgtgcagggctcagcccagggcatccaggaacaggctccagggcaggaacctgggcccaggagttgcaagtctctgcttcttaccaagcagcagctctgtaccttgggaagtcgcttaattgctctgagcttgtttcctcatctgtcaggagtgccattaaaggagaaaaatcacgtag

SEQ ID NO: 12219 - protein, 471 aa, Homo sapiens
MQEMSDMSLTMAPQSLPSSRMAPLGMLLGLLMAACFTFCLSHQNLKEFALTNPEKSSTKETERKETKAEEELDAEVLEVFHPTHEWQALQPGQAVPAGSHVRLNLQTGEREAKLQYEDKFRNNLKGKRLDINTNTYTSQDLKSALAKFKEGAEMESSKEDKARQAEVKRLFRPIEELKKDFDELNVVIETDMQIMVRLINKFNSSSSSLEEKIAALFDLEYYVHQMDNAQDLLSFGGLQVVINGLNSTEPLVKEYAAFVLGAAFSSNPKVQVEAIEGGALQKLLVILATEQPLTAKKKVLFALCSLLRHFPYAQRQFLKLGGLQVLRTLVQEKGTEVLAVRVVTLLYDLVTEKMFAEEEAELTQEMSPEKLQQYRQVHLLPGLWEQGWCEITAHLLALPEHDAREKVLQTLGVLLTTCRDRYRQDPQLGRTLASLQAEYQVLASLELQDGEDEGYFQELLGSVNSLLKELR

SEQ ID NO: 12220 - DNA, 1966 bp, Homo sapiens
gggagttgtgtctgccactcggctgccggaggccgaagggcccaatccccacccccagtcttgtctgaattgtgtggaagacatgaggcactgagagaggtgggggccgagtggcctcctcccacctgctccccaaacatctgctctgggctgcagtaagctggcaatacagattggtccctgactatggctccccagagcctgccttcatctaggatggctcctctgggcatgctgcttgggctgctgatggccgcctgcttcaccttctgcctcagtcatcagaacctgaaggagtttgccctgaccaacccagagaagagcagcaccaaagaaacagagagaaaagaaaccaaagccgaggaggagctggatgccgaagtcctggaggtgttccacccgacgcatgagtggcaggcccttcagccagggcaggctgtccctgcaggatcccacgtacggctgaatcttcagactggggaaagagaggcaaaactccaatatgaggacaagttccgaaataatttgaaaggcaaaaggctggatatcaacaccaacacctacacatctcaggatctcaagagtgcactggcaaaattcaaggagggggcagagatggagagttcaaaggaagacaaggcaaggcaggctgaggtaaagcggctcttccgccccattgaggaactgaagaaagactttgatgagctgaatgttgtcattgagactgacatgcagatcatggtacggctgatcaacaagttcaatagttccagctccagtttggaagagaagattgctgcgctctttgatcttgaatattatgtccatcagatggacaatgcgcaggacctgctttcctttggtggtcttcaagtggtgatcaatgggctgaacagcacagagcccctcgtgaaggagtatgctgcgtttgtgctgggcgctgccttttccagcaaccccaaggtccaggtggaggccatcgaagggggagccctgcagaagctgctggtcatcctggccacggagcagccgctcactgcaaagaagaaggtcctgtttgcactgtgctccctgctgcgccacttcccctatgcccagcggcagttcctgaagctcggggggctgcaggtcctgaggaccctggtgcaggagaagggcacggaggtgctcgccgtgcgcgtggtcacactgctctacgacctggtcacggagaagatgttcgccgaggaggaggctgagctgacccaggagatgtccccagagaagctgcagcagtatcgccaggtacacctcctgccaggcctgtgggaacagggctggtgcgagatcacggcccacctcctggcgctgcccgagcatgatgcccgtgagaaggtgctgcagacactgggcgtcctcctgaccacctgccgggaccgctaccgtcaggacccccagctcggcaggacactggccagcctgcaggctgagtaccaggtgctggccagcctggagctgcaggatggtgaggacgagggctacttccaggagctgctgggctctgtcaacagcttgctgaaggagctgagatgaggccccacaccaggactggactgggatgccgctagtgaggctgaggggtgccagcgtgggtgggcttctcaggcaggaggacatcttggcagtgctggcttggccattaaatggaaacctgaaggccatcctctttctgctgtgtgtctgtgtagactgggcacagccctgtggccggggggtcaggtgagtggttgggtgatgggctctgctgacgtgcagggctcagcccagggcatccaggaacaggctccagggcaggaacctgggcccaggagttgcaagtctctgcttcttaccaagcagcagctctgtaccttgggaagtcgcttaattgctctgagcttgtttcctcatctgtcaggagtgccattaaaggagaaaaatcacgtag

SEQ ID NO: 12221 - protein, 461 aa, Homo sapiens; identical to SEQ ID NO: 1169

SEQ ID NO: 12222 - DNA, 1926 bp, Homo sapiens
ctggaattgtgggagttgtgtctgccactcggctgccggaggccgaaggccagctattacttctctactgaggccaactgtgagccctggtgtgtttcattggcaggagaagaggctaattaagtgaaactgaaaggtccctgactatggctccccagagcctgccttcatctaggatggctcctctgggcatgctgcttgggctgctgatggccgcctgcttcaccttctgcctcagtcatcagaacctgaaggagtttgccctgaccaacccagagaagagcagcaccaaagaaacagagagaaaagaaaccaaagccgaggaggagctggatgccgaagtcctggaggtgttccacccgacgcatgagtggcaggcccttcagccagggcaggctgtccctgcaggatcccacgtacggctgaatcttcagactggggaaagagaggcaaaactccaatatgaggacaagttccgaaataatttgaaaggcaaaaggctggatatcaacaccaacacctacacatctcaggatctcaagagtgcactggcaaaattcaaggagggggcagagatggagagttcaaaggaagacaaggcaaggcaggctgaggtaaagcggctcttccgccccattgaggaactgaagaaagactttgatgagctgaatgttgtcattgagactgacatgcagatcatggtacggctgatcaacaagttcaatagttccagctccagtttggaagagaagattgctgcgctctttgatcttgaatattatgtccatcagatggacaatgcgcaggacctgctttcctttggtggtcttcaagtggtgatcaatgggctgaacagcacagagcccctcgtgaaggagtatgctgcgtttgtgctgggcgctgccttttccagcaaccccaaggtccaggtggaggccatcgaagggggagccctgcagaagctgctggtcatcctggccacggagcagccgctcactgcaaagaagaaggtcctgtttgcactgtgctccctgctgcgccacttcccctatgcccagcggcagttcctgaagctcggggggctgcaggtcctgaggaccctggtgcaggagaagggcacggaggtgctcgccgtgcgcgtggtcacactgctctacgacctggtcacggagaagatgttcgccgaggaggaggctgagctgacccaggagatgtccccagagaagctgcagcagtatcgccaggtacacctcctgccaggcctgtgggaacagggctggtgcgagatcacggcccacctcctggcgctgcccgagcatgatgcccgtgagaaggtgctgcagacactgggcgtcctcctgaccacctgccgggaccgctaccgtcaggacccccagctcggcaggacactggccagcctgcaggctgagtaccaggtgctggccagcctggagctgcaggatggtgaggacgagggctacttccaggagctgctgggctctgtcaacagcttgctgaaggagctgagatgaggccccacaccaggactggactgggatgccgctagtgaggctgaggggtgccagcgtgggtgggcttctcaggcaggaggacatcttggcagtgctggcttggccattaaatggaaacctgaaggccatcctctttctgctgtgtgtctgtgtagactgggcacagccctgtggccggggggtcaggtgagtggttgggtgatgggctctgctgacgtgcagggctcagcccagggcatccaggaacaggctccagggcaggaacctgggcccaggagttgcaagtctctgcttcttaccaagcagcagctctgtaccttgggaagtcgcttaattgctctgagcttgtttcctcatctgtcaggagtgccattaaaggagaaaaatcacgtag

SEQ ID NO: 12223 - protein, 461 aa, Homo sapiens; identical to SEQ ID NO: 1169

SEQ ID NO: 12224 - DNA, 1921 bp, Homo sapiens
agcggcgtgacagctgccagctcaccggctcagacggtcgccgccgcgtttgcgcagggggagctggtcgccgccgcggccgcctggaattgtgggagttgtgtctgccactcggctgccggaggccgaaggtccctgactatggctccccagagcctgccttcatctaggatggctcctctgggcatgctgcttgggctgctgatggccgcctgcttcaccttctgcctcagtcatcagaacctgaaggagtttgccctgaccaacccagagaagagcagcaccaaagaaacagagagaaaagaaaccaaagccgaggaggagctggatgccgaagtcctggaggtgttccacccgacgcatgagtggcaggcccttcagccagggcaggctgtccctgcaggatcccacgtacggctgaatcttcagactggggaaagagaggcaaaactccaatatgaggacaagttccgaaataatttgaaaggcaaaaggctggatatcaacaccaacacctacacatctcaggatctcaagagtgcactggcaaaattcaaggagggggcagagatggagagttcaaaggaagacaaggcaaggcaggctgaggtaaagcggctcttccgccccattgaggaactgaagaaagactttgatgagctgaatgttgtcattgagactgacatgcagatcatggtacggctgatcaacaagttcaatagttccagctccagtttggaagagaagattgctgcgctctttgatcttgaatattatgtccatcagatggacaatgcgcaggacctgctttcctttggtggtcttcaagtggtgatcaatgggctgaacagcacagagcccctcgtgaaggagtatgctgcgtttgtgctgggcgctgccttttccagcaaccccaaggtccaggtggaggccatcgaagggggagccctgcagaagctgctggtcatcctggccacggagcagccgctcactgcaaagaagaaggtcctgtttgcactgtgctccctgctgcgccacttcccctatgcccagcggcagttcctgaagctcggggggctgcaggtcctgaggaccctggtgcaggagaagggcacggaggtgctcgccgtgcgcgtggtcacactgctctacgacctggtcacggagaagatgttcgccgaggaggaggctgagctgacccaggagatgtccccagagaagctgcagcagtatcgccaggtacacctcctgccaggcctgtgggaacagggctggtgcgagatcacggcccacctcctggcgctgcccgagcatgatgcccgtgagaaggtgctgcagacactgggcgtcctcctgaccacctgccgggaccgctaccgtcaggacccccagctcggcaggacactggccagcctgcaggctgagtaccaggtgctggccagcctggagctgcaggatggtgaggacgagggctacttccaggagctgctgggctctgtcaacagcttgctgaaggagctgagatgaggccccacaccaggactggactgggatgccgctagtgaggctgaggggtgccagcgtgggtgggcttctcaggcaggaggacatcttggcagtgctggcttggccattaaatggaaacctgaaggccatcctctttctgctgtgtgtctgtgtagactgggcacagccctgtggccggggggtcaggtgagtggttgggtgatgggctctgctgacgtgcagggctcagcccagggcatccaggaacaggctccagggcaggaacctgggcccaggagttgcaagtctctgcttcttaccaagcagcagctctgtaccttgggaagtcgcttaattgctctgagcttgtttcctcatctgtcaggagtgccattaaaggagaaaaatcacgtag

SEQ ID NO: 12225 - protein, 461 aa, Homo sapiens; identical to SEQ ID NO: 1169

SEQ ID NO: 12226 - DNA, 854 bp, Homo sapiens
ggaccttgaagcttgttcctggtcagaatagaagtggggagctatcttcattccattcagccagctttgggggcacgcctgctgtgtgtcgggccctctcctcaaccccaaggtccaggtggaggccatcgaagggggagccctgcagaagctgctggtcatcctggccacggagcagccgctcactgcaaagaagaaggtcctgtttgcactgtgctccctgctgcgccacttcccctatgcccagcggcagttcctgaagctcggggggctgcaggtcctgaggaccctggtgcaggagaagggcacggaggtgctcgccgtgcgcgtggtcacactgctctacgacctggtcacggagaagatgttcgccgaggaggaggctgagctgacccaggagatgtccccagagaagctgcagcagtatcgccaggtacacctcctgccaggcctgtgggaacagggctggtgcgagatcacggcccacctcctggcgctgcccgagcatgatgcccgtgagaaggtgctgcagacactgggcgtcctcctgaccacctgccgggaccgctaccgtcaggacccccagctcggcaggacactggccagcctgcaggctgagtaccaggtgctggccagcctggagctgcaggatggtgaggacgagggctacttccaggagctgctgggctctgtcaacagcttgctgaaggagctgagatgaggccccacaccaggactggactgggatgccgctagtgaggctgaggggtgccagcgtgggtgggcttctcaggcaggaggacatcttggcagtgctggcttggccattaaatggaaacctgaaggccatcctc

SEQ ID NO: 12227 - protein, 118 aa, Homo sapiens [sequence omitted]

SEQ ID NO: 12228 - DNA, 1660 bp, Homo sapiens
agcggcgtgacagctgccagctcaccggctcagacggtcgccgccgcgtttgcgcagggggagctggtcgccgccgcggccgcctggaattgtgggagttgtgtctgccactcggctgccggaggccgaaggtccctgactatggctccccagagcctgccttcatctaggatggctcctctgggcatgctgcttgggctgctgatggccgcctgcttcaccttctgcctcagtcatcagaacctgaaggagtttgccctgaccaacccagagaagagcagcaccaaagaaacagagagaaaagaaaccaaagccgaggaggagctggatgccgaagtcctggaggtgttccacccgacgcatgagtggcaggcccttcagccagggcaggctgtccctgcaggatcccacgtacggctgaatcttcagactggggaaagagaggcaaaactccaatatgaggacaagttccgaaataatttgaaaggcaaaaggctggatatcaacaccaacacctacacatctcaggatctcaagagtgcactggcaaaattcaaggagggggcagagatggagagttcaaaggaagacaaggcaaggcaggctgaggtaaagcggctcttccgccccattgaggaactgaagaaagactttgatgagctgaatgttgtcattgagactgacatgcagatcatggtacggctgatcaacaagttcaatagttccagctccagtttggaagagaagattgctgcgctctttgatcttgaatattatgtccatcagatggacaatgcgcaggacctgctttcctttggtggtcttcaagtggtgatcaatgggctgaacagcacagagcccctcgtgaaggagtatgctgcgtttgtgctgggcgctgccttttccagcaaccccaaggtccaggtggaggccatcgaagggggagccctgcagaagctgctggtcatcctggccacggagcagccgctcactgcaaagaagaaggtcctgtttgcactgtgctccctgctgcgccacttcccctatgcccagcggcagttcctgaagctcggggggctgcaggtcctgaggaccctggtgcaggagaagggcacggaggtgctcgccgtgcgcgtggtcacactgctctacgacctggtcacggagaagatgttcgccgaggaggaggctgagctgacccaggagatgtccccagagaagctgcagcagtatcgccaggtacacctcctgccaggcctgtgggaacagggctggtgcgagatcacggcccacctcctggcgctgcccgagcatgatgcccgtgagaaggtgctgcagacactgggcgtcctcctgaccacctgccgggaccgctaccgtcaggacccccagctcggcaggacactggccagcctgcaggctgagtaccaggtgctggccagcctggagctgcaggatggtgaggacgagggctacttccaggagctgctgggctctgtcaacagcttgctgaaggagctgagatgaggccccacaccaggactggactgggatgccgctagtgaggctgaggggtgccagcgtgggtgggcttctcaggcaggaggacatcttggcagtgctggcttggccattaaatggaaacctgaaggccatcctc

SEQ ID NO: 12229 - protein, 461 aa, Homo sapiens; identical to SEQ ID NO: 1169

SEQ ID NO: 12230 - DNA, 371 bp, Homo sapiens
gtgagccctggtgtgtttcattggcaggagaagaggctaattaagtgaaactgaaaggtccctgactatggctccccagagcctgccttcatctaggatggctcctctgggcatgctgcttgggctgctgatggccgcctgcttcaccttctgcctcagtcatcagaacctgaaggagtttgccctgaccaacccagagaagagcagcaccaaagaaacagagagaaaagaaaccaaagccgaggaggagctggatgccgaagtcctggaggtgttccacccgacgcatgagtggcagcgtgggtgggcttctcaggcaggaggacatcttggcagtgctggcttggccattaaatggaaacctgaaggcc

SEQ ID NO: 12231 - protein, 100 aa, Homo sapiens
MAPQSLPSSRMAPLGMLLGLLMAACFTFCLSHQNLKEFALTNPEKSSTKETERKETKAEEELDAEVLEVFHPTHEWQRGWASQAGGHLGSAGLAIKWKPE

SEQ ID NO: 12232 - DNA, 784 bp, Homo sapiens
cagattgctgatttggtcaagatgtaaacatatcgtagagctccagcatgggggctcacgcctgtaatacaaacactttggaaggccaaggtgggagaatcactcaagcccaggagtttaagatcaacctgggcaacaaaggctaccacataaagaatatgacattattaaattcccctgcagttacacagagcagtggctctacagtttcttgttggctgaattaagcatttaaagaaatgtttaagtatttaatacaacatcttcaggtatttgaactaagagagtttcttgggaaatgtgctatttgatagattgagaagtctcccagtgctgttttgctttgtttcatcactcactatttaaatgttaattacaaaaataatacatactcactggaagaaaaatcaaacaaactcaaagcacagaaaaattttaaagcctccttgctcttggtggctttctttctcccaccaatttttggtgacttcaatttttgtgttagaccatttatgttcaaagcatccacatgaaacttaccctctataaggtgctgtgagcaccacagacttgaataccagttcccatgctcaagaagccttcaatcttgttgaggagatagatgaaagaactggcttacaacagagaagtagatgtattaaagagtcagttttcccagcactctgggaggctgaggcaggtggatcacctgaggtctggagttcgagaccagcctgaccaacatggagaaaccccatctctactaaaaatacaaaattagccg

SEQ ID NO: 12233 - protein, 59 aa, Homo sapiens
MGAHACNTNTLEGQGGRITQAQEFKINLGNKGYHIKNMTLLNSPAVTQSSGSTVSCWLN

SEQ ID NO: 12234 - DNA, 1067 bp, Homo sapiens
attgctgatttggtcaagatgtaaacatatcgtagagctccagcatgggggctcacgcctgtaatacaaacactttggaaggccaaggtgggagaatcactcaagcccaggagtttaagatcaacctgggcaacaaaatcaggccaagcaattctggccattgggacgtccattatactgctcacctggaaaaggcagcgcccagcacaaacgcagcatactccttcacgaggggctctgtgctgttcagcccattgatcaccacttgaagaccaccaaaggaaagcaggttgactgcatctgaagacattcatgataaaatatgcaagaaaatcgctctcccaaaggtttctgtctaagcctgtgctactggctagtggctatgtatcagacagtgcagaacatttctatcattacataaagttctattcaacagcattggtctaggctatcatttaagctccaaatccccaagtccggattctctcttttactctatagcggatctcattacccacagtttattagtaccctggaacaagacaactcgctttcctcagaaaggtcactggatcctgttttctacatgtacccgctacagtctccctcgaatatatctttgttgccacaaaggctgcatcttgcccatatgctaatcccacgctatcaatcatgaggaaaactcaggaagctgaagcccaacaactgtggctgctacccatctttctcctccagattccacagggccccttcccaactgcatccttgcctctctgaactaggagaggactctgacagagaaatcaagtgtgaggattggtatttgactgtgctagtgttttgtggtggcctagcctgttgttgccacttgaaaaatcatattcatacacatttggatggaatctccatgacagcaggggttttgtctgtctgtccacgcttgtagctccagggactaggatggtgctgagcatatggttaggtgttcaatgaataactgttgcattaatgagtatgaatttgatcagaaaagaatgttcctgaaataaagctccagtgtgaataaa

SEQ ID NO: 12235 - protein, 74 aa, Homo sapiens
MGAHACNTNTLEGQGGRITQAQEFKINLGNKIRPSNSGHWDVHYTAHLEKAAPSTNAAYSFTRGSVLFSPLITT

SEQ ID NO: 12236 - DNA, 338 bp, Homo sapiens
accggctcagacggtcgccgccgcgtttgcgcagggggagctggtcgccgccgcggccgcctggaattgtgggagttgtgtctgccactcggctgccggaggccgaaggtccctgactatggctccccagagcctgccttcatctaggatggctcctctgggcatgctgcttgggctgctgatggccgcctgcttcaccttctgcctcagtcatcagaacctgaaggagtttgccctgaccaacccagagaagagcagcaccaaagaaacagagagaaaagaaaccaaagccgaggaggagctggatgccgaagtcctggaggtgttccacccgacgc

SEQ ID NO: 12237 - protein, 72 aa, Homo sapiens
MAPQSLPSSRMAPLGMLLGLLMAACFTFCLSHQNLKEFALTNPEKSSTKETERKETKAEEELDAEVLEVFHP

SEQ ID NO: 12238 - DNA, 399 bp, Homo sapiens
gaaggccagctattacttctctactgaggccaactgtgagccctggtgtgtttcattggcaggagaagaggctaattaagtgaaactgaaaggctgtacagacttctgcttctgggaaggcctcaggaaacttaccatcatggcggaaggcgaaggggaagctggcacgtcttacatgtctggagcaggagaaagagagcaagggggacatgctgcacatttttaaatggccagatcctgtgagaactcacttttgtgaaaacagcaagggggaaatccgcccctatgacttagtcacctcccactaggcccctcctccaatattagggattacaatttgatatgagatttgggtggggacacaaattcaaaccatatcagaagccttcaatggcaccc

SEQ ID NO: 12239 - protein, 32 aa, Homo sapiens
MLHIFKWPDPVRTHFCENSKGEIRPYDLVTSH

SEQ ID NO: 12240 - DNA, 4392 bp, Homo sapiens
cctttcccctccggcctctgccggtgctgctgcgccctgcggagctccgaacacgtgcgcagaggctggctgtggcagatgcaactgcaggatgacttgaaagtagggcatccttcacccatctgaagggaggaaatagtggcaggtgacagtctgcatgtgcagttttcagatgccttcacctgaatgacatctacctccatcaggaccccagatgtctgacagccctgtgtgacaccaagataaacaatgtctgactctgtagcccaggctggagtgtgcagtggtgcactaggctcacggcaacctccgcctccggctcaaacgatcctcagccccgtcctccgtaccaggaggttgacaaacagccttttcgggaatgggactcgaactcgtaagccacgtctgttcctccatttcccgcctcagctggatgacggagagggatctccgggattaaagaacaacgaccgcaggcgattgtctgctggttctcagcttgaagaagattctgcagtccttattgatcctttttcttggcgttaccatttttgaagcaaagttaacctagctttctagtttgagctttctttttggccgtctttaaaaaaatttttttttttaatctataaaatagacaagagctagttctacaatgtccaagtcattccagcagtcatctctcagtagggactcacagggtcatgggcgtgacctgtctgcggcaggaataggccttcttgctgctgctacccagtctttaagtatgccagcatctcttggaaggatgaaccagggtactgcacgccttgctagtttaatgaatcttggaatgagttcttcattgaatcaacaaggagctcatagtgcactgtcttctgctagtacttcttcccataatttgcagtctatatttaacattggaagtagaggtccactccctttatcttctcaacaccgtggagatgcagaccaggccagtaacattttggccagctttggtctgtctgctagagacttagatgaactgagtcgttatccagaggacaagattactcctgagaatttgccccaaatccttctacagcttaaaaggaggagaactgaagaaggccctaccttgagttatggtagagatggcagatctgctacacgggagccaccatacagagtacctagggatgattgggaagaaaaaaggcactttagaagagatagttttgatgatcgtggtcctagtctcaacccagtgcttgattatgaccatggaagtcgttctcaagaatctggttattatgacagaatggattatgaagatgacagattaagagatggagaaaggtgtagggatgattctttttttggtgagacctcgcataactatcataaatttgacagtgagtatgagagaatgggacgtggtcctggccccttacaagagagatctctctttgagaaaaagagaggcgctcctccaagtagcaatattgaagacttccatggactcttaccgaagggttatccccatctgtgctctatatgtgatttgccagttcattctaataaggagtggagtcaacatatcaatggagcaagtcacagtcgtcgatgccagcttcttcttgaaatctacccagaatggaatcctgacaatgatacaggacacacaatgggtgatccattcatgttgcagcagtctacaaatccagcaccaggaattctgggacctccacctccctcatttcatcttgggggaccagcagttggaccaagaggaaatctgggtgctggaaatggaaacctgcaaggacctagacacatgcagaaaggcagagtggaaactagcagagttgttcacatcatggattttcaacgagggaaaaacttgagataccagctattacagctggtagaaccatttggagtcatttcaaatcatctgattctaaataaaattaatgaggcatttattgaaatggcaaccacagaggatgctcaggccgcagtggattattacacaaccacaccagcgttagtatttggcaagccagtgagagttcatttatcccagaagtataaaagaataaagaaacctgaaggaaagccagatcagaagtttgatcaaaagcaagagcttggacgtgtgatacatctcagcaatttgccgcattctggctattctgatagtgctgttctcaagcttgctgagccttatgggaaaataaagaattacatattgatgaggatgaaaagtcaggcttttattgagatggagacaagagaagatgcaatggcaatggttgaccattgtttgaaaaaagccctttggtttcaggggagatgtgtgaaggttgacctgtctgagaaatataaaaaactggttctgaggattccaaacagaggcattgatttactgaaaaaagataaatcccgaaaaagatcttactctccagatggcaaagaatctccaagtgataagaaatccaaaactgatggttcccagaagactgagagttcaaccgaaggtaaagaacaagaagagaagtccggtgaagatggtgagaaagacacaaaggatgaccagacagagcaggaacctaatatgcttcttgaatctgaagatgagctacttgtagatgaagaagaagcagcagcactgctagaaagtggcagttcagtgggagacgagaccgatcttgctaatttaggtgatgtggcttctgatgggaaaaaggaaccatcagataaagctgtgaaaaaagatggaagtgcttcagcagcagcaaagaaaaagcttaaaaagcgtcgttttccagggagtatggaaggttttgtcactctagatgaggttggtgatgaggaagattcggaacttcagaaacttcgtaaatcgggcatggcatttaaatctggtgacaaaaatgatgatggtttggttgaaattaaggtggacaagatcgaggaacttgatcaagaaaacgaagcagcgttggaaaatggaattaaaaatgaggaaaacacagaaccaggtgctgaatcttctgagaacgctgatgatcccaacaaagatacaagtgaaaacgcagatggtcaaagtgatgagaacaaggacgactatacaatcccagatgagtatagaattggaccatatcagcccaatgttcctgttggtatagactatgtgatacctaaaacagggttttactgtaagctgtgttcactcttttatacaaatgaagaagttgcaaagaatactcattgcagcagccttcctcattatcagaaattaaagaaatttctgaataaattggcagaagaacgcagacagaagaaggaaacttaagatgtgcaaggagatttaatgatttcaaagaaaataatggttctttgtttttaatgttaaccttttttaaatacaatactgatagttagaagaaaactattgtactcttttgttttagtggagaaataatagatgtctgttcatgtgttaagtgttatagcaaaaaaaatacacatatggttaagttaatgaatagtttttgttttatcagaatggcaacagacagaagtactttgtagagattgacttcctaagctacttaagacaacttgcaccactaagaaaaaaatgtagaaccatttggaaaaatgaaatttagtagttccaagtttcaaagaaatgtcaacattttattccattcaataaagaacaaaaccaatagtgtttttattactttcatctgaaacattccatgttttaatctgagccttgcagactttcatttggagtttgaacccgttttggttgcatttcatttttggagaacttaattaacgtgagattggcaattgaaatgcaggtgcagttttctgttaatgtcatgctgttgtttaggtaataagaaatattaagtaattggctttagattttgtaatttttttccctgagttcctgctagatttcgtattctagtagtcaatgtattttcagtgaaatgcaaaaatattcccgttatctttgaccagtattaatttttgagatcttactgcttgtcacttgaatcccgtgattgtcatacatctctggtataagcaacatttgatttttgaagtgtgtagaccatctcttcatattttcaagatgtaattttacatttctgcatttttaaaacagtttggccataatcctagatgcacgcttctaattcatgtacctgcacatgtgacctttgtgaacagaaatttgcatgtataatttgtgtttacttgtaactttctggttatatactgcttatatctgtggattcaagttactgaagtgaataccaataaaaagaaaaccctaggccatgttaattggttatacatgtttggaatgttaaccaacgt

SEQ ID NO: 12241 - protein, 895 aa, Homo sapiens
MSKSFQQSSLSRDSQGHGRDLSAAGIGLLAAATQSLSMPASLGRMNQGTARLASLMNLGMSSSLNQQGAHSALSSASTSSHNLQSIFNIGSRGPLPLSSQHRGDADQASNILASFGLSARDLDELSRYPEDKITPENLPQILLQLKRRRTEEGPTLSYGRDGRSATREPPYRVPRDDWEEKRHFRRDSFDDRGPSLNPVLDYDHGSRSQESGYYDRMDYEDDRLRDGERCRDDSFFGETSHNYHKFDSEYERMGRGPGPLQERSLFEKKRGAPPSSNIEDFHGLLPKGYPHLCSICDLPVHSNKEWSQHINGASHSRRCQLLLEIYPEWNPDNDTGHTMGDPFMLQQSTNPAPGILGPPPPSFHLGGPAVGPRGNLGAGNGNLQGPRHMQKGRVETSRVVHIMDFQRGKNLRYQLLQLVEPFGVISNHLILNKINEAFIEMATTEDAQAAVDYYTTTPALVFGKPVRVHLSQKYKRIKKPEGKPDQKFDQKQELGRVIHLSNLPHSGYSDSAVLKLAEPYGKIKNYILMRMKSQAFIEMETREDAMAMVDHCLKKALWFQGRCVKVDLSEKYKKLVLRIPNRGIDLLKKDKSRKRSYSPDGKESPSDKKSKTDGSQKTESSTEGKEQEEKSGEDGEKDTKDDQTEQEPNMLLESEDELLVDEEEAAALLESGSSVGDETDLANLGDVASDGKKEPSDKAVKKDGSASAAAKKKLKKRRFPGSMEGFVTLDEVGDEEDSELQKLRKSGMAFKSGDKNDDGLVEIKVDKIEELDQENEAALENGIKNEENTEPGAESSENADDPNKDTSENADGQSDENKDDYTIPDEYRIGPYQPNVPVGIDYVIPKTGFYCKLCSLFYTNEEVAKNTHCSSLPHYQKLKKFLNKLAEERRQKKET

SEQ ID NO: 12242 - DNA, 2374 bp, Homo sapiens
tctgccggtgctgctgcgccctgcggagctccgaacacgtgcgcagaggctggctgtggcagatgcaactgcaggatgacttgaaagtagggcatccttcacccatctgaagggaggaaatagtggcaggtgacagtctgcatgtgcagttttcagatgccttcacctgaatgacatctacctccatcaggaccccagatgtctgacagccctgtgtgacaccaagataagtaacgatcccgttgaagataccacattacacttaggctcctgttggccatgacagcttcttagacttgtttttaatgaccttgacagttttgtttttttgtttgtttgtttttgagacggagtctctgtcatccaggctggagtgcaatgtaatggctcaatctcagctcactgcaacctctgcctcccgggttcaagtgattctcctgcctcagcctccccagtagctgggattacaggcatgagccaccgtgcccggctgcctcctaaattctcaaaacattccatttttattctgtggtcttactttattctgtcatgtagagaatagtggttgagcctgttgtcttttgagagtggatgctgtagtccttacatggctgactttcagcccgtaagcttatagtagaggatggggattttgttatcagctgctaaaagggagaagccaagcccagaactaagggttctgatgagttgaaggagagggaagatgcccctcaaggcaaagagcctctgagttagaatctgtgcttcaccagagtgacaatggtagaacttctccttctcagtattaattctcctggagagaactctagggttgtctaaacctgttcaactaggctgactaccccagcaagtgatgggttggacataaggcaaagaacaggaggggtgaaagggggcagaacagacaagttctgtcccagcctctgctacctctaaccccatggcattctatccttttctacactgggcttccatttcttaccccaacaatgatctgttcttccaggtgccgtcatttaatttcccagacacttgacctccttctgatttgtgtactccctccaaggctgagttgcagtgagtgacaataatctgtgctaattacttatcttgccagaagactcaaagggtttatggcttttactaactgaactctatgctagatgttagggataaatggttaacaggacacagttcttgcttatcttgctatggtctgtcaagccttatacaatctagccttatctctctcaccgtcttatctttatcacccgtagattcccttgttggccactggtttctttcagtccttaattagccttttgtcactacctgtctacacatgctgtttttcccttctcattccatcttgacattgtctattttgagatctcagctcagttgcagagaagctgccttccccatctggcaacccattatatgtgtcatagtaccatgttgtaccatagagctagacacaggtgccatgttgtgtcttgaaatgtattcaccagcttccaaaggtttacctcaatcccctttactcaagaagcctcagttctactgacagttggtaataataacctctctgtcataatgtacccaaaatagagtaagaatatcatgcttttcagtaatactccagtgaatgaggctaagagtaccatttttgttcttataaaagaatttttttggacatgaatacaaagatgtcaggttaccaaatcatttgctagtagatcctaacaatatcacctataggaaactgaacgtagcctttaaacattaagtgatgataatggatttggccgggcgcggttgcctataatcccaacactgagaggctgaggtgggtggatcacttgaggccaggacaggaccagcatggccaacatggtgaaaccccgtctctacaaaagaaaaaaatacaaaaattagctgggtgttgtggtgtatgcctgtaatcccaactatttgggtggctgaggcacgagaatcgcttgaacttggaaggcagaggttgcagtgagctgagatcgtgccactgcactccagcctgggtgacagactgagacagtctcaaaaaaaaaaaaagaaaataatggatttgcagagacttgctatttagatttcagacatctgttaactaaaacacatgtgtaggcttttgttacttatttcagtaatctgtaaatatctttatatttgagaaaatttgtgagacatctttgtgtaaattataacttgaagaacctctcttacaagcaggcatattggtaagtagctgcgaggatataacttataaccagattgaagtgtataattataatatgttattattctggggttctat

SEQ ID NO: 12243 - protein, 74 aa, Homo sapiens
MLFFPSHSILTLSILRSQLSCREAAFPIWQPIICVIVPCCTIELDTGAMLCLEMYSPASKGLPQSPLLKKPQFY

SEQ ID NO: 12244 - DNA, 2498 bp, Homo sapiens
tctgccggtgctgctgcgccctgcggagctccgaacacgtgcgcagaggctggctgtggcagatgcaactgcaggatgacttgaaagtagggcatccttcacccatctgaagggaggaaatagtggcaggtgacagtctgcatgtgcagttttcagatgccttcacctgaatgacatctacctccatcaggaccccagatgtctgacagccctgtgtgacaccaagataagtaacaatctggctgctgactaccctattggacaactccaatattagagaacatttccaccaattcagaaagtttattatgcactgctgttctagagcagggatcagcaaacttgctgtaaagagccaggatcccgttgaagataccacattacacttaggctcctgttggccatgacagcttcttagacttgtttttaatgaccttgacagttttgtttttttgtttgtttgtttttgagacggagtctctgtcatccaggctggagtgcaatgtaatggctcaatctcagctcactgcaacctctgcctcccgggttcaagtgattctcctgcctcagcctccccagtagctgggattacaggcatgagccaccgtgcccggctgcctcctaaattctcaaaacattccatttttattctgtggtcttactttattctgtcatgtagagaatagtggttgagcctgttgtcttttgagagtggatgctgtagtccttacatggctgactttcagcccgtaagcttatagtagaggatggggattttgttatcagctgctaaaagggagaagccaagcccagaactaagggttctgatgagttgaaggagagggaagatgcccctcaaggcaaagagcctctgagttagaatctgtgcttcaccagagtgacaatggtagaacttctccttctcagtattaattctcctggagagaactctagggttgtctaaacctgttcaactaggctgactaccccagcaagtgatgggttggacataaggcaaagaacaggaggggtgaaagggggcagaacagacaagttctgtcccagcctctgctacctctaaccccatggcattctatccttttctacactgggcttccatttcttaccccaacaatgatctgttcttccaggtgccgtcatttaatttcccagacacttgacctccttctgatttgtgtactccctccaaggctgagttgcagtgagtgacaataatctgtgctaattacttatcttgccagaagactcaaagggtttatggcttttactaactgaactctatgctagatgttagggataaatggttaacaggacacagttcttgcttatcttgctatggtctgtcaagccttatacaatctagccttatctctctcaccgtcttatctttatcacccgtagattcccttgttggccactggtttctttcagtccttaattagccttttgtcactacctgtctacacatgctgtttttcccttctcattccatcttgacattgtctattttgagatctcagctcagttgcagagaagctgccttccccatctggcaacccattatatgtgtcatagtaccatgttgtaccatagagctagacacaggtgccatgttgtgtcttgaaatgtattcaccagcttccaaaggtttacctcaatcccctttactcaagaagcctcagttctactgacagttggtaataataacctctctgtcataatgtacccaaaatagagtaagaatatcatgcttttcagtaatactccagtgaatgaggctaagagtaccatttttgttcttataaaagaatttttttggacatgaatacaaagatgtcaggttaccaaatcatttgctagtagatcctaacaatatcacctataggaaactgaacgtagcctttaaacattaagtgatgataatggatttggccgggcgcggttgcctataatcccaacactgagaggctgaggtgggtggatcacttgaggccaggacaggaccagcatggccaacatggtgaaaccccgtctctacaaaagaaaaaaatacaaaaattagctgggtgttgtggtgtatgcctgtaatcccaactatttgggtggctgaggcacgagaatcgcttgaacttggaaggcagaggttgcagtgagctgagatcgtgccactgcactccagcctgggtgacagactgagacagtctcaaaaaaaaaaaaagaaaataatggatttgcagagacttgctatttagatttcagacatctgttaactaaaacacatgtgtaggcttttgttacttatttcagtaatctgtaaatatctttatatttgagaaaatttgtgagacatctttgtgtaaattataacttgaagaacctctcttacaagcaggcatattggtaagtagctgcgaggatataacttataaccagattgaagtgtataattataatatgttattattctggggttctat

SEQ ID NO: 12245 - protein, 32 aa, Homo sapiens
MHCCSRAGISKLAVKSQDPVEDTTLHLGSCWP

SEQ ID NO: 12246 - DNA, 310 bp, Homo sapiens
ctgcgccctgcggagctccgaacacgtgcgcagaggctggctgtggcagatgcaactgcaggatgacttgaaagtagggcatccttcacccatctgaagggaggaaatagtggcaggtgacagtctgcatgtgcagttttcaggtaaatatccctattcattccaacattgactacctcctctgtgccaggcctgtgggctagttggtatctatcaggaaacaaatgggagatgccttcacctgaatgacatctacctccatcaggaccccagatgtctgacagccctgtgtgacaccaagataagtaac

SEQ ID NO: 12247 - protein, 45 aa, Homo sapiens
LPPLCQACGLVGIYQETNGRCLHLNDIYLHQDPRCLTALCDTKIS

SEQ ID NO: 12248 - DNA, 620 bp, Homo sapiens
aggatgacttgaaagtagggcatccttcacccatctgaagggaggaaatagtggcaggtgacagtctgcatgtgcagttttcagatgccttcacctgaatgacatctacctccatcaggaccccagatgtctgacagccctgtgtgacaccaagataagtaacgtatgtagtcttcttgtcatgtaggtcccaattaaattactatagctcagatgggggtaggggacttaaaattatgatgtgaaaaattatgtagagtatcagacttttttttggggggggacggagtcttgctcagttgcccaggctagagtacagtggctcgatctcggctcactgcaacctctgcctcctgggttcaagcgattctcctgcctcagcctcccgagtagctgggactacaggcacctgccaccatgccaggctaatttttttattttaagtagagacgaggtttcaccatattggccaggctggtctgaaactcctgaccttgcgatttgcctgccttggcctcccaaaatgctgggattacaggtttttttgtttgttttttgagacggagtctcactgtctcccaggctggagtgcaatggcgcaatctcggctcactacaacc

SEQ ID NO: 12249 - protein, 61 aa, Homo sapiens
SIRLFFGGGRSLAQLPRLEYSGSISAHCNLCLLGSSDSPASASRVAGTTGTCHHARLIFLF

SEQ ID NO: 12250 - DNA, 526 bp, Homo sapiens
ttagagcatcatactcttcatcttttagggcactaaggtgactgcaagaaattaaccagtagtaaaaatagtctgttttttgtgtgtttgggatttgtttatgtgtttttttgcatgggttacttacagcagttctctccacttttaatgtgctccaaagggagaggtcttaagaaagaatagcagtctgcacttatcaaatccagcctgggtgacagactgagacagtctcaaaaaaaaaaaaagaaaataatggatttgcagagacttgctatttagatttcagacatctgttaactaaaacacatgtgtaggcttttgttacttatttcagtaatctgtaaatatctttatatttgagaaaatttgtgagacatctttgtgtaaattataacttgaagaacctctcttacaagcaggcatattggtaagtagctgcgaggatataacttataaccagattgaagtgtataattataatatgttattattctggggttctataaaaaataaaatctttgaatct

SEQ ID NO: 12251 - protein, 33 aa, Homo sapiens
SVFCVFGICLCVFLHGLLTAVLSTFNVLQRERS

SEQ ID NO: 12252 - DNA, 3910 bp, Homo sapiens
gcgagagtgggtttgttcttgggctgcagccgctgccgccgcttctcgccagcgccgttgctgcgggggattgtgggagtctccgcgtcccgctcgctgggagagaggtacctctccttttccctctccctttccctaagagttgtctgctggttctcagcttgaagaagattctgcagtccttattgatcctttttcttggcgttaccatttttgaagcaaagttaacctagctttctagtttgagctttctttttggccgtctttaaaaaaatttttttttttaatctataaaatagacaagagctagttctacaatgtccaagtcattccagcagtcatctctcagtagggactcacagggtcatgggcgtgacctgtctgcggcaggaataggccttcttgctgctgctacccagtctttaagtatgccagcatctcttggaaggatgaaccagggtactgcacgccttgctagtttaatgaatcttggaatgagttcttcattgaatcaacaaggagctcatagtgcactgtcttctgctagtacttcttcccataatttgcagtctatatttaacattggaagtagaggtccactccctttatcttctcaacaccgtggagatgcagaccaggccagtaacattttggccagctttggtctgtctgctagagacttagatgaactgagtcgttatccagaggacaagattactcctgagaatttgccccaaatccttctacagcttaaaaggaggagaactgaagaaggccctaccttgagttatggtagagatggcagatctgctacacgggagccaccatacagagtacctagggatgattgggaagaaaaaaggcactttagaagagatagttttgatgatcgtggtcctagtctcaacccagtgcttgattatgaccatggaagtcgttctcaagaatctggttattatgacagaatggattatgaagatgacagattaagagatggagaaaggtgtagggatgattctttttttggtgagacctcgcataactatcataaatttgacagtgagtatgagagaatgggacgtggtcctggccccttacaagagagatctctctttgagaaaaagagaggcgctcctccaagtagcaatattgaagacttccatggactcttaccgaagggttatccccatctgtgctctatatgtgatttgccagttcattctaataaggagtggagtcaacatatcaatggagcaagtcacagtcgtcgatgccagcttcttcttgaaatctacccagaatggaatcctgacaatgatacaggacacacaatgggtgatccattcatgttgcagcagtctacaaatccagcaccaggaattctgggacctccacctccctcatttcatcttgggggaccagcagttggaccaagaggaaatctgggtgctggaaatggaaacctgcaaggacctagacacatgcagaaaggcagagtggaaactagcagagttgttcacatcatggattttcaacgagggaaaaacttgagataccagctattacagctggtagaaccatttggagtcatttcaaatcatctgattctaaataaaattaatgaggcatttattgaaatggcaaccacagaggatgctcaggccgcagtggattattacacaaccacaccagcgttagtatttggcaagccagtgagagttcatttatcccagaagtataaaagaataaagaaacctgaaggaaagccagatcagaagtttgatcaaaagcaagagcttggacgtgtgatacatctcagcaatttgccgcattctggctattctgatagtgctgttctcaagcttgctgagccttatgggaaaataaagaattacatattgatgaggatgaaaagtcaggcttttattgagatggagacaagagaagatgcaatggcaatggttgaccattgtttgaaaaaagccctttggtttcaggggagatgtgtgaaggttgacctgtctgagaaatataaaaaactggttctgaggattccaaacagaggcattgatttactgaaaaaagataaatcccgaaaaagatcttactctccagatggcaaagaatctccaagtgataagaaatccaaaactgatggttcccagaagactgagagttcaaccgaaggtaaagaacaagaagagaagtccggtgaagatggtgagaaagacacaaaggatgaccagacagagcaggaacctaatatgcttcttgaatctgaagatgagctacttgtagatgaagaagaagcagcagcactgctagaaagtggcagttcagtgggagacgagaccgatcttgctaatttaggtgatgtggcttctgatgggaaaaaggaaccatcagataaagctgtgaaaaaagatggaagtgcttcagcagcagcaaagaaaaagcttaaaaaggtggacaagatcgaggaacttgatcaagaaaacgaagcagcgttggaaaatggaattaaaaatgaggaaaacacagaaccaggtgctgaatcttctgagaacgctgatgatcccaacaaagatacaagtgaaaacgcagatggtcaaagtgatgagaacaaggacgactatacaatcccagatgagtatagaattggaccatatcagcccaatgttcctgttggtatagactatgtgatacctaaaacagggttttactgtaagctgtgttcactcttttatacaaatgaagaagttgcaaagaatactcattgcagcagccttcctcattatcagaaattaaagaaatttctgaataaattggcagaagaacgcagacagaagaaggaaacttaagatgtgcaaggagatttaatgatttcaaagaaaataatggttctttgtttttaatgttaaccttttttaaatacaatactgatagttagaagaaaactattgtactcttttgttttagtggagaaataatagatgtctgttcatgtgttaagtgttatagcaaaaaaaatacacatatggttaagttaatgaatagtttttgttttatcagaatggcaacagacagaagtactttgtagagattgacttcctaagctacttaagacaacttgcaccactaagaaaaaaatgtagaaccatttggaaaaatgaaatttagtagttccaagtttcaaagaaatgtcaacattttattccattcaataaagaacaaaaccaatagtgtttttattactttcatctgaaacattccatgttttaatctgagccttgcagactttcatttggagtttgaacccgttttggttgcatttcatttttggagaacttaattaacgtgagattggcaattgaaatgcaggtgcagttttctgttaatgtcatgctgttgtttaggtaataagaaatattaagtaattggctttagattttgtaatttttttccctgagttcctgctagatttcgtattctagtagtcaatgtattttcagtgaaatgcaaaaatattcccgttatctttgaccagtattaatttttgagatcttactgcttgtcacttgaatcccgtgattgtcatacatctctggtataagcaacatttgatttttgaagtgtgtagaccatctcttcatattttcaagatgtaattttacatttctgcatttttaaaacagtttggccataatcctagatgcacgcttctaattcatgtacctgcacatgtgacctttgtgaacagaaatttgcatgtataatttgtgtttacttgtaactttctggttatatactgcttatatctgtggattcaagttactgaagtgaataccaataaaaagaaaaccctaggccatgttaattggttatacatgtttggaatgttaaccaacgt

SEQ ID NO: 12253 - protein, 847 aa, Homo sapiens; identical to SEQ ID NO: 1173

SEQ ID NO: 12254 - DNA, 4831 bp, Homo sapiens
gcgagagtgggtttgttcttgggctgcagccgctgccgccgcttctcgccagcgccgttgctgcgggggattgtgggagtctccgcgtcccgctcgctgggagagaggtacctctccttttccctctccctttccctaagagttgtctgctggttctcagcttgaagaagattctgcagtccttattgatcctttttcttggcgttaccatttttgaagcaaagttaacctagctttctagtttgagctttctttttggccgtctttaaaaaaatttttttttttaatctataaaatagacaagagctagttctacaatgtccaagtcattccagcagtcatctctcagtagggactcacagggtcatgggcgtgacctgtctgcggcaggaataggccttcttgctgctgctacccagtctttaagtatgccagcatctcttggaaggatgaaccagggtactgcacgccttgctagtttaatgaatcttggaatgagttcttcattgaatcaacaaggagctcatagtgcactgtcttctgctagtacttcttcccataatttgcagtctatatttaacattggaagtagaggtccactccctttatcttctcaacaccgtggagatgcagaccaggccagtaacattttggccagctttggtctgtctgctagagacttagatgaactgagtcgttatccagaggacaagattactcctgagaatttgccccaaatccttctacagcttaaaaggaggagaactgaagaaggccctaccttgagttatggtagagatggcagatctgctacacgggagccaccatacagagtacctagggatgattgggaagaaaaaaggcactttagaagagatagttttgatgatcgtggtcctagtctcaacccagtgcttgattatgaccatggaagtcgttctcaagaatctggttattatgacagaatggattatgaagatgacagattaagagatggagaaaggtgtagggatgattctttttttggtgagacctcgcataactatcataaatttgacagtgagtatgagagaatgggacgtggtcctggccccttacaagagagatctctctttgagaaaaagagaggcgctcctccaagtagcaatattgaagacttccatggactcttaccgaagggttatccccatctgtgctctatatgtgatttgccagttcattctaataaggagtggagtcaacatatcaatggagcaagtcacagtcgtcgatgccagcttcttcttgaaatctacccagaatggaatcctgacaatgatacaggacacacaatgggtgatccattcatgttgcagcagtctacaaatccagcaccaggaattctgggacctccacctccctcatttcatcttgggggaccagcagttggaccaagaggaaatctgggtgctggaaatggaaacctgcaaggacctagacacatgcagaaaggcagagtggaaactagcagagttgttcacatcatggattttcaacgagggaaaaacttgagataccagctattacagctggtagaaccatttggagtcatttcaaatcatctgattctaaataaaattaatgaggcatttattgaaatggcaaccacagaggatgctcaggccgcagtggattattacacaaccacaccagcgttagtatttggcaagccagtgagagttcatttatcccagaagtataaaagaataaagaaacctgaaggaaagccagatcagaagtttgatcaaaagcaagagcttggacgtgtgatacatctcagcaatttgccgcattctggctattctgatagtgctgttctcaagcttgctgagccttatgggaaaataaagaattacatattgatgaggatgaaaagtcaggcttttattgagatggagacaagagaagatgcaatggcaatggttgaccattgtttgaaaaaagccctttggtttcaggggagatgtgtgaaggttgacctgtctgagaaatataaaaaactggttctgaggattccaaacagaggcattgatttactgaaaaaagataaatcccgaaaaagatcttactctccagatggcaaagaatctccaagtgataagaaatccaaaactgatggttcccagaagactgagagttcaaccgaaggtaaagaacaagaagagaagtccggtgaagatggtgagaaagacacaaaggatgaccagacagagcaggaacctaatatgcttcttgaatctgaagatgagctacttgtagatgaagaagaagcagcagcactgctagaaagtggcagttcagtgggagacgagaccgatcttgctaatttaggtgatgtggcttctgatgggaaaaaggaaccatcagataaagctgtgaaaaaagatggaagtgcttcagcagcagcaaagaaaaagcttaaaaaggtggacaagatcgaggaacttgatcaagaaaacgaagcagcgttggaaaatggaattaaaaatgaggaaaacacagaaccaggtgctgaatcttctgagaacgctgatgatcccaacaaagatacaagtgaaaacgcagatggtcaaagtgatgagaacaaggacgactatacaatcccagatgagtatagaattggaccatatcagcccaatgttcctgttggtatagactatgtgatacctaaaacagggttttactgtaagctgtgttcactcttttatacaaatgaagaagttgcaaagaatactcattgcagcagccttcctcattatcagaaattaaagaaatttctgaataaattggcagaagaacgcagacagaagaaggaaacttaagatgtgcaaggagatttaatgatttcaaagaaaataatggttctttgtttttaatgttaaccttttttaaatacaatactgatagttagaagaaaactattgtactcttttgttttagtggagaaataatagatgtctgttcatgtgttaagtgttatagcaaaaaaaatacacatatggttaagttaatgaatagtttttgttttatcagaatggcaacagacagaagtactttgtagagattgacttcctaagctacttaagacaacttgcaccactaagaaaaaaatgtagaaccatttggaaaaatgaaatttagtagttccaagtttcaaagaaatgtcaacattttattccattcaataaagaacaaaaccaatagtgtttttattactttcatctgaaacattccatgttttaatctgagccttgcagactttcatttggagtttgaacccgttttggttgcatttcatttttggagaacttaattaacgtgagattggcaattgaaatgcaggtgcagttttctgttaatgtcatgctgttgtttaggtaataagaaatattaagtaattggctttagattttgtaatttttttccctgagttcctgctagatttcgtattctagtagtcaatgtattttcagtgaaatgcaaaaatattcccgttatctttgaccagtattaatttttgagatcttactgcttgtcacttgaatcccgtgattgtcatacatctctggtataagcaacatttgatttttgaagtgtgtagaccatctcttcatattttcaagatgtaattttacatttctgcatttttaaaacagtttggccataatcctagatgcacgcttctaattcatgtacctgcacatgtgacctttgtgaacagaaatttgcatgtataatttgtgtttacttgtaactttctggttatatactgcttatatctgtggattcaagttactgaagtgaataccaataaaaagaaaaccctaggccatgttaattggttatacatgtttggaatgttaaccaacgtatttgtcagttgtggtttttattcgctcttaaactttgtgcatgctttaacaatttattacttttaaatctagagtgaattctaaagactgccgctaaagatctgagttttaaaaatgttgttgctggtggatttcttgttcctgttacataactaaaagtgaggccatttgtggtttttaaaaaccttatgaattaaaaatgctacaggtgaacaaacagaagcttatgtttagagatattgatgacttaacagtacaattggaagtaatacggatgagcaagaattagttctgcagcttttcaaaataattacgtagagactcttggtatattggattatctgttgtaaacaatttttttttcttccctgacacagggtctcactctgtcacccagactggagtgcagtggcacagttctctgcaacctcagcctttgggctcaaatgaccctcctacctcagtctcctgagtagctgggactacaggctcatgccactatacctggctagtttttggtttttttgtatagatggggctttgccatgttgcccaggttgatcttgaattcctgggcccaagtgatctgctcgcttcagcctcccaaagtgctgggactgtaggcatgagccaccatccctggccaagaaacaaagttttaatttcaaaaaaatctacaaaaacaggataggcattgtctttcaaatgttcagaccccagtttattaaaggatacttcaaatagttggctaaattttatgatctctcccgttgaaaagtaggtgatgattttaatgtgacatgcacaaaaaatccttgccagtttacttctgcaatttaattttagcctttactaattacccacttctgtttaattccaatttttaacagcaggtacataaagcattatgtgcacaatgg

SEQ ID NO: 12255 - protein, 847 aa, Homo sapiens; identical to SEQ ID NO: 1173

SEQ ID NO: 12256 - DNA, 1322 bp, Homo sapiens
gccgttgctgcgggggattgtgggagtctccgcgtcccgctcgctgggagagaggtacctctccttttccctctccctttccctaaggagtggagtcaacatatcaatggagcaagtcacagtcgtcgatgccagcttcttcttgaaatgtaggagtttgaaatacctttaaaacatccttatcgtgaatcagaatcagccattattggtttttgggagttcatcatttacttgtaatatccacaatgttaatatcacatagtggtactgtatggacaatactatttacaagtaaaatgtttagatctggaaatttcatattgaatattagatgcagtaataatattttgttatttaacatttctaggatacatatatattggtcattatacaaattggtgatttttactagacatagtgaaagatagtatttgatatgtagagtggattaaacagtagcatttttaataatacatgctctaaaaatgtaaaagatacggaaaagagggtaggttattaaaagattctaattcattgtccagcaaaatccttggtgatgaattttttttttttttttgcttttgagatctttggttttgagttcaggctgctaccatgaaatggaattcctaaagaaactccctgcttaagcagcacacagtgcccattgttcactggagttggaattttcacatatgcctaactctgttggggctattctttctttctaatgtcacaactcaactgtgctcttggtattaatattggagaaggaaaatctgtgctctgttcttgtttctatgtaacccacatttctaattctttgtgcggcacttcctccttacaatttaacaaatagaggaaaaacttaatttcaacattatctgcatttgcaagcaatacaaaacaagtttattctcgtggattattttgaagttctgaaatttttcttttgaaatatctattggaaatgctttaaaactatgtttctaacacttagactctcagataactttactaataaatgatctctattttagaggccaaacaaggctgttttgtgaaaaggacagttttattttaaagttaattttctggtctttttaaagctacccagaatggaatcctgacaatgatacaggacacacaatgtaagttaaattttttaagctaccatttgtaaaggagatcaatgtaaggaattcaggtttcactttcaacatttcataaacaaagtattttcagaatttctttactgaaaatgagactttgataaaattcactttggttaacaatttttagaatatatattatgtagtaat

SEQ ID NO: 12257 - protein, 60 aa, Homo sapiens
MLISHSGTVWTILFTSKMFRSGNFILNIRCSNNILLFNISRIHIYWSLYKLVIFTRHSER

SEQ ID NO: 12258 - DNA, 439 bp, Homo sapiens
tgttccacgacgcagtacgaaaaacaagcgttaacgtttcatttttcggccatttttacgcgatggggggcggggaacattttcagagaaaaaaaggcgaacgggttatttggcactggcgctacccaaggacttagatatcttaaccatcctcctcaaacggcaagcccccagtgtacagtctgtccctcaggcctcgagcgagctcctccctccccctcagcgccgcggcccgcgtgtaacgggctagtcgtcccgcccccgcccacaacgagcccaggacgcgcaggaagctcggccggtcagcgcacctcttcacccaaaatctcccgccgcaccctgggcccttggccggccgcgtgtttccctcccggaccgctcacctccgccgccctagaaggctggttgcgccgccactgcgctcctaacatggcggccg

SEQ ID NO: 12259 - protein, 71 aa, Homo sapiens
RFIFRPFLRDGGRGTFSEKKRRTGYLALALPKDLDILTILLKRQAPSVQSVPQASSELLPPPQRRGPRVTG

SEQ ID NO: 12260 - DNA, 3825 bp, Homo sapiens
ggccgccatgttaggagcgcagtggcggcgcaaccagccttctagggcggcggagagttgtctgctggttctcagcttgaagaagattctgcagtccttattgatcctttttcttggcgttaccatttttgaagcaaagttaacctagctttctagtttgagctttctttttggccgtctttaaaaaaatttttttttttaatctataaaatagacaagagctagttctacaatgtccaagtcattccagcagtcatctctcagtagggactcacagggtcatgggcgtgacctgtctgcggcaggaataggccttcttgctgctgctacccagtctttaagtatgccagcatctcttggaaggatgaaccagggtactgcacgccttgctagtttaatgaatcttggaatgagttcttcattgaatcaacaaggagctcatagtgcactgtcttctgctagtacttcttcccataatttgcagtctatatttaacattggaagtagaggtccactccctttatcttctcaacaccgtggagatgcagaccaggccagtaacattttggccagctttggtctgtctgctagagacttagatgaactgagtcgttatccagaggacaagattactcctgagaatttgccccaaatccttctacagcttaaaaggaggagaactgaagaaggccctaccttgagttatggtagagatggcagatctgctacacgggagccaccatacagagtacctagggatgattgggaagaaaaaaggcactttagaagagatagttttgatgatcgtggtcctagtctcaacccagtgcttgattatgaccatggaagtcgttctcaagaatctggttattatgacagaatggattatgaagatgacagattaagagatggagaaaggtgtagggatgattctttttttggtgagacctcgcataactatcataaatttgacagtgagtatgagagaatgggacgtggtcctggccccttacaagagagatctctctttgagaaaaagagaggcgctcctccaagtagcaatattgaagacttccatggactcttaccgaagggttatccccatctgtgctctatatgtgatttgccagttcattctaataaggagtggagtcaacatatcaatggagcaagtcacagtcgtcgatgccagcttcttcttgaaatctacccagaatggaatcctgacaatgatacaggacacacaatgggtgatccattcatgttgcagcagtctacaaatccagcaccaggaattctgggacctccacctccctcatttcatcttgggggaccagcagttggaccaagaggaaatctgggtgctggaaatggaaacctgcaaggacctagacacatgcagaaaggcagagtggaaactagcagagttgttcacatcatggattttcaacgagggaaaaacttgagataccagctattacagctggtagaaccatttggagtcatttcaaatcatctgattctaaataaaattaatgaggcatttattgaaatggcaaccacagaggatgctcaggccgcagtggattattacacaaccacaccagcgttagtatttggcaagccagtgagagttcatttatcccagaagtataaaagaataaagaaacctgaaggaaagccagatcagaagtttgatcaaaagcaagagcttggacgtgtgatacatctcagcaatttgccgcattctggctattctgatagtgctgttctcaagcttgctgagccttatgggaaaataaagaattacatattgatgaggatgaaaagtcaggcttttattgagatggagacaagagaagatgcaatggcaatggttgaccattgtttgaaaaaagccctttggtttcaggggagatgtgtgaaggttgacctgtctgagaaatataaaaaactggttctgaggattccaaacagaggcattgatttactgaaaaaagataaatcccgaaaaagatcttactctccagatggcaaagaatctccaagtgataagaaatccaaaactgatggttcccagaagactgagagttcaaccgaaggtaaagaacaagaagagaagtccggtgaagatggtgagaaagacacaaaggatgaccagacagagcaggaacctaatatgcttcttgaatctgaagatgagctacttgtagatgaagaagaagcagcagcactgctagaaagtggcagttcagtgggagacgagaccgatcttgctaatttaggtgatgtggcttctgatgggaaaaaggaaccatcagataaagctgtgaaaaaagatggaagtgcttcagcagcagcaaagaaaaagcttaaaaaggtggacaagatcgaggaacttgatcaagaaaacgaagcagcgttggaaaatggaattaaaaatgaggaaaacacagaaccaggtgctgaatcttctgagaacgctgatgatcccaacaaagatacaagtgaaaacgcagatggtcaaagtgatgagaacaaggacgactatacaatcccagatgagtatagaattggaccatatcagcccaatgttcctgttggtatagactatgtgatacctaaaacagggttttactgtaagctgtgttcactcttttatacaaatgaagaagttgcaaagaatactcattgcagcagccttcctcattatcagaaattaaagaaatttctgaataaattggcagaagaacgcagacagaagaaggaaacttaagatgtgcaaggagatttaatgatttcaaagaaaataatggttctttgtttttaatgttaaccttttttaaatacaatactgatagttagaagaaaactattgtactcttttgttttagtggagaaataatagatgtctgttcatgtgttaagtgttatagcaaaaaaaatacacatatggttaagttaatgaatagtttttgttttatcagaatggcaacagacagaagtactttgtagagattgacttcctaagctacttaagacaacttgcaccactaagaaaaaaatgtagaaccatttggaaaaatgaaatttagtagttccaagtttcaaagaaatgtcaacattttattccattcaataaagaacaaaaccaatagtgtttttattactttcatctgaaacattccatgttttaatctgagccttgcagactttcatttggagtttgaacccgttttggttgcatttcatttttggagaacttaattaacgtgagattggcaattgaaatgcaggtgcagttttctgttaatgtcatgctgttgtttaggtaataagaaatattaagtaattggctttagattttgtaatttttttccctgagttcctgctagatttcgtattctagtagtcaatgtattttcagtgaaatgcaaaaatattcccgttatctttgaccagtattaatttttgagatcttactgcttgtcacttgaatcccgtgattgtcatacatctctggtataagcaacatttgatttttgaagtgtgtagaccatctcttcatattttcaagatgtaattttacatttctgcatttttaaaacagtttggccataatcctagatgcacgcttctaattcatgtacctgcacatgtgacctttgtgaacagaaatttgcatgtataatttgtgtttacttgtaactttctggttatatactgcttatatctgtggattcaagttactgaagtgaataccaataaaaagaaaaccctaggccatgttaattggttatacatgtttggaatgttaaccaacgt

SEQ ID NO: 12261 - protein, 847 aa, Homo sapiens; identical to SEQ ID NO: 1173

SEQ ID NO: 12262 - DNA, 4746 bp, Homo sapiens
ggccgccatgttaggagcgcagtggcggcgcaaccagccttctagggcggcggagagttgtctgctggttctcagcttgaagaagattctgcagtccttattgatcctttttcttggcgttaccatttttgaagcaaagttaacctagctttctagtttgagctttctttttggccgtctttaaaaaaatttttttttttaatctataaaatagacaagagctagttctacaatgtccaagtcattccagcagtcatctctcagtagggactcacagggtcatgggcgtgacctgtctgcggcaggaataggccttcttgctgctgctacccagtctttaagtatgccagcatctcttggaaggatgaaccagggtactgcacgccttgctagtttaatgaatcttggaatgagttcttcattgaatcaacaaggagctcatagtgcactgtcttctgctagtacttcttcccataatttgcagtctatatttaacattggaagtagaggtccactccctttatcttctcaacaccgtggagatgcagaccaggccagtaacattttggccagctttggtctgtctgctagagacttagatgaactgagtcgttatccagaggacaagattactcctgagaatttgccccaaatccttctacagcttaaaaggaggagaactgaagaaggccctaccttgagttatggtagagatggcagatctgctacacgggagccaccatacagagtacctagggatgattgggaagaaaaaaggcactttagaagagatagttttgatgatcgtggtcctagtctcaacccagtgcttgattatgaccatggaagtcgttctcaagaatctggttattatgacagaatggattatgaagatgacagattaagagatggagaaaggtgtagggatgattctttttttggtgagacctcgcataactatcataaatttgacagtgagtatgagagaatgggacgtggtcctggccccttacaagagagatctctctttgagaaaaagagaggcgctcctccaagtagcaatattgaagacttccatggactcttaccgaagggttatccccatctgtgctctatatgtgatttgccagttcattctaataaggagtggagtcaacatatcaatggagcaagtcacagtcgtcgatgccagcttcttcttgaaatctacccagaatggaatcctgacaatgatacaggacacacaatgggtgatccattcatgttgcagcagtctacaaatccagcaccaggaattctgggacctccacctccctcatttcatcttgggggaccagcagttggaccaagaggaaatctgggtgctggaaatggaaacctgcaaggacctagacacatgcagaaaggcagagtggaaactagcagagttgttcacatcatggattttcaacgagggaaaaacttgagataccagctattacagctggtagaaccatttggagtcatttcaaatcatctgattctaaataaaattaatgaggcatttattgaaatggcaaccacagaggatgctcaggccgcagtggattattacacaaccacaccagcgttagtatttggcaagccagtgagagttcatttatcccagaagtataaaagaataaagaaacctgaaggaaagccagatcagaagtttgatcaaaagcaagagcttggacgtgtgatacatctcagcaatttgccgcattctggctattctgatagtgctgttctcaagcttgctgagccttatgggaaaataaagaattacatattgatgaggatgaaaagtcaggcttttattgagatggagacaagagaagatgcaatggcaatggttgaccattgtttgaaaaaagccctttggtttcaggggagatgtgtgaaggttgacctgtctgagaaatataaaaaactggttctgaggattccaaacagaggcattgatttactgaaaaaagataaatcccgaaaaagatcttactctccagatggcaaagaatctccaagtgataagaaatccaaaactgatggttcccagaagactgagagttcaaccgaaggtaaagaacaagaagagaagtccggtgaagatggtgagaaagacacaaaggatgaccagacagagcaggaacctaatatgcttcttgaatctgaagatgagctacttgtagatgaagaagaagcagcagcactgctagaaagtggcagttcagtgggagacgagaccgatcttgctaatttaggtgatgtggcttctgatgggaaaaaggaaccatcagataaagctgtgaaaaaagatggaagtgcttcagcagcagcaaagaaaaagcttaaaaaggtggacaagatcgaggaacttgatcaagaaaacgaagcagcgttggaaaatggaattaaaaatgaggaaaacacagaaccaggtgctgaatcttctgagaacgctgatgatcccaacaaagatacaagtgaaaacgcagatggtcaaagtgatgagaacaaggacgactatacaatcccagatgagtatagaattggaccatatcagcccaatgttcctgttggtatagactatgtgatacctaaaacagggttttactgtaagctgtgttcactcttttatacaaatgaagaagttgcaaagaatactcattgcagcagccttcctcattatcagaaattaaagaaatttctgaataaattggcagaagaacgcagacagaagaaggaaacttaagatgtgcaaggagatttaatgatttcaaagaaaataatggttctttgtttttaatgttaaccttttttaaatacaatactgatagttagaagaaaactattgtactcttttgttttagtggagaaataatagatgtctgttcatgtgttaagtgttatagcaaaaaaaatacacatatggttaagttaatgaatagtttttgttttatcagaatggcaacagacagaagtactttgtagagattgacttcctaagctacttaagacaacttgcaccactaagaaaaaaatgtagaaccatttggaaaaatgaaatttagtagttccaagtttcaaagaaatgtcaacattttattccattcaataaagaacaaaaccaatagtgtttttattactttcatctgaaacattccatgttttaatctgagccttgcagactttcatttggagtttgaacccgttttggttgcatttcatttttggagaacttaattaacgtgagattggcaattgaaatgcaggtgcagttttctgttaatgtcatgctgttgtttaggtaataagaaatattaagtaattggctttagattttgtaatttttttccctgagttcctgctagatttcgtattctagtagtcaatgtattttcagtgaaatgcaaaaatattcccgttatctttgaccagtattaatttttgagatcttactgcttgtcacttgaatcccgtgattgtcatacatctctggtataagcaacatttgatttttgaagtgtgtagaccatctcttcatattttcaagatgtaattttacatttctgcatttttaaaacagtttggccataatcctagatgcacgcttctaattcatgtacctgcacatgtgacctttgtgaacagaaatttgcatgtataatttgtgtttacttgtaactttctggttatatactgcttatatctgtggattcaagttactgaagtgaataccaataaaaagaaaaccctaggccatgttaattggttatacatgtttggaatgttaaccaacgtatttgtcagttgtggtttttattcgctcttaaactttgtgcatgctttaacaatttattacttttaaatctagagtgaattctaaagactgccgctaaagatctgagttttaaaaatgttgttgctggtggatttcttgttcctgttacataactaaaagtgaggccatttgtggtttttaaaaaccttatgaattaaaaatgctacaggtgaacaaacagaagcttatgtttagagatattgatgacttaacagtacaattggaagtaatacggatgagcaagaattagttctgcagcttttcaaaataattacgtagagactcttggtatattggattatctgttgtaaacaatttttttttcttccctgacacagggtctcactctgtcacccagactggagtgcagtggcacagttctctgcaacctcagcctttgggctcaaatgaccctcctacctcagtctcctgagtagctgggactacaggctcatgccactatacctggctagtttttggtttttttgtatagatggggctttgccatgttgcccaggttgatcttgaattcctgggcccaagtgatctgctcgcttcagcctcccaaagtgctgggactgtaggcatgagccaccatccctggccaagaaacaaagttttaatttcaaaaaaatctacaaaaacaggataggcattgtctttcaaatgttcagaccccagtttattaaaggatacttcaaatagttggctaaattttatgatctctcccgttgaaaagtaggtgatgattttaatgtgacatgcacaaaaaatccttgccagtttacttctgcaatttaattttagcctttactaattacccacttctgtttaattccaatttttaacagcaggtacataaagcattatgtgcacaatgg

SEQ ID NO: 12263 - protein, 847 aa, Homo sapiens; identical to SEQ ID NO: 1173

SEQ ID NO: 12264 - DNA, 5058 bp, Homo sapiens
ggccgccatgttaggagcgcagtggcggcgcaaccagccttctagggcggcggagagttgtctgctggttctcagcttgaagaagattctgcagtccttattgatcctttttcttggcgttaccatttttgaagcaaagttaacctagctttctagtttgagctttctttttggccgtctttaaaaaaatttttttttttaatctataaaatagacaagagctagttctacaatgtccaagtcattccagcagtcatctctcagtagggactcacagggtcatgggcgtgacctgtctgcggcaggaataggccttcttgctgctgctacccagtctttaagtatgccagcatctcttggaaggatgaaccagggtactgcacgccttgctagtttaatgaatcttggaatgagttcttcattgaatcaacaaggagctcatagtgcactgtcttctgctagtacttcttcccataatttgcagtctatatttaacattggaagtagaggtccactccctttatcttctcaacaccgtggagatgcagaccaggccagtaacattttggccagctttggtctgtctgctagagacttagatgaactgagtcgttatccagaggacaagattactcctgagaatttgccccaaatccttctacagcttaaaaggaggagaactgaagaaggccctaccttgagttatggtagagatggcagatctgctacacgggagccaccatacagagtacctagggatgattgggaagaaaaaaggcactttagaagagatagttttgatgatcgtggtcctagtctcaacccagtgcttgattatgaccatggaagtcgttctcaagaatctggttattatgacagaatggattatgaagatgacagattaagagatggagaaaggtgtagggatgattctttttttggtgagacctcgcataactatcataaatttgacagtgagtatgagagaatgggacgtggtcctggccccttacaagagagatctctctttgagaaaaagagaggcgctcctccaagtagcaatattgaagacttccatggactcttaccgaagggttatccccatctgtgctctatatgtgatttgccagttcattctaataaggagtggagtcaacatatcaatggagcaagtcacagtcgtcgatgccagcttcttcttgaaatctacccagaatggaatcctgacaatgatacaggacacacaatgggtgatccattcatgttgcagcagtctacaaatccagcaccaggaattctgggacctccacctccctcatttcatcttgggggaccagcagttggaccaagaggaaatctgggtgctggaaatggaaacctgcaaggacctagacacatgcagaaaggcagagtggaaactagcagagttgttcacatcatggattttcaacgagggaaaaacttgagataccagctattacagctggtagaaccatttggagtcatttcaaatcatctgattctaaataaaattaatgaggcatttattgaaatggcaaccacagaggatgctcaggccgcagtggattattacacaaccacaccagcgttagtatttggcaagccagtgagagttcatttatcccagaagtataaaagaataaagaaacctgaaggaaagccagatcagaagtttgatcaaaagcaagagcttggacgtgtgatacatctcagcaatttgccgcattctggctattctgatagtgctgttctcaagcttgctgagccttatgggaaaataaagaattacatattgatgaggatgaaaagtcaggcttttattgagatggagacaagagaagatgcaatggcaatggttgaccattgtttgaaaaaagccctttggtttcaggggagatgtgtgaaggttgacctgtctgagaaatataaaaaactggttctgaggattccaaacagaggcattgatttactgaaaaaagataaatcccgaaaaagatcttactctccagatggcaaagaatctccaagtgataagaaatccaaaactgatggttcccagaagactgagagttcaaccgaaggtaaagaacaagaagagaagtccggtgaagatggtgagaaagacacaaaggatgaccagacagagcaggaacctaatatgcttcttgaatctgaagatgagctacttgtagatgaagaagaagcagcagcactgctagaaagtggcagttcagtgggagacgagaccgatcttgctaatttaggtgatgtggcttctgatgggaaaaaggaaccatcagataaagctgtgaaaaaagatggaagtgcttcagcagcagcaaagaaaaagcttaaaaaggtggacaagatcgaggaacttgatcaagaaaacgaagcagcgttggaaaatggaattaaaaatgaggaaaacacagaaccaggtgctgaatcttctgagaacgctgatgatcccaacaaagatacaagtgaaaacgcagatggtcaaagtgatgagaacaaggacgactatacaatcccagatgagtatagaattggaccatatcagcccaatgttcctgttggtatagactatgtgatacctaaaacagggttttactgtaagctgtgttcactcttttatacaaatgaagaagttgcaaagaatactcattgcagcagccttcctcattatcagaaattaaagaaatttctgaataaattggcagaagaacgcagacagaagaaggaaacttaagatgtgcaaggagatttaatgatttcaaagaaaataatggttctttgtttttaatgttaaccttttttaaatacaatactgatagttagaagaaaactattgtactcttttgttttagtggagaaataatagatgtctgttcatgtgttaagtgttatagcaaaaaaaatacacatatggttaagttaatgaatagtttttgttttatcagaatggcaacagacagaagtactttgtagagattgacttcctaagctacttaagacaacttgcaccactaagaaaaaaatgtagaaccatttggaaaaatgaaatttagtagttccaagtttcaaagaaatgtcaacattttattccattcaataaagaacaaaaccaatagtgtttttattactttcatctgaaacattccatgttttaatctgagccttgcagactttcatttggagtttgaacccgttttggttgcatttcatttttggagaacttaattaacgtgagattggcaattgaaatgcaggtgcagttttctgttaatgtcatgctgttgtttaggtaataagaaatattaagtaattggctttagattttgtaatttttttccctgagttcctgctagatttcgtattctagtagtcaatgtattttcagtgaaatgcaaaaatattcccgttatctttgaccagtattaatttttgagatcttactgcttgtcacttgaatcccgtgattgtcatacatctctggtataagcaacatttgatttttgaagtgtgtagaccatctcttcatattttcaagatgtaattttacatttctgcatttttaaaacagtttggccataatcctagatgcacgcttctaattcatgtacctgcacatgtgacctttgtgaacagaaatttgcatgtataatttgtgtttacttgtaactttctggttatatactgcttatatctgtggattcaagttactgaagtgaataccaataaaaagaaaaccctaggccatgttaattggttatacatgtttggaatgttaaccaacgtatttgtcagttgtggtttttattcgctcttaaactttgtgcatgctttaacaatttattacttttaaatctagagtgaattctaaagactgccgctaaagatctgagttttaaaaatgttgttgctggtggatttcttgttcctgttacataactaaaagtgaggccatttgtggtttttaaaaaccttatgaattaaaaatgctacaggtgaacaaacagaagcttatgtttagagatattgatgacttaacagtacaattggaagtaatacggatgagcaagaattagttctgcagcttttcaaaataattacgtagagactcttggtatattggattatctgttgtaaacaatttttttttcttccctgacacagggtctcactctgtcacccagactggagtgcagtggcacagttctctgcaacctcagcctttgggctcaaatgaccctcctacctcagtctcctgagtagctgggactacaggctcatgccactatacctggctagtttttggtttttttgtatagatggggctttgccatgttgcccaggttgatcttgaattcctgggcccaagtgatctgctcgcttcagcctcccaaagtgctgggactgtaggcatgagccaccatccctggccaagaaacaaagttttaatttcaaaaaaatctacaaaaacaggataggcattgtctttcaaatgttcagaccccagtttattaaaggatacttcaaatagttggctaaattttatgatctctcccgttgaaaagtaggtgatgattttaatgtgacatgcacaaaaaatccttgccagtttacttctgcaatttaattttagcctttactaattacccacttctgtttaattccaatttttaacagcaggtacataaagcattatgtgcacaatggagttcttcagtgtttcctttcagtgatggctttttcatagcttcaactttgttggatttagcaagttgaaggaaagaatgctatgtttttaatacctacatttgagagcatttagaaatcagaaattataataagctgttagtgataaatctgtaacagcccttcgattacgagaaaacctctttttagtaggaatgtttccactcatgtttgctgtaaagtttaagaacatttttcctacggctatgtcagcccttagtttaatcttacattatcctacaaaagtgaatgaaacttctagaagtaccttga

SEQ ID NO: 12265 - protein, 847 aa, Homo sapiens; identical to SEQ ID NO: 1173

SEQ ID NO: 12266 - DNA, 3811 bp, Homo sapiens
gcataagtttttttttcttaaaaaaacggcatctgcttaaagggatttatgactaaaattgcttatttttctacagagttgtctgctggttctcagcttgaagaagattctgcagtccttattgatcctttttcttggcgttaccatttttgaagcaaagttaacctagctttctagtttgagctttctttttggccgtctttaaaaaaatttttttttttaatctataaaatagacaagagctagttctacaatgtccaagtcattccagcagtcatctctcagtagggactcacagggtcatgggcgtgacctgtctgcggcaggaataggccttcttgctgctgctacccagtctttaagtatgccagcatctcttggaaggatgaaccagggtactgcacgccttgctagtttaatgaatcttggaatgagttcttcattgaatcaacaaggagctcatagtgcactgtcttctgctagtacttcttcccataatttgcagtctatatttaacattggaagtagaggtccactccctttatcttctcaacaccgtggagatgcagaccaggccagtaacattttggccagctttggtctgtctgctagagacttagatgaactgagtcgttatccagaggacaagattactcctgagaatttgccccaaatccttctacagcttaaaaggaggagaactgaagaaggccctaccttgagttatggtagagatggcagatctgctacacgggagccaccatacagagtacctagggatgattgggaagaaaaaaggcactttagaagagatagttttgatgatcgtggtcctagtctcaacccagtgcttgattatgaccatggaagtcgttctcaagaatctggttattatgacagaatggattatgaagatgacagattaagagatggagaaaggtgtagggatgattctttttttggtgagacctcgcataactatcataaatttgacagtgagtatgagagaatgggacgtggtcctggccccttacaagagagatctctctttgagaaaaagagaggcgctcctccaagtagcaatattgaagacttccatggactcttaccgaagggttatccccatctgtgctctatatgtgatttgccagttcattctaataaggagtggagtcaacatatcaatggagcaagtcacagtcgtcgatgccagcttcttcttgaaatctacccagaatggaatcctgacaatgatacaggacacacaatgggtgatccattcatgttgcagcagtctacaaatccagcaccaggaattctgggacctccacctccctcatttcatcttgggggaccagcagttggaccaagaggaaatctgggtgctggaaatggaaacctgcaaggacctagacacatgcagaaaggcagagtggaaactagcagagttgttcacatcatggattttcaacgagggaaaaacttgagataccagctattacagctggtagaaccatttggagtcatttcaaatcatctgattctaaataaaattaatgaggcatttattgaaatggcaaccacagaggatgctcaggccgcagtggattattacacaaccacaccagcgttagtatttggcaagccagtgagagttcatttatcccagaagtataaaagaataaagaaacctgaaggaaagccagatcagaagtttgatcaaaagcaagagcttggacgtgtgatacatctcagcaatttgccgcattctggctattctgatagtgctgttctcaagcttgctgagccttatgggaaaataaagaattacatattgatgaggatgaaaagtcaggcttttattgagatggagacaagagaagatgcaatggcaatggttgaccattgtttgaaaaaagccctttggtttcaggggagatgtgtgaaggttgacctgtctgagaaatataaaaaactggttctgaggattccaaacagaggcattgatttactgaaaaaagataaatcccgaaaaagatcttactctccagatggcaaagaatctccaagtgataagaaatccaaaactgatggttcccagaagactgagagttcaaccgaaggtaaagaacaagaagagaagtccggtgaagatggtgagaaagacacaaaggatgaccagacagagcaggaacctaatatgcttcttgaatctgaagatgagctacttgtagatgaagaagaagcagcagcactgctagaaagtggcagttcagtgggagacgagaccgatcttgctaatttaggtgatgtggcttctgatgggaaaaaggaaccatcagataaagctgtgaaaaaagatggaagtgcttcagcagcagcaaagaaaaagcttaaaaaggtggacaagatcgaggaacttgatcaagaaaacgaagcagcgttggaaaatggaattaaaaatgaggaaaacacagaaccaggtgctgaatcttctgagaacgctgatgatcccaacaaagatacaagtgaaaacgcagatggtcaaagtgatgagaacaaggacgactatacaatcccagatgagtatagaattggaccatatcagcccaatgttcctgttggtatagactatgtgatacctaaaacagggttttactgtaagctgtgttcactcttttatacaaatgaagaagttgcaaagaatactcattgcagcagccttcctcattatcagaaattaaagaaatttctgaataaattggcagaagaacgcagacagaagaaggaaacttaagatgtgcaaggagatttaatgatttcaaagaaaataatggttctttgtttttaatgttaaccttttttaaatacaatactgatagttagaagaaaactattgtactcttttgttttagtggagaaataatagatgtctgttcatgtgttaagtgttatagcaaaaaaaatacacatatggttaagttaatgaatagtttttgttttatcagaatggcaacagacagaagtactttgtagagattgacttcctaagctacttaagacaacttgcaccactaagaaaaaaatgtagaaccatttggaaaaatgaaatttagtagttccaagtttcaaagaaatgtcaacattttattccattcaataaagaacaaaaccaatagtgtttttattactttcatctgaaacattccatgttttaatctgagccttgcagactttcatttggagtttgaacccgttttggttgcatttcatttttggagaacttaattaacgtgagattggcaattgaaatgcaggtgcagttttctgttaatgtcatgctgttgtttaggtaataagaaatattaagtaattggctttagattttgtaatttttttccctgagttcctgctagatttcgtattctagtagtcaatgtattttcagtgaaatgcaaaaatattcccgttatctttgaccagtattaatttttgagatcttactgcttgtcacttgaatcccgtgattgtcatacatctctggtataagcaacatttgatttttgaagtgtgtagaccatctcttcatattttcaagatgtaattttacatttctgcatttttaaaacagtttggccataatcctagatgcacgcttctaattcatgtacctgcacatgtgacctttgtgaacagaaatttgcatgtataatttgtgtttacttgtaactttctggttatatactgcttatatctgtggattcaagttactgaagtgaataccaataaaaagaaaaccctaggccatgtt

SEQ ID NO: 12267 - protein, 847 aa, Homo sapiens; identical to SEQ ID NO: 1173

SEQ ID NO: 12268 - DNA, 2201 bp, Homo sapiens
cagagttgtctgctggttctcagcttgaagaagattctgcagtccttattgatcctttttcttggcgttaccatttttgaagcaaagttaacctagctttctagtttgagctttctttttggccgtctttaaaaaaatttttttttttaatctataaaatagacaagagctagttctacaatgtccaagtcattccagcagtcatctctcagtagggactcacagggtcatgggcgtgacctgtctgcggcaggaataggccttcttgctgctgctacccagtctttaagtatgccagcatctcttggaaggatgaaccagggtactgcacgccttgctagtttaatgaatcttggaatgagttcttcattgaatcaacaaggagctcatagtgcactgtcttctgctagtacttcttcccataatttgcagtctatatttaacattggaagtagaggtccactccctttatcttctcaacaccgtggagatgcagaccaggccagtaacattttggccagctttggtctgtctgctagagacttagatgaactgagtcgttatccagaggacaagattactcctgagaatttgccccaaatccttctacagcttaaaaggaggagaactgaagaaggccctaccttgagttatggtagagatggcagatctgctacacgggagccaccatacagagtacctagggatgattgggaagaaaaaaggcactttagaagagatagttttgatgatcgtggtcctagtctcaacccagtgcttgattatgaccatggaagtcgttctcaagaatctggttattatgacagaatggattatgaaagatctctctttgagaaaaagagaggcgctcctccaagtagcaatattgaagacttccatggactcttaccgaagggttatccccatctgtgctctatatgtgatttgccagttcattctaataaggagtggagtcaacatatcaatggagcaagtcacagtcgtcgatgccagcttcttcttgaaatgtaggagtttgaaatacctttaaaacatccttatcgtgaatcagaatcagccattattggtttttgggagttcatcatttacttgtaatatccacaatgttaatatcacatagtggtactgtatggacaatactatttacaagtaaaatgtttagatctggaaatttcatattgaatattagatgcagtaataatattttgttatttaacatttctaggatacatatatattggtcattatacaaattggtgatttttactagacatagtgaaagatagtatttgatatgtagagtggattaaacagtagcatttttaataatacatgctctaaaaatgtaaaagatacggaaaagagggtaggttattaaaagattctaattcattgtccagcaaaatccttggtgatgaattttttttttttttttgcttttgagatctttggttttgagttcaggctgctaccatgaaatggaattcctaaagaaactccctgcttaagcagcacacagtgcccattgttcactggagttggaattttcacatatgcctaactctgttggggctattctttctttctaatgtcacaactcaactgtgctcttggtattaatattggagaaggaaaatctgtgctctgttcttgtttctatgtaacccacatttctaattctttgtgcggcacttcctccttacaatttaacaaatagaggaaaaacttaatttcaacattatctgcatttgcaagcaatacaaaacaagtttattctcgtggattattttgaagttctgaaatttttcttttgaaatatctattggaaatgctttaaaactatgtttctaacacttagactctcagataactttactaataaatgatctctattttagaggccaaacaaggctgttttgtgaaaaggacagttttattttaaagttaattttctggtctttttaaagctacccagaatggaatcctgacaatgatacaggacacacaatgtaagttaaattttttaagctaccatttgtaaaggagatcaatgtaaggaattcaggtttcactttcaacatttcataaacaaagtattttcagaatttctttactgaaaatgagactttgataaaattcactttggttaacaatttttagaatatatattatgtagtaat

SEQ ID NO: 12269 - protein, 283 aa, Homo sapiens
MSKSFQQSSLSRDSQGHGRDLSAAGIGLLAAATQSLSMPASLGRMNQGTARLASLMNLGMSSSLNQQGAHSALSSASTSSHNLQSIFNIGSRGPLPLSSQHRGDADQASNILASFGLSARDLDELSRYPEDKITPENLPQILLQLKRRRTEEGPTLSYGRDGRSATREPPYRVPRDDWEEKRHFRRDSFDDRGPSLNPVLDYDHGSRSQESGYYDRMDYERSLFEKKRGAPPSSNIEDFHGLLPKGYPHLCSICDLPVHSNKEWSQHINGASHSRRCQLLLEM

SEQ ID NO: 12270 - DNA, 2327 bp, Homo sapiens
cagagttgtctgctggttctcagcttgaagaagattctgcagtccttattgatcctttttcttggcgttaccatttttgaagcaaagttaacctagctttctagtttgagctttctttttggccgtctttaaaaaaatttttttttttaatctataaaatagacaagagctagttctacaatgtccaagtcattccagcagtcatctctcagtagggactcacagggtcatgggcgtgacctgtctgcggcaggaataggccttcttgctgctgctacccagtctttaagtatgccagcatctcttggaaggatgaaccagggtactgcacgccttgctagtttaatgaatcttggaatgagttcttcattgaatcaacaaggagctcatagtgcactgtcttctgctagtacttcttcccataatttgcagtctatatttaacattggaagtagaggtccactccctttatcttctcaacaccgtggagatgcagaccaggccagtaacattttggccagctttggtctgtctgctagagacttagatgaactgagtcgttatccagaggacaagattactcctgagaatttgccccaaatccttctacagcttaaaaggaggagaactgaagaaggccctaccttgagttatggtagagatggcagatctgctacacgggagccaccatacagagtacctagggatgattgggaagaaaaaaggcactttagaagagatagttttgatgatcgtggtcctagtctcaacccagtgcttgattatgaccatggaagtcgttctcaagaatctggttattatgacagaatggattatgaagatgacagattaagagatggagaaaggtgtagggatgattctttttttggtgagacctcgcataactatcataaatttgacagtgagtatgagagaatgggacgtggtcctggccccttacaagagagatctctctttgagaaaaagagaggcgctcctccaagtagcaatattgaagacttccatggactcttaccgaagggttatccccatctgtgctctatatgtgatttgccagttcattctaataaggagtggagtcaacatatcaatggagcaagtcacagtcgtcgatgccagcttcttcttgaaatgtaggagtttgaaatacctttaaaacatccttatcgtgaatcagaatcagccattattggtttttgggagttcatcatttacttgtaatatccacaatgttaatatcacatagtggtactgtatggacaatactatttacaagtaaaatgtttagatctggaaatttcatattgaatattagatgcagtaataatattttgttatttaacatttctaggatacatatatattggtcattatacaaattggtgatttttactagacatagtgaaagatagtatttgatatgtagagtggattaaacagtagcatttttaataatacatgctctaaaaatgtaaaagatacggaaaagagggtaggttattaaaagattctaattcattgtccagcaaaatccttggtgatgaattttttttttttttttgcttttgagatctttggttttgagttcaggctgctaccatgaaatggaattcctaaagaaactccctgcttaagcagcacacagtgcccattgttcactggagttggaattttcacatatgcctaactctgttggggctattctttctttctaatgtcacaactcaactgtgctcttggtattaatattggagaaggaaaatctgtgctctgttcttgtttctatgtaacccacatttctaattctttgtgcggcacttcctccttacaatttaacaaatagaggaaaaacttaatttcaacattatctgcatttgcaagcaatacaaaacaagtttattctcgtggattattttgaagttctgaaatttttcttttgaaatatctattggaaatgctttaaaactatgtttctaacacttagactctcagataactttactaataaatgatctctattttagaggccaaacaaggctgttttgtgaaaaggacagttttattttaaagttaattttctggtctttttaaagctacccagaatggaatcctgacaatgatacaggacacacaatgtaagttaaattttttaagctaccatttgtaaaggagatcaatgtaaggaattcaggtttcactttcaacatttcataaacaaagtattttcagaatttctttactgaaaatgagactttgataaaattcactttggttaacaatttttagaatatatattatgtagtaat

SEQ ID NO: 12271 - protein, 325 aa, Homo sapiens
MSKSFQQSSLSRDSQGHGRDLSAAGIGLLAAATQSLSMPASLGRMNQGTARLASLMNLGMSSSLNQQGAHSALSSASTSSHNLQSIFNIGSRGPLPLSSQHRGDADQASNILASFGLSARDLDELSRYPEDKITPENLPQILLQLKRRRTEEGPTLSYGRDGRSATREPPYRVPRDDWEEKRHFRRDSFDDRGPSLNPVLDYDHGSRSQESGYYDRMDYEDDRLRDGERCRDDSFFGETSHNYHKFDSEYERMGRGPGPLQERSLFEKKRGAPPSSNIEDFHGLLPKGYPHLCSICDLPVHSNKEWSQHINGASHSRRCQLLLEM

SEQ ID NO: 12272 - DNA, 3773 bp, Homo sapiens
cagagttgtctgctggttctcagcttgaagaagattctgcagtccttattgatcctttttcttggcgttaccatttttgaagcaaagttaacctagctttctagtttgagctttctttttggccgtctttaaaaaaatttttttttttaatctataaaatagacaagagctagttctacaatgtccaagtcattccagcagtcatctctcagtagggactcacagggtcatgggcgtgacctgtctgcggcaggaataggccttcttgctgctgctacccagtctttaagtatgccagcatctcttggaaggatgaaccagggtactgcacgccttgctagtttaatgaatcttggaatgagttcttcattgaatcaacaaggagctcatagtgcactgtcttctgctagtacttcttcccataatttgcagtctatatttaacattggaagtagaggtccactccctttatcttctcaacaccgtggagatgcagaccaggccagtaacattttggccagctttggtctgtctgctagagacttagatgaactgagtcgttatccagaggacaagattactcctgagaatttgccccaaatccttctacagcttaaaaggaggagaactgaagaaggccctaccttgagttatggtagagatggcagatctgctacacgggagccaccatacagagtacctagggatgattgggaagaaaaaaggcactttagaagagatagttttgatgatcgtggtcctagtctcaacccagtgcttgattatgaccatggaagtcgttctcaagaatctggttattatgacagaatggattatgaagatgacagattaagagatggagaaaggtgtagggatgattctttttttggtgagacctcgcataactatcataaatttgacagtgagtatgagagaatgggacgtggtcctggccccttacaagagagatctctctttgagaaaaagagaggcgctcctccaagtagcaatattgaagacttccatggactcttaccgaagggttatccccatctgtgctctatatgtgatttgccagttcattctaataaggagtggagtcaacatatcaatggagcaagtcacagtcgtcgatgccagcttcttcttgaaatctacccagaatggaatcctgacaatgatacaggacacacaatgggtgatccattcatgttgcagcagtctacaaatccagcaccaggaattctgggacctccacctccctcatttcatcttgggggaccagcagttggaccaagaggaaatctgggtgctggaaatggaaacctgcaaggacctagacacatgcagaaaggcagagtggaaactagcagagttgttcacatcatggattttcaacgagggaaaaacttgagataccagctattacagctggtagaaccatttggagtcatttcaaatcatctgattctaaataaaattaatgaggcatttattgaaatggcaaccacagaggatgctcaggccgcagtggattattacacaaccacaccagcgttagtatttggcaagccagtgagagttcatttatcccagaagtataaaagaataaagaaacctgaaggaaagccagatcagaagtttgatcaaaagcaagagcttggacgtgtgatacatctcagcaatttgccgcattctggctattctgatagtgctgttctcaagcttgctgagccttatgggaaaataaagaattacatattgatgaggatgaaaagtcaggcttttattgagatggagacaagagaagatgcaatggcaatggttgaccattgtttgaaaaaagccctttggtttcaggggagatgtgtgaaggttgacctgtctgagaaatataaaaaactggttctgaggattccaaacagaggcattgatttactgaaaaaagataaatcccgaaaaagatcttactctccagatggcaaagaatctccaagtgataagaaatccaaaactgatggttcccagaagactgagagttcaaccgaaggtaaagaacaagaagagaagtccggtgaagatggtgagaaagacacaaaggatgaccagacagagcaggaacctaatatgcttcttgaatctgaagatgagctacttgtagatgaagaagaagcagcagcactgctagaaagtggcagttcagtgggagacgagaccgatcttgctaatttaggtgatgtggcttctgatgggaaaaaggaaccatcagataaagctgtgaaaaaagatggaagtgcttcagcagcagcaaagaaaaagcttaaaaaggtggacaagatcgaggaacttgatcaagaaaacgaagcagcgttggaaaatggaattaaaaatgaggaaaacacagaaccaggtgctgaatcttctgagaacgctgatgatcccaacaaagatacaagtgaaaacgcagatggtcaaagtgatgagaacaaggacgactatacaatcccagatgagtatagaattggaccatatcagcccaatgttcctgttggtatagactatgtgatacctaaaacagggttttactgtaagctgtgttcactcttttatacaaatgaagaagttgcaaagaatactcattgcagcagccttcctcattatcagaaattaaagaaatttctgaataaattggcagaagaacgcagacagaagaaggaaacttaagatgtgcaaggagatttaatgatttcaaagaaaataatggttctttgtttttaatgttaaccttttttaaatacaatactgatagttagaagaaaactattgtactcttttgttttagtggagaaataatagatgtctgttcatgtgttaagtgttatagcaaaaaaaatacacatatggttaagttaatgaatagtttttgttttatcagaatggcaacagacagaagtactttgtagagattgacttcctaagctacttaagacaacttgcaccactaagaaaaaaatgtagaaccatttggaaaaatgaaatttagtagttccaagtttcaaagaaatgtcaacattttattccattcaataaagaacaaaaccaatagtgtttttattactttcatctgaaacattccatgttttaatctgagccttgcagactttcatttggagtttgaacccgttttggttgcatttcatttttggagaacttaattaacgtgagattggcaattgaaatgcaggtgcagttttctgttaatgtcatgctgttgtttaggtaataagaaatattaagtaattggctttagattttgtaatttttttccctgagttcctgctagatttcgtattctagtagtcaatgtattttcagtgaaatgcaaaaatattcccgttatctttgaccagtattaatttttgagatcttactgcttgtcacttgaatcccgtgattgtcatacatctctggtataagcaacatttgatttttgaagtgtgtagaccatctcttcatattttcaagatgtaattttacatttctgcatttttaaaacagtttggccataatcctagatgcacgcttctaattcatgtacctgcacatgtgacctttgtgaacagaaatttgcatgtataatttgtgtttacttgtaactttctggttatatactgcttatatctgtggattcaagttactgaagtgaataccaataaaaagaaaaccctaggccatgttaattggttatacatgtttggaatgttaaccaacgt

SEQ ID NO: 12273 - protein, 847 aa, Homo sapiens; identical to SEQ ID NO: 1173

SEQ ID NO: 12274 - DNA, 4694 bp, Homo sapiens
cagagttgtctgctggttctcagcttgaagaagattctgcagtccttattgatcctttttcttggcgttaccatttttgaagcaaagttaacctagctttctagtttgagctttctttttggccgtctttaaaaaaatttttttttttaatctataaaatagacaagagctagttctacaatgtccaagtcattccagcagtcatctctcagtagggactcacagggtcatgggcgtgacctgtctgcggcaggaataggccttcttgctgctgctacccagtctttaagtatgccagcatctcttggaaggatgaaccagggtactgcacgccttgctagtttaatgaatcttggaatgagttcttcattgaatcaacaaggagctcatagtgcactgtcttctgctagtacttcttcccataatttgcagtctatatttaacattggaagtagaggtccactccctttatcttctcaacaccgtggagatgcagaccaggccagtaacattttggccagctttggtctgtctgctagagacttagatgaactgagtcgttatccagaggacaagattactcctgagaatttgccccaaatccttctacagcttaaaaggaggagaactgaagaaggccctaccttgagttatggtagagatggcagatctgctacacgggagccaccatacagagtacctagggatgattgggaagaaaaaaggcactttagaagagatagttttgatgatcgtggtcctagtctcaacccagtgcttgattatgaccatggaagtcgttctcaagaatctggttattatgacagaatggattatgaagatgacagattaagagatggagaaaggtgtagggatgattctttttttggtgagacctcgcataactatcataaatttgacagtgagtatgagagaatgggacgtggtcctggccccttacaagagagatctctctttgagaaaaagagaggcgctcctccaagtagcaatattgaagacttccatggactcttaccgaagggttatccccatctgtgctctatatgtgatttgccagttcattctaataaggagtggagtcaacatatcaatggagcaagtcacagtcgtcgatgccagcttcttcttgaaatctacccagaatggaatcctgacaatgatacaggacacacaatgggtgatccattcatgttgcagcagtctacaaatccagcaccaggaattctgggacctccacctccctcatttcatcttgggggaccagcagttggaccaagaggaaatctgggtgctggaaatggaaacctgcaaggacctagacacatgcagaaaggcagagtggaaactagcagagttgttcacatcatggattttcaacgagggaaaaacttgagataccagctattacagctggtagaaccatttggagtcatttcaaatcatctgattctaaataaaattaatgaggcatttattgaaatggcaaccacagaggatgctcaggccgcagtggattattacacaaccacaccagcgttagtatttggcaagccagtgagagttcatttatcccagaagtataaaagaataaagaaacctgaaggaaagccagatcagaagtttgatcaaaagcaagagcttggacgtgtgatacatctcagcaatttgccgcattctggctattctgatagtgctgttctcaagcttgctgagccttatgggaaaataaagaattacatattgatgaggatgaaaagtcaggcttttattgagatggagacaagagaagatgcaatggcaatggttgaccattgtttgaaaaaagccctttggtttcaggggagatgtgtgaaggttgacctgtctgagaaatataaaaaactggttctgaggattccaaacagaggcattgatttactgaaaaaagataaatcccgaaaaagatcttactctccagatggcaaagaatctccaagtgataagaaatccaaaactgatggttcccagaagactgagagttcaaccgaaggtaaagaacaagaagagaagtccggtgaagatggtgagaaagacacaaaggatgaccagacagagcaggaacctaatatgcttcttgaatctgaagatgagctacttgtagatgaagaagaagcagcagcactgctagaaagtggcagttcagtgggagacgagaccgatcttgctaatttaggtgatgtggcttctgatgggaaaaaggaaccatcagataaagctgtgaaaaaagatggaagtgcttcagcagcagcaaagaaaaagcttaaaaaggtggacaagatcgaggaacttgatcaagaaaacgaagcagcgttggaaaatggaattaaaaatgaggaaaacacagaaccaggtgctgaatcttctgagaacgctgatgatcccaacaaagatacaagtgaaaacgcagatggtcaaagtgatgagaacaaggacgactatacaatcccagatgagtatagaattggaccatatcagcccaatgttcctgttggtatagactatgtgatacctaaaacagggttttactgtaagctgtgttcactcttttatacaaatgaagaagttgcaaagaatactcattgcagcagccttcctcattatcagaaattaaagaaatttctgaataaattggcagaagaacgcagacagaagaaggaaacttaagatgtgcaaggagatttaatgatttcaaagaaaataatggttctttgtttttaatgttaaccttttttaaatacaatactgatagttagaagaaaactattgtactcttttgttttagtggagaaataatagatgtctgttcatgtgttaagtgttatagcaaaaaaaatacacatatggttaagttaatgaatagtttttgttttatcagaatggcaacagacagaagtactttgtagagattgacttcctaagctacttaagacaacttgcaccactaagaaaaaaatgtagaaccatttggaaaaatgaaatttagtagttccaagtttcaaagaaatgtcaacattttattccattcaataaagaacaaaaccaatagtgtttttattactttcatctgaaacattccatgttttaatctgagccttgcagactttcatttggagtttgaacccgttttggttgcatttcatttttggagaacttaattaacgtgagattggcaattgaaatgcaggtgcagttttctgttaatgtcatgctgttgtttaggtaataagaaatattaagtaattggctttagattttgtaatttttttccctgagttcctgctagatttcgtattctagtagtcaatgtattttcagtgaaatgcaaaaatattcccgttatctttgaccagtattaatttttgagatcttactgcttgtcacttgaatcccgtgattgtcatacatctctggtataagcaacatttgatttttgaagtgtgtagaccatctcttcatattttcaagatgtaattttacatttctgcatttttaaaacagtttggccataatcctagatgcacgcttctaattcatgtacctgcacatgtgacctttgtgaacagaaatttgcatgtataatttgtgtttacttgtaactttctggttatatactgcttatatctgtggattcaagttactgaagtgaataccaataaaaagaaaaccctaggccatgttaattggttatacatgtttggaatgttaaccaacgtatttgtcagttgtggtttttattcgctcttaaactttgtgcatgctttaacaatttattacttttaaatctagagtgaattctaaagactgccgctaaagatctgagttttaaaaatgttgttgctggtggatttcttgttcctgttacataactaaaagtgaggccatttgtggtttttaaaaaccttatgaattaaaaatgctacaggtgaacaaacagaagcttatgtttagagatattgatgacttaacagtacaattggaagtaatacggatgagcaagaattagttctgcagcttttcaaaataattacgtagagactcttggtatattggattatctgttgtaaacaatttttttttcttccctgacacagggtctcactctgtcacccagactggagtgcagtggcacagttctctgcaacctcagcctttgggctcaaatgaccctcctacctcagtctcctgagtagctgggactacaggctcatgccactatacctggctagtttttggtttttttgtatagatggggctttgccatgttgcccaggttgatcttgaattcctgggcccaagtgatctgctcgcttcagcctcccaaagtgctgggactgtaggcatgagccaccatccctggccaagaaacaaagttttaatttcaaaaaaatctacaaaaacaggataggcattgtctttcaaatgttcagaccccagtttattaaaggatacttcaaatagttggctaaattttatgatctctcccgttgaaaagtaggtgatgattttaatgtgacatgcacaaaaaatccttgccagtttacttctgcaatttaattttagcctttactaattacccacttctgtttaattccaatttttaacagcaggtacataaagcattatgtgcacaatgg

SEQ ID NO: 12275 - protein, 847 aa, Homo sapiens; identical to SEQ ID NO: 1173

SEQ ID NO: 12276 - DNA, 5006 bp, Homo sapiens
cagagttgtctgctggttctcagcttgaagaagattctgcagtccttattgatcctttttcttggcgttaccatttttgaagcaaagttaacctagctttctagtttgagctttctttttggccgtctttaaaaaaatttttttttttaatctataaaatagacaagagctagttctacaatgtccaagtcattccagcagtcatctctcagtagggactcacagggtcatgggcgtgacctgtctgcggcaggaataggccttcttgctgctgctacccagtctttaagtatgccagcatctcttggaaggatgaaccagggtactgcacgccttgctagtttaatgaatcttggaatgagttcttcattgaatcaacaaggagctcatagtgcactgtcttctgctagtacttcttcccataatttgcagtctatatttaacattggaagtagaggtccactccctttatcttctcaacaccgtggagatgcagaccaggccagtaacattttggccagctttggtctgtctgctagagacttagatgaactgagtcgttatccagaggacaagattactcctgagaatttgccccaaatccttctacagcttaaaaggaggagaactgaagaaggccctaccttgagttatggtagagatggcagatctgctacacgggagccaccatacagagtacctagggatgattgggaagaaaaaaggcactttagaagagatagttttgatgatcgtggtcctagtctcaacccagtgcttgattatgaccatggaagtcgttctcaagaatctggttattatgacagaatggattatgaagatgacagattaagagatggagaaaggtgtagggatgattctttttttggtgagacctcgcataactatcataaatttgacagtgagtatgagagaatgggacgtggtcctggccccttacaagagagatctctctttgagaaaaagagaggcgctcctccaagtagcaatattgaagacttccatggactcttaccgaagggttatccccatctgtgctctatatgtgatttgccagttcattctaataaggagtggagtcaacatatcaatggagcaagtcacagtcgtcgatgccagcttcttcttgaaatctacccagaatggaatcctgacaatgatacaggacacacaatgggtgatccattcatgttgcagcagtctacaaatccagcaccaggaattctgggacctccacctccctcatttcatcttgggggaccagcagttggaccaagaggaaatctgggtgctggaaatggaaacctgcaaggacctagacacatgcagaaaggcagagtggaaactagcagagttgttcacatcatggattttcaacgagggaaaaacttgagataccagctattacagctggtagaaccatttggagtcatttcaaatcatctgattctaaataaaattaatgaggcatttattgaaatggcaaccacagaggatgctcaggccgcagtggattattacacaaccacaccagcgttagtatttggcaagccagtgagagttcatttatcccagaagtataaaagaataaagaaacctgaaggaaagccagatcagaagtttgatcaaaagcaagagcttggacgtgtgatacatctcagcaatttgccgcattctggctattctgatagtgctgttctcaagcttgctgagccttatgggaaaataaagaattacatattgatgaggatgaaaagtcaggcttttattgagatggagacaagagaagatgcaatggcaatggttgaccattgtttgaaaaaagccctttggtttcaggggagatgtgtgaaggttgacctgtctgagaaatataaaaaactggttctgaggattccaaacagaggcattgatttactgaaaaaagataaatcccgaaaaagatcttactctccagatggcaaagaatctccaagtgataagaaatccaaaactgatggttcccagaagactgagagttcaaccgaaggtaaagaacaagaagagaagtccggtgaagatggtgagaaagacacaaaggatgaccagacagagcaggaacctaatatgcttcttgaatctgaagatgagctacttgtagatgaagaagaagcagcagcactgctagaaagtggcagttcagtgggagacgagaccgatcttgctaatttaggtgatgtggcttctgatgggaaaaaggaaccatcagataaagctgtgaaaaaagatggaagtgcttcagcagcagcaaagaaaaagcttaaaaaggtggacaagatcgaggaacttgatcaagaaaacgaagcagcgttggaaaatggaattaaaaatgaggaaaacacagaaccaggtgctgaatcttctgagaacgctgatgatcccaacaaagatacaagtgaaaacgcagatggtcaaagtgatgagaacaaggacgactatacaatcccagatgagtatagaattggaccatatcagcccaatgttcctgttggtatagactatgtgatacctaaaacagggttttactgtaagctgtgttcactcttttatacaaatgaagaagttgcaaagaatactcattgcagcagccttcctcattatcagaaattaaagaaatttctgaataaattggcagaagaacgcagacagaagaaggaaacttaagatgtgcaaggagatttaatgatttcaaagaaaataatggttctttgtttttaatgttaaccttttttaaatacaatactgatagttagaagaaaactattgtactcttttgttttagtggagaaataatagatgtctgttcatgtgttaagtgttatagcaaaaaaaatacacatatggttaagttaatgaatagtttttgttttatcagaatggcaacagacagaagtactttgtagagattgacttcctaagctacttaagacaacttgcaccactaagaaaaaaatgtagaaccatttggaaaaatgaaatttagtagttccaagtttcaaagaaatgtcaacattttattccattcaataaagaacaaaaccaatagtgtttttattactttcatctgaaacattccatgttttaatctgagccttgcagactttcatttggagtttgaacccgttttggttgcatttcatttttggagaacttaattaacgtgagattggcaattgaaatgcaggtgcagttttctgttaatgtcatgctgttgtttaggtaataagaaatattaagtaattggctttagattttgtaatttttttccctgagttcctgctagatttcgtattctagtagtcaatgtattttcagtgaaatgcaaaaatattcccgttatctttgaccagtattaatttttgagatcttactgcttgtcacttgaatcccgtgattgtcatacatctctggtataagcaacatttgatttttgaagtgtgtagaccatctcttcatattttcaagatgtaattttacatttctgcatttttaaaacagtttggccataatcctagatgcacgcttctaattcatgtacctgcacatgtgacctttgtgaacagaaatttgcatgtataatttgtgtttacttgtaactttctggttatatactgcttatatctgtggattcaagttactgaagtgaataccaataaaaagaaaaccctaggccatgttaattggttatacatgtttggaatgttaaccaacgtatttgtcagttgtggtttttattcgctcttaaactttgtgcatgctttaacaatttattacttttaaatctagagtgaattctaaagactgccgctaaagatctgagttttaaaaatgttgttgctggtggatttcttgttcctgttacataactaaaagtgaggccatttgtggtttttaaaaaccttatgaattaaaaatgctacaggtgaacaaacagaagcttatgtttagagatattgatgacttaacagtacaattggaagtaatacggatgagcaagaattagttctgcagcttttcaaaataattacgtagagactcttggtatattggattatctgttgtaaacaatttttttttcttccctgacacagggtctcactctgtcacccagactggagtgcagtggcacagttctctgcaacctcagcctttgggctcaaatgaccctcctacctcagtctcctgagtagctgggactacaggctcatgccactatacctggctagtttttggtttttttgtatagatggggctttgccatgttgcccaggttgatcttgaattcctgggcccaagtgatctgctcgcttcagcctcccaaagtgctgggactgtaggcatgagccaccatccctggccaagaaacaaagttttaatttcaaaaaaatctacaaaaacaggataggcattgtctttcaaatgttcagaccccagtttattaaaggatacttcaaatagttggctaaattttatgatctctcccgttgaaaagtaggtgatgattttaatgtgacatgcacaaaaaatccttgccagtttacttctgcaatttaattttagcctttactaattacccacttctgtttaattccaatttttaacagcaggtacataaagcattatgtgcacaatggagttcttcagtgtttcctttcagtgatggctttttcatagcttcaactttgttggatttagcaagttgaaggaaagaatgctatgtttttaatacctacatttgagagcatttagaaatcagaaattataataagctgttagtgataaatctgtaacagcccttcgattacgagaaaacctctttttagtaggaatgtttccactcatgtttgctgtaaagtttaagaacatttttcctacggctatgtcagcccttagtttaatcttacattatcctacaaaagtgaatgaaacttctagaagtaccttga

SEQ ID NO: 12277 - protein, 847 aa, Homo sapiens; identical to SEQ ID NO: 1173

SEQ ID NO: 12278 - DNA, 7906 bp, Homo sapiens
aaatgagtatggatttttttttagtagactaaatcataccattgtttttaatattctgttaaagagtattaccagtcactccctttccttgtgtttggatctcagtatttttgtcttttaatctttaatctgtaccaaagtaaattaacataaatgctaaatttaggtttatttaaacatttaagaagatgtattttcattaagaaatacaaccccagactcacaaaagccagcaaattttaattggtatatgttttgggtgttaccttttcctaaatttgttggctctactaaatatatcatggaattcattttagtttctgatcagcactaaactttaaattttaggtcccgtgtgaattcatagaatgaaaaggtccattaaacactggtgactccaattttttctgcgttatttcttgcctgtttataaggaaataatagcagaaatgtcagtatgaccaatattctcagaaagggtctctaaattctgaggaaaatagatagttacaagtgtctcaaatgagagtgatgtgaagggacttaaaaaatcttcgctactggagtcattaagctgttgggacatcatgaacacaatggaaccatgagaggacttcgagaaaagtttctgtttttatgtatgattatgcttttttccttcaaattttgctactttctagttcctgaagaaggctaataacttaaatggatctaaattaacaaaagagcagtttttacatattttgatgaaactatggattcaagagtaagatacactaccctagtgcaagaggtacttttagcctgtaaaaatgcttaggtcctagctagttttggtattctgtcaaaatactgagtacatttgagaactattttagaggccttttgtttaattctgtggtttaaatgtgtaaattggaccaactttaagaagtttaaacacatggattatctgaatttctagttttctagttgctttactatgttttttacgtatatgcattatattgaaaaaatctttactcactttagcagtggaccctctataaccgctatagaaatgaccttagagaaaatttctgtgatggaagtagataatgaaaaatttttaaacatttaatcctgctctctggtattgctgcataacttggaaaatctgttctttttacttagtggtattgttaaatagtctacatgatcaaaaattcttactgtgaagtaagaaacttaagttgaaaataatttgtcatggagtgtcattatttttaggtgacttaaagtgatggtggtgtttttatttctttataggtcattttaggtcatcaaattgcttttcttttcttttctttttttctttttttttttgagacggagtttcacttttgttgcccaggctgtaatgagtgcaatggtgcgatctcggctcaccgcaacctccgcctcccaggttcaagcaattctcctgcttcagccttccgagtagctgggattacaggcatgcgccaccacgcccagctaattttatatttttagagccagggtttctccatgttggtcaggctggtcttgaactcctgacctcaggtgattcactgccttggcctcccaaagtcctgggattacaggtgtgagccatcgcacccagtcatcagattgcttttctatgcaatctcaagctttctcagcttcctttcacttaaagaaaattacccactacagcactttggctgtcttgtcacttgagtttatattaagttatacttttttctgccattctgtaagtgcttcccaaattcttttttttctctctataaggtatctcagatacatcaaggtgaatgtagttttcctacagaaatgtctgaatttaaaaagtgcacgaatcctttattaatctgattttacaggagttacctcagtgtagagtccagggatatatatttttataaaactctttcacttagtccccaccgtaaaccaaccagtaatagatcagtagtacagattagtcattggatgagtttgggaggtatgtgattgattttttgatcttggccttccttttttcactttgaaagaccagacacacttttcccctaagtttgaacctttaaacaacgtggaggattggatataatttctgttcagctatgtaccctttctagctcctatgaaatagaagcatgcgtagtaggataacatttatttctctcccacaacttaagaatattttaagtaaaatctgaatatttttagttcagagaattgtaagtcgttaattggtatttgtttaattaatcctttttttttttttttttttttttttttttttttttgagaaggtttctcgctctgtgtcccaggctggagtacagtggcgtgatcttggctcactgcatcctctgcctttcgggttcaagcaattctcctgcctcagcatcccaggtagctgggattacaggcatacatcaccatgcccagctaatttttttgtatttttagtagagacgggtttcaccatgttagccaggctggtctctaactcctggcctcaggtgatccgcctgccccggcctcccaaagtgctgggattacaagtatgagccaccacgcccagccaaggcttctaaattttgtgaacttacctgtggctcctctgacttagagccatttttattttattttattttgttttatgtttttgagaaagggtcttttgctttgtagcccacgctgaagtgcgcttaggtgttcgcagctcattgcactctctaccacccaggctcaagtgacgcatgtaccaccaccacatctggcgtttttttcttgatagagatcgggtttcactgtgttgcccaggctggtctcaaactcctgggctcaagtaatctgcctgctttggcctcccagagtgctgggatcgtatgcgtgagccactgcacccggcccttacaagccattttaaaactggtccccaagaaggcagtggtccattactttccagttgaaactttagatatcccaaatagctgatgattagagagccagctggagagatcttgagttccttagctattagccattattttaaaaagataatctagctttgagagacctggaaatagtagtttatagcttccaacattttaaggaaggtaccattctatttggatgagttccattttagtttacaggattttatttttatttatttatttatttttgagacagtttcactcttgcccagactggagtgcaatggtgtgatcttggctcactgcaacctctgcctcccaggttcaagctattctcctgccttagcctcccaagtagctggaattacaggcacctgccaccatgcctggctaatttttgtatttttaataaagacagcgtttcaccatgttggccaggctggtcttgaactcctgacctcagttgatgctcccaccttggccttccaaagtgctgggactgcaggcctgagccaccgcacctggcctttcacaggattttagataattttactagagcataggaatgtacctaaactgttgtcaggtaaatataaaccagttttttttttttttttttttaggagctcatttataaaataccaatccgcagctttttgaaagcacgtatcttgtaatttggtaccttggtaccttactctaatttagttcagctctcagtgagacatccccctttaaaaacacatcgcctgaccatgttttatattccaaatataattgtattgggtagtgtgggtgttacagaaattacctcaatttgtgggagtttgtgaaacatcaataatagttgtaaagcaggaattgtaaaacaagactgctttataatcagtgtaataatagttctttttttttttttttttttagcacattccatgtgcctggcaagggtctgataagcagtttacctttattgactcatttgcttttcacaacaaccctatgagactcttgtcccagtgaatttaaataacacggaccaaagattcacatctttgtaatttgggagtgaacctaggcagtctaatagcagagcccactttttgtaacttctctttcttacattgcctaaaaagttaactcatttatatctgcatttttttcctaaagaaatttatttgaataaaataagagttacttcaatttaaagtaaaccataaaagagtaaatagtgaaagaatgtcatgtttcccaccctaaatttggaaagaggcactccttaaatttgcttattttggggaaatacaaagggagcataatattttgataaatgggattcgttttctagaaaagccattcctgttgaatcatgttagcattttatggtaatgctaatcatggtgtatttttcattcactgtgtatttagtaggtagtaaacctggaacatcctcaaaagctggatgtgattaaagttttagtttttgtttttgtttttgttttgttttgttttgttttgagacggagtctttgtcatccaggctggagtgcagtggcgcagtctcagctcactggaatctccgccttttgggttcaagagattctgctgcctcagccttccaagtagctgggactacaggcgtgtgccaccacgcccggctaaattttgtattttttgtagagatggggtttcgccatgttggctaggctggtttcaaactcctggtctcaaatgatccatccatctcagcctcccaaagtgttgggattataggcatgagccaccatgctcggcctaaaagattctattttaactaattgttcacatttatagtatatagtttctagaaaagtagatataaacatggatgttttattcagagtgctataaagtagcatacaatgaatacttcagtttggtccacagtaaaaattaataagccttgctgatctcaaggttagttactactcttgatctttattaactctatatcttttccctgtcaaatatcttaagtatgttgacaagttaatccagtttttccaagaatgtgcatagcgtatttgagggcaggatcaagcctcaaggattcagagaaatggttttaaattaaatcaatgtgatttagtgaatgggcaggtgtttgtacagcctatgatactgcatagacattaatatcctagagtttgaatggttcagatgaaaatatttcagctttatttttgttaattctactaatttactttgctgcaggagtggagtcaacatatcaatggagcaagtcacagtcgtcgatgccagcttcttcttgaaatctacccagaatggaatcctgacaatgatacaggacacacaatgggtgatccattcatgttgcagcagtctacaaatccagcaccaggaattctgggacctccacctccctcatttcatcttgggggaccagcagttggaccaagaggaaatctgggtgctggaaatggaaacctgcaaggacctagacacatgcagaaaggcagagtggaaactagcagagttgttcacatcatggattttcaacgagggaaaaacttgagataccagctattacagctggtagaaccatttggagtcatttcaaatcatctgattctaaataaaattaatgaggcatttattgaaatggcaaccacagaggatgctcaggccgcagtggattattacacaaccacaccagcgttagtatttggcaagccagtgagagttcatttatcccagaagtataaaagaataaagaaacctgaaggaaagccagatcagaagtttgatcaaaagcaagagcttggacgtgtgatacatctcagcaatttgccgcattctggctattctgatagtgctgttctcaagcttgctgagccttatgggaaaataaagaattacatattgatgaggatgaaaagtcaggcttttattgagatggagacaagagaagatgcaatggcaatggttgaccattgtttgaaaaaagccctttggtttcaggggagatgtgtgaaggttgacctgtctgagaaatataaaaaactggttctgaggattccaaacagaggcattgatttactgaaaaaagataaatcccgaaaaagatcttactctccagatggcaaagaatctccaagtgataagaaatccaaaactgatggttcccagaagactgagagttcaaccgaaggtaaagaacaagaagagaagtccggtgaagatggtgagaaagacacaaaggatgaccagacagagcaggaacctaatatgcttcttgaatctgaagatgagctacttgtagatgaagaagaagcagcagcactgctagaaagtggcagttcagtgggagacgagaccgatcttgctaatttaggtgatgtggcttctgatgggaaaaaggaaccatcagataaagctgtgaaaaaagatggaagtgcttcagcagcagcaaagaaaaagcttaaaaaggtggacaagatcgaggaacttgatcaagaaaacgaagcagcgttggaaaatggaattaaaaatgaggaaaacacagaaccaggtgctgaatcttctgagaacgctgatgatcccaacaaagatacaagtgaaaacgcagatggtcaaagtgatgagaacaaggacgactatacaatcccagatgagtatagaattggaccatatcagcccaatgttcctgttggtatagactatgtgatacctaaaacagggttttactgtaagctgtgttcactcttttatacaaatgaagaagttgcaaagaatactcattgcagcagccttcctcattatcagaaattaaagaaatttctgaataaattggcagaagaacgcagacagaagaaggaaacttaagatgtgcaaggagatttaatgatttcaaagaaaataatggttctttgtttttaatgttaaccttttttaaatacaatactgatagttagaagaaaactattgtactcttttgttttagtggagaaataatagatgtctgttcatgtgttaagtgttatagcaaaaaaaatacacatatggttaagttaatgaatagtttttgttttatcagaatggcaacagacagaagtactttgtagagattgacttcctaagctacttaagacaacttgcaccactaagaaaaaaatgtagaaccatttggaaaaatgaaatttagtagttccaagtttcaaagaaatgtcaacattttattccattcaataaagaacaaaaccaatagtgtttttattactttcatctgaaacattccatgttttaatctgagccttgcagactttcatttggagtttgaacccgttttggttgcatttcatttttggagaacttaattaacgtgagattggcaattgaaatgcaggtgcagttttctgttaatgtcatgctgttgtttaggtaataagaaatattaagtaattggctttagattttgtaatttttttccctgagttcctgctagatttcgtattctagtagtcaatgtattttcagtgaaatgcaaaaatattcccgttatctttgaccagtattaatttttgagatcttactgcttgtcacttgaatcccgtgattgtcatacatctctggtataagcaacatttgatttttgaagtgtgtagaccatctcttcatattttcaagatgtaattttacatttctgcatttttaaaacagtttggccataatcctagatgcacgcttctaattcatgtacctgcacatgtgacctttgtgaacagaaatttgcatgtataatttgtgtttacttgtaactttctggttatatactgcttatatctgtggattcaagttactgaagtgaataccaataaaaagaaaaccctaggccatgttaattggttatacatgtttggaatgttaaccaacgt

SEQ ID NO: 12279 - protein, 509 aa, Homo sapiens
MGDPFMLQQSTNPAPGILGPPPPSFHLGGPAVGPRGNLGAGNGNLQGPRHMQKGRVETSRVVHIMDFQRGKNLRYQLLQLVEPFGVISNHLILNKINEAFIEMATTEDAQAAVDYYTTTPALVFGKPVRVHLSQKYKRIKKPEGKPDQKFDQKQELGRVIHLSNLPHSGYSDSAVLKLAEPYGKIKNYILMRMKSQAFIEMETREDAMAMVDHCLKKALWFQGRCVKVDLSEKYKKLVLRIPNRGIDLLKKDKSRKRSYSPDGKESPSDKKSKTDGSQKTESSTEGKEQEEKSGEDGEKDTKDDQTEQEPNMLLESEDELLVDEEEAAALLESGSSVGDETDLANLGDVASDGKKEPSDKAVKKDGSASAAAKKKLKKVDKIEELDQENEAALENGIKNEENTEPGAESSENADDPNKDTSENADGQSDENKDDYTIPDEYRIGPYQPNVPVGIDYVIPKTGFYCKLCSLFYTNEEVAKNTHCSSLPHYQKLKKFLNKLAEERRQKKET

SEQ ID NO: 12280 - DNA, 749 bp, Homo sapiens
gaagtcacttccgggctggggtgtttgtttggactggagaagggaggcggcgggcgaagcgcacgtcgagcgggggagcggcgctgcctgtggagatccgcggaggccgacaggattcgttggctgccgtccccgctgctgtgcattgggttaaaaacgacaaccaacatcagccatgaaagatccaagtcgcagcagtactagcccaagcatcatcaatgaagatgtgattattaacggtcattctcatgaagatgacaatccatttgcagagtacatgtggatggaaaatgaagaagaattcaacagacaaatagaagaggagttatgggaagaagaatttattgaacgctgtttccaagaaatgctggaagaggaagaagagcatgaatggtttattccagctcgagatctcccacaaactatggaccaaatccaagaccagtttaatgaccttgttatcagtgatggctcttctctggaagatcttgtggtcaagagcaatctgaatccaaatgcaaaggagtttgttcctggggtgaagtacggaaatatttgagtagacggggccctcttttggtggatgtagcacaatttccacactgtgaaggcagtattagaagacttaattgtaaaagctctcttgtcactgtgttacacttatgcattgccaaagtttttgttagtcttgcatgcttaataaaagtgctgagactgttactaagtaaaaagctgtcaaacatttactg

SEQ ID NO: 12281 - protein, 127 aa, Homo sapiens; identical to SEQ ID NO: 1177

SEQ ID NO: 12282 - DNA, 845 bp, Homo sapiens
gaagtcacttccgggctggggtgtttgtttggactggagaagggaggcggcgggcgaagcgcacgtcgagcgggggagcggcgctgcctgtggagatccgcggaggccgacaggattcgttggctgccgtccccgctgctgtgcattgggttaaaaacgacaaccaacatcagccatgaaagatccaagtcgcagcagtactagcccaagcatcatcaatgaagatgtgattattaacggtcattctcatgaagatgacaatccatttgcagagtacatgtggatggaaaatgaagaagaattcaacagacaaatagaagaggagttatgggaagaagaatttattgaacgctgtttccaagaaatgctggaagaggaagaagagcatgaatggtttattccagctcgagatctcccacaaactatggaccaaatccaagaccagtttaatgaccttgttatcagtgatggctcttctctggaagatcttgtggtcaagagcaatctgaatccaaatgcaaaggagtttgttcctggggtgaagtacggaaatatttgagtagacggggccctcttttggtggatgtagcacaatttccacactgtgaaggcagtattagaagacttaattgtaaaagctctcttgtcactgtgttacacttatgcattgccaaagtttttgttagtcttgcatgcttaataaaagtgctgagactgttactaagtaaaaagctgtcaaacatttactgaaaatagaattggccccatggcttgatgtgaagacagcaaggaaagaagcaccagtcaagttgtgaacaagcaccaaattaaaagacctaaacctt

SEQ ID NO: 12283 - protein, 127 aa, Homo sapiens; identical to SEQ ID NO: 1177

SEQ ID NO: 12284 - DNA, 1480 bp, Homo sapiens
gaagtcacttccgggctggggtgtttgtttggactggagaagggaggcggcgggcgaagcgcacgtcgagcgggggagcggcgctgcctgtggagatccgcggaggccgacaggattcgttggctgccgtccccgctgctgtgcattgggttaaaaacgacaaccaacatcagccatgaaagatccaagtcgcagcagtactagcccaagcatcatcaatgaagatgtgattattaacggtcattctcatgaagatgacaatccatttgcagagtacatgtggatggaaaatgaagaagaattcaacagacaaatagaagaggagttatgggaagaagaatttattgaacgctgtttccaagaaatgctggaagaggaagaagagcatgaatggtttattccagctcgagatctcccacaaactatggaccaaatccaagaccagtttaatgaccttgttatcagtgatggctcttctctggaagatcttgtggtcaagagcaatctgaatccaaatgcaaaggagtttgttcctggggtgaagtacggaaatatttgagtagacggggccctcttttggtggatgtagcacaatttccacactgtgaaggcagtattagaagacttaattgtaaaagctctcttgtcactgtgttacacttatgcattgccaaagtttttgttagtcttgcatgcttaataaaagtgctgagactgttactaagtaaaaagctgtcaaacatttactgaaaatagaattggccccatggcttgatgtgaagacagcaaggaaagaagcaccagtcaagttgtgaacaagcaccaaattaaaagacctaaaccttaccaaattgtctttttttgaggctaatctatcacttgttaatgtctaaactttaaaatcagtacatttaatttgagttccaactgttaagcatatttctcagacttaaatttgattatgtccccatcaaaaagaatctccattttctgaaggtctgttagttaatttgagataatttgttaaaggcaagtatgtcatattactgaggctacaagttagtcagcagatgagtgccagtccagccttttctggtatgttattgttagaaatattgagttctaatgttacatctgaggaagtatgtaatttgagaattgtaacttctaagggattcactgcatcatagctatgcctgtatggagtctaacatatgaccaataccaacccataatccagctgaacaaagatactgtaacatgatttgagtggtgcttttccttgctttgttaaccatcacgagagtctgcagcacaacttttaacaaagctagaacagttttggcttcttaaacttcatatttgggtaggttaagctgccatacgtgttcagtgtgaatagtgtttaagttgaaaatattgtaaaaaaattatattttttcaaaaatatttaaaaaaataaataatagtagaactgagc

SEQ ID NO: 12285 - protein, 127 aa, Homo sapiens; identical to SEQ ID NO: 1177

SEQ ID NO: 12286 - DNA, 822 bp, Homo sapiens
gggtgtttgtttggactggagaagggaggcggcgggcgaagcgcacgtcgagcgggggagcggcgctgcctgtggagatccgcggaggccgacaggattcgttggctgccgtccccgctgctgtgcattgggttaaaaacgacaaccaacatcagccatgaaagatccaagtcgcagcagtactagcccaagcatcatcaatgaagatgtgattattaacggtcattctcatgaagatgacaatccatttgcagagtacatgtggatggaaaatgaagaagaattcaacagacaaatagaagaggagttatgggaagaagaatttattgaacgctgtttccaagaaatgctggaagaggaagaagagcatgaatggtttattccagctcgagatctcccacaaactatggaccaaatccaagaccagtttaatgaccttgttatcagtgatggctcttctctggaagatcttgtggtaaaaagttatttttcatctttttaaaacctagtgcatcttttgcataagtggaaaagccagctcccatctatttaagaattctacatctctttccccttcagaaattgtgctgcttctggccgggcatgtggctcacgcctgtaatcccagcactttgggaggccgaggcaggcagttgacttgaggtcaggagtttgagaccagcctgaccaacatggagaaaccccatctctactaaaaataaaaaattagccgggcatggtagcacatgcctgtgatcccagctactcgggaggctgaggcaggagaatcgcttgaacccgggagacggaagttgtggtgag

SEQ ID NO: 12287 - protein, 114 aa, Homo sapiens
MKDPSRSSTSPSIINEDVIINGHSHEDDNPFAEYMWMENEEEFNRQIEEELWEEEFIERCFQEMLEEEEEHEWFIPARDLPQTMDQIQDQFNDLVISDGSSLEDLVVKSYFSSF

SEQ ID NO: 12288 - DNA, 623 bp, Homo sapiens
gggtgtttgtttggactggagaagggaggcggcgggcgaagcgcacgtcgagcgggggagcggcgctgcctgtggagatccgcggaggccgacaggattcgttggctgccgtccccgctgctgtgcattgggttaaaaacgacaaccaacatcagccatgaaagatccaagtcgcagcagtactagcccaagcatcatcaatgaagatgtgattattaacggtcattctcatgaagatgacaatccatttgcagagtacatgtggatggaaaatgaagaagaattcaacagacaaactatggaccaaatccaagaccagtttaatgaccttgttatcagtgatggctcttctctggaagatcttgtggtcaagagcaatctgaatccaaatgcaaaggagtttgttcctggggtgaagtacggaaatatttgagtagacggggccctcttttggtggatgtagcacaatttccacactgtgaaggcagtattagaagacttaattgtaaaagctctcttgtcactgtgttacacttatgcattgccaaagtttttgttagtcttgcatgcttaataaaagtgctgagactgttactaagtaaaaagctgtcaaacatttactg

SEQ ID NO: 12289 - protein, 91 aa, Homo sapiens
MKDPSRSSTSPSIINEDVIINGHSHEDDNPFAEYMWMENEEEFNRQTMDQIQDQFNDLVISDGSSLEDLVVKSNLNPNAKEFVPGVKYGNI

SEQ ID NO: 12290 - DNA, 328 bp, Homo sapiens
ggagaagggaggcggcgggcgaagcgcacgtcgagcgggggagcggcgctgcctgtggagatccgcggaggccgacaggattcgttggctgccgtccccgctgctgtgcattgggtagtggtgcttttccttgctttgttaaccatcacgagagtctgcagcacaacttttaacaaagctagaacagttttggcttcttaaacttcatatttgggtaggttaagctgccatacgtgttcagtgtgaatagtgtttaagttgaaaatattgtaaaaaaattatattttttcaaaaatatttaaaaaaataaataatagtagaactgagc

SEQ ID NO: 12291 - protein, 66 aa, Homo sapiens
GEGRRRAKRTSSGGAALPVEIRGGRQDSLAAVPAAVHWVVVLFLALLTITRVCSTTFNKARTVLAS

SEQ ID NO: 12292 - DNA, 1313 bp, Homo sapiens
ggcgaagcgcacgtcgagcgggggagcggcgctgcctgtggagatccgcggaggccgacaggattcgttggctgccgtccccgctgctgtgcattgggtgaggggtcctctcgggcagagtggcgacaggggtgcggaggtcgagggacagcaagtcggcgacggcagaggggcctaaagggttccctgggtggttggccaccgagtccattgcggcctccgttgttcattgcctctttccaccaagtctgagggatgagcttgggccgacttcgtctctgtcttctccgagacatggccgtcgcttttttttcattgtcattattaatgatttggatctcgcagctctctatccgggtcctcagtggcgcgagggttgccgggatagcactttctcctgttcctcattctcccggtcctttatccctccgccgggtaccctttcccctgcccccctcccaccgcctcggcaacaaagcttattgtttctacccactttacgcctgcgcgtcgccacgcgcagcccctacttgctgcgcgtgcgcgcctcagccgaggctggggtttggggagagaggggcggagggactggcgggctcttggcgtcttgggggaacgctgcaaccgtcgacgggcctgatcagaagatcgtctttctcccgtttcttcgccatcgctaccccttatttttggttgtattgcagctcatgccctggaaaaaagaacctttggggttaaaaacgacaaccaacatcagccatgaaagatccaagtcgcagcagtactagcccaagcatcatcaatgaagatgtgattattaacggtcattctcatgaagatgacaatccatttgcagagtacatgtggatggaaaatgaagaagaattcaacagacaaatagaagaggagttatgggaagaagaatttattgaacgctgtttccaagaaatgctggaagaggaagaagagcatgaatggtttattccagctcgagatctcccacaaactatggaccaaatccaagaccagtttaatgaccttgttatcagtgatggctcttctctggaagatcttgtggtcaagagcaatctgaatccaaatgcaaaggagtttgttcctggggtgaagtacggaaatatttgagtagacggggccctcttttggtggatgtagcacaatttccacactgtgaaggcagtattagaagacttaattgtaaaagctctcttgtcactgtgttacacttatgcattgccaaagtttttgttagtcttgcatgcttaataaaagtgctgagactgttactaagtaaa

SEQ ID NO: 12293 - protein, 160 aa, Homo sapiens
MSLGRLRLCLLRDMAVAFFSLSLLMIWISQLSIRVLSGARVAGIALSPVPHSPGPLSLRRVPFPLPPSHRLGNKAYCFYPLYACASPRAAPTCCACAPQPRLGFGERGAEGLAGSWRLGGTLQPSTGLIRRSSFSRFFAIATPYFWLYCSSCPGKKNLWG

SEQ ID NO: 12294 - DNA, 1429 bp, Homo sapiens
ggcgaagcgcacgtcgagcgggggagcggcgctgcctgtggagatccgcggaggccgacaggattcgttggctgccgtccccgctgctgtgcattgggtgaggggtcctctcgggcagagtggcgacaggggtgcggaggtcgagggacagcaagtcggcgacggcagaggggcctaaagggttccctgggtggttggccaccgagtccattgcggcctccgttgttcattgcctctttccaccaagtctgagggatgagcttgggccgacttcgtctctgtcttctccgagacatggccgtcgcttttttttcattgtcattattaatgatttggatctcgcagctctctatccgggtcctcagtggcgcgagggttgccgggatagcactttctcctgttcctcattctcccggtcctttatccctccgccgggtaccctttcccctgcccccctcccaccgcctcggcaacaaagcttattgtttctacccactttacgcctgcgcgtcgccacgcgcagcccctacttgctgcgcgtgcgcgcctcagccgaggctggggtttggggagagaggggcggagggactggcgggctcttggcgtcttgggggaacgctgcaaccgtcgacgggcctgatcagaagatcgtctttctcccgtttcttcgccatcgctaccccttatttttggttgtattgcagctcatgccctggaaaaaagaacctttggggttaaaaacgacaaccaacatcagccatgaaagatccaagtcgcagcagtactagcccaagcatcatcaatgaagatgtgattattaacggtcattctcatgaagatgacaatccatttgcagagtacatgtggatggaaaatgaagaagaattcaacagacaaatagaagaggagttatgggaagaagaatttattgaacgctgtttccaagaaatgctggaagaggaagaagagcatgaatggtttattccagctcgagatctcccacaaactatggaccaaatccaagaccagtttaatgaccttgttatcagtgatggctcttctctggaagatcttgtggtcaagagcaatctgaatccaaatgcaaaggagtttgttcctggggtgaagtacggaaatatttgagtagacggggccctcttttggtggatgtagcacaatttccacactgtgaaggcagtattagaagacttaattgtaaaagctctcttgtcactgtgttacacttatgcattgccaaagtttttgttagtcttgcatgcttaataaaagtgctgagactgttactaagtaaaaagctgtcaaacatttactgaaaatagaattggccccatggcttgatgtgaagacagcaaggaaagaagcaccagtcaagttgtgaacaagcaccaaattaaaagacctaaacctt

SEQ ID NO: 12295 - protein, 160 aa, Homo sapiens; identical to SEQ ID NO: 12293

SEQ ID NO: 12296 - DNA, 2064 bp, Homo sapiens
ggcgaagcgcacgtcgagcgggggagcggcgctgcctgtggagatccgcggaggccgacaggattcgttggctgccgtccccgctgctgtgcattgggtgaggggtcctctcgggcagagtggcgacaggggtgcggaggtcgagggacagcaagtcggcgacggcagaggggcctaaagggttccctgggtggttggccaccgagtccattgcggcctccgttgttcattgcctctttccaccaagtctgagggatgagcttgggccgacttcgtctctgtcttctccgagacatggccgtcgcttttttttcattgtcattattaatgatttggatctcgcagctctctatccgggtcctcagtggcgcgagggttgccgggatagcactttctcctgttcctcattctcccggtcctttatccctccgccgggtaccctttcccctgcccccctcccaccgcctcggcaacaaagcttattgtttctacccactttacgcctgcgcgtcgccacgcgcagcccctacttgctgcgcgtgcgcgcctcagccgaggctggggtttggggagagaggggcggagggactggcgggctcttggcgtcttgggggaacgctgcaaccgtcgacgggcctgatcagaagatcgtctttctcccgtttcttcgccatcgctaccccttatttttggttgtattgcagctcatgccctggaaaaaagaacctttggggttaaaaacgacaaccaacatcagccatgaaagatccaagtcgcagcagtactagcccaagcatcatcaatgaagatgtgattattaacggtcattctcatgaagatgacaatccatttgcagagtacatgtggatggaaaatgaagaagaattcaacagacaaatagaagaggagttatgggaagaagaatttattgaacgctgtttccaagaaatgctggaagaggaagaagagcatgaatggtttattccagctcgagatctcccacaaactatggaccaaatccaagaccagtttaatgaccttgttatcagtgatggctcttctctggaagatcttgtggtcaagagcaatctgaatccaaatgcaaaggagtttgttcctggggtgaagtacggaaatatttgagtagacggggccctcttttggtggatgtagcacaatttccacactgtgaaggcagtattagaagacttaattgtaaaagctctcttgtcactgtgttacacttatgcattgccaaagtttttgttagtcttgcatgcttaataaaagtgctgagactgttactaagtaaaaagctgtcaaacatttactgaaaatagaattggccccatggcttgatgtgaagacagcaaggaaagaagcaccagtcaagttgtgaacaagcaccaaattaaaagacctaaaccttaccaaattgtctttttttgaggctaatctatcacttgttaatgtctaaactttaaaatcagtacatttaatttgagttccaactgttaagcatatttctcagacttaaatttgattatgtccccatcaaaaagaatctccattttctgaaggtctgttagttaatttgagataatttgttaaaggcaagtatgtcatattactgaggctacaagttagtcagcagatgagtgccagtccagccttttctggtatgttattgttagaaatattgagttctaatgttacatctgaggaagtatgtaatttgagaattgtaacttctaagggattcactgcatcatagctatgcctgtatggagtctaacatatgaccaataccaacccataatccagctgaacaaagatactgtaacatgatttgagtggtgcttttccttgctttgttaaccatcacgagagtctgcagcacaacttttaacaaagctagaacagttttggcttcttaaacttcatatttgggtaggttaagctgccatacgtgttcagtgtgaatagtgtttaagttgaaaatattgtaaaaaaattatattttttcaaaaatatttaaaaaaataaataatagtagaactgagc

SEQ ID NO: 12297 - protein, 160 aa, Homo sapiens; identical to SEQ ID NO: 12293

SEQ ID NO: 12298 - DNA, 2854 bp, Homo sapiens
ggcgaagcgcacgtcgagcgggggagcggcgctgcctgtggagatccgcggaggccgacaggattcgttggctgccgtccccgctgctgtgcattgggtgaggggtcctctcgggcagagtggcgacaggggtgcggaggtcgagggacagcaagtcggcgacggcagaggggcctaaagggttccctgggtggttggccaccgagtccattgcggcctccgttgttcattgcctctttccaccaagtctgagggatgagcttgggccgacttcgtctctgtcttctccgagacatggccgtcgcttttttttcattgtcattattaatgatttggatctcgcagctctctatccgggtcctcagtggcgcgagggttgccgggatagcactttctcctgttcctcattctcccggtcctttatccctccgccgggtaccctttcccctgcccccctcccaccgcctcggcaacaaagcttattgtttctacccactttacgcctgcgcgtcgccacgcgcagcccctacttgctgcgcgtgcgcgcctcagccgaggctggggtttggggagagaggggcggagggactggcgggctcttggcgtcttgggggaacgctgcaaccgtcgacgggcctgatcagaagatcgtctttctcccgtttcttcgccatcgctaccccttatttttggttgtattgcagctcatgccctggaaaaaagaacctttggggtactgggaacccttaccctaggagggcgttgagttagatgaactttaaggtcctcttaccttttaataattttctgtgcttactctcctccttccccaccatcgccaccagaaataaataaggcttgtggtgaacttaggtcttcaaaacatttgttgcagcagccagcagtgatattttttagggactcctaaaaggggtcttacctgcttccttttgtttcttttttccctgatttggcacccgtatcaactcataaaaaccccaaactctagaaagaatttggcttccaatttgccttggaaggtgtagcagctgacagcctttgacgtttatttcaacggaaagtagatgttcatgttgggtgtgctggctaatgttgaaacgtggtggcattgttttttcacagatttcattagcacagttagatcaggtgttggtttatattttcattaagtcgcttttgaaatttcttctggcgtaggttgtgtttgcaataagtaaaagttctctacaataatttttaatgagactccactatttgcttttgtgattctgtttccagttagtgaaagacaggatatttggggaaaattagtctgtttatactacttgtcagttgtgaacttgaataaaactttttcacacacacacaaaatcacaggataggtaacttgacaagaactatagaacccacttgtgtttctttaagggatggaggttagggaatggagatttcctctaatgattcaaggctgtgcacgttgctccttaggaactcaaattgaggttaaaaacgacaaccaacatcagccatgaaagatccaagtcgcagcagtactagcccaagcatcatcaatgaagatgtgattattaacggtcattctcatgaagatgacaatccatttgcagagtacatgtggatggaaaatgaagaagaattcaacagacaaatagaagaggagttatgggaagaagaatttattgaacgctgtttccaagaaatgctggaagaggaagaagagcatgaatggtttattccagctcgagatctcccacaaactatggaccaaatccaagaccagtttaatgaccttgttatcagtgatggctcttctctggaagatcttgtggtcaagagcaatctgaatccaaatgcaaaggagtttgttcctggggtgaagtacggaaatatttgagtagacggggccctcttttggtggatgtagcacaatttccacactgtgaaggcagtattagaagacttaattgtaaaagctctcttgtcactgtgttacacttatgcattgccaaagtttttgttagtcttgcatgcttaataaaagtgctgagactgttactaagtaaaaagctgtcaaacatttactgaaaatagaattggccccatggcttgatgtgaagacagcaaggaaagaagcaccagtcaagttgtgaacaagcaccaaattaaaagacctaaaccttaccaaattgtctttttttgaggctaatctatcacttgttaatgtctaaactttaaaatcagtacatttaatttgagttccaactgttaagcatatttctcagacttaaatttgattatgtccccatcaaaaagaatctccattttctgaaggtctgttagttaatttgagataatttgttaaaggcaagtatgtcatattactgaggctacaagttagtcagcagatgagtgccagtccagccttttctggtatgttattgttagaaatattgagttctaatgttacatctgaggaagtatgtaatttgagaattgtaacttctaagggattcactgcatcatagctatgcctgtatggagtctaacatatgaccaataccaacccataatccagctgaacaaagatactgtaacatgatttgagtggtgcttttccttgctttgttaaccatcacgagagtctgcagcacaacttttaacaaagctagaacagttttggcttcttaaacttcatatttgggtaggttaagctgccatacgtgttcagtgtgaatagtgtttaagttgaaaatattgtaaaaaaattatattttttcaaaaatatttaaaaaaataaataatagtagaactgagc

SEQ ID NO: 12299 - protein, 127 aa, Homo sapiens; identical to SEQ ID NO: 1177

SEQ ID NO: 12300 - DNA, 423 bp, Homo sapiens
ctgtggagatccgcggaggccgacaggattcgttggctgccgtccccgctgctgtgcattggggatggaggttagggaatggagatttcctctaatgattcaaggctgtgcacgttgctccttaggaactcaaattgaggttaaaaacgacaaccaacatcagccatgaaagatccaagtcgcagcagtactagcccaagcatcatcaatgaagatgtgattattaacggtcattctcatgaagatgacaatccatttgcagagtacatgtggatggaaaatgaagaagaattcaacagacaagttagttttttgtacaaacatgtttttatagtccattctggccctcaatatgattgtacttgtccctgaaatgtgtttatcttgtcctttatgtataaagtatgtagactgatgtgccac

SEQ ID NO: 12301 - protein, 34 aa, Homo sapiens
MEVREWRFPLMIQGCARCSLGTQIEVKNDNQHQP

SEQ ID NO: 12302 - DNA, 779 bp, Homo sapiens
atagaagaggagttatgggaagaagaatttattgaacgctgtttccaagaaatgctggaagaggaagaagagcatgaatggtttattccagctcgagatctcccacaaactatggaccaaatccaagaccagtttaatgaccttaccaaattgtctttttttgaggctaatctatcacttgttaatgtctaaactttaaaatcagtacatttaatttgagttccaactgttaagcatatttctcagacttaaatttgattatgtccccatcaaaaagaatctccattttctgaaggtctgttagttaatttgagataatttgttaaaggcaagtatgtcatattactgaggctacaagttagtcagcagatgagtgccagtccagccttttctggtatgttattgttagaaatattgagttctaatgttacatctgaggaagtatgtaatttgagaattgtaacttctaagggattcactgcatcatagctatgcctgtatggagtctaacatatgaccaataccaacccataatccagctgaacaaagatactgtaacatgatttgagtggtgcttttccttgctttgttaaccatcacgagagtctgcagcacaacttttaacaaagctagaacagttttggcttcttaaacttcatatttgggtaggttaagctgccatacgtgttcagtgtgaatagtgtttaagttgaaaatattgtaaaaaaattatattttttcaaaaatatttaaaaaaataaataatagtagaactgagc

SEQ ID NO: 12303 - protein, 46 aa, Homo sapiens
MLEEEEEHEWFIPARDLPQTMDQIQDQFNDLTKLSFFEANLSLVNV

SEQ ID NO: 12304 - DNA, 420 bp, Homo sapiens
tggaccaaatccaagaccagtttaatgaccttgttatcagtgatggctcttctctggaagatcttgtggtcaagagcaatctgaatccaaatgcaaaggagtttgttcctggggtgaagtacggaaatatttgagtagacggggccctcttttggtggatgtagcacaatttccacactgtgaaggcagtattagaagacttaattgtaaaagctctcttgtcactgtgttacacttatgcattgccaaagtttttgttagtcttgcatgcttaataaaagtgctgagactgttactaagtaaaaagctgtcaaacatttactgaaaatagaattggccccatggcttgatgtgaagacagcaaggaaagaagcaccagtcaagttgtgaacaagcaccaaattaaaagacctaaacctt

SEQ ID NO: 12305 - protein, 93 aa, Homo sapiens
WLFSGRSCGQEQSESKCKGVCSWGEVRKYLSRRGPLLVDVAQFPHCEGSIRRLNCKSSLVTVLHLCIAKVFVSLACLIKVLRLLLSKKLSNIY

SEQ ID NO: 12306 - DNA, 1052 bp, Homo sapiens
accaaatccaagaccagtttaatgaccttgttatcagtgatggctcttctctggaagatcttgtggtcaagagcaatctgaatccaaatgcaaaggagtttgttcctggggtgaagtacggaaatatttgagtagacggggccctcttttggtggatgtagcacaatttccacactgtgaaggcagtattagaagacttaattgtaaaagctctcttgtcactgtgttacacttatgcattgccaaagtttttgttagtcttgcatgcttaataaaagtgctgagactgttactaagtaaaaagctgtcaaacatttactgaaaatagaattggccccatggcttgatgtgaagacagcaaggaaagaagcaccagtcaagttgtgaacaagcaccaaattaaaagacctaaaccttaccaaattgtctttttttgaggctaatctatcacttgttaatgtctaaactttaaaatcagtacatttaatttgagttccaactgttaagcatatttctcagacttaaatttgattatgtccccatcaaaaagaatctccattttctgaaggtctgttagttaatttgagataatttgttaaaggcaagtatgtcatattactgaggctacaagttagtcagcagatgagtgccagtccagccttttctggtatgttattgttagaaatattgagttctaatgttacatctgaggaagtatgtaatttgagaattgtaacttctaagggattcactgcatcatagctatgcctgtatggagtctaacatatgaccaataccaacccataatccagctgaacaaagatactgtaacatgatttgagtggtgcttttccttgctttgttaaccatcacgagagtctgcagcacaacttttaacaaagctagaacagttttggcttcttaaacttcatatttgggtaggttaagctgccatacgtgttcagtgtgaatagtgtttaagttgaaaatattgtaaaaaaattatattttttcaaaaatatttaaaaaaataaataatagtagaactgagc

SEQ ID NO: 12307 - protein, 39 aa, Homo sapiens
MSASPAFSGMLLLEILSSNVTSEEVCNLRIVTSKGFTAS

SEQ ID NO: 12308 - DNA, 2310 bp, Homo sapiens
ggcctttgtcaagtcatcccctcttctcctcaggaactgctcaaacctgtgccccaaagatgagggcccaggaggacctcgagggccggacacagcatgaaaccaccagggacccctcgaccccgctacccacagagcctaagtttgacatgttgtacaagatcgaggacgtgccaccttggtacctgtgcatcctgctgggcttccagcactacctgacatgcttcagtggtaccatcgccgtgcccttcctgctggctgaggcgctgtgtgtgggccacgaccagcacatggttagtcagctcatcggcaccatcttcacgtgcgtgggcatcaccactctcatccagaccaccgtgggcatccggctgccgctgttccaggccagtgcctttgcatttctggttccagccaaagccatactggctctggagagatggaaatgccccccggaagaggagatctacggtaactggagtctgcccctgaacacctctcatatttggcacccacggatacgggaggtccagggtgcaatcatggtgtccagcgtggtggaggtggtgattggcctgctggggctgcctggggccctgctcaactacattgggcctctcacagtcacccccactgtctccctcattggcctttctgtcttccaagctgctggcgaccgagctggctcccactggggcatctcagcttgctccattctcctgatcatcctcttctcccagtacctgcgcaacctcaccttcctgctgcctgtctaccgctggggcaagggcctcactctcctccgcatccagatcttcaaaatgtttcctatcatgctggccatcatgaccgtgtggctgctctgctatgtcctgaccttgacagacgtgctgcccacagacccaaaagcctatggcttccaggcacgaaccgatgcccgtggtgacatcatggctattgcaccctggatccgcatcccctacccctgtcagtggggcctgcccacggtgactgcggctgctgtcctgggaatgttcagcgccactctggcaggcatcattgagtccatcggagattactacgcctgtgcccgcctggctggtgcaccaccccctccagtacatgctatcaacaggggcatcttcaccgaaggcatttgctgcatcatcgcggggctattgggcacgggcaacgggtccacctcgtccagtcccaacattggcgtcctgggaattaccaaggtgggcagccggcgcgtggtgcagtatggtgcggctatcatgctggtcctgggcaccatcggcaagttcacggccctcttctcctcgctccctgaccccatcctggggggcatgttctgcactctctttggcatgattacagctgtggggctgtccaacctgcaatttgtggacatgaactcctctcgcaacctcttcgtgctgggattttccatgttcttcgggctcacgctgcccaattacctggagtccaaccctggcgccatcaatacaggcattcttgaagtggatcagattctgattgtgctgctgaccacggagatgtttgtgggcgggtgccttgctttcatacttgacaacacagtgccagggagcccagaggagcgtggtctgatacagtggaaagctggggctcatgccaacagtgacatgtcttccagcctcaagagctacgatttccccattgggatgggcatagtaaaaagaattacctttctgaaatacattcctatctgcccagtcttcaaaggattttcttcaagttcaaaagatcagattgcaattccagaagacactccagaaaatacagaaactgcatctgtgtgcaccaaggtctgaaaaatgacttccaggaaaggaagcatggtatataacaggaaaagaaaactacatggggaaccagaagacctaagcctgaaatcccagccctgcccctaactaacttctgtgtaaactcagataagtcacctttctctgggattcaaatttttgcatcagttaaaaaaaaaggggtgggggggaatgggccaaagtctgagtcttagagacttgtaccaatgttatgctatgtctctaaatctttactctcctaagtagacttgtcagcatctaggaagaacagctagaaattttcctctgtgatattttagactgcaagttgaaaaaaataaaaagaaatgagggcaggttccagggcctgaaatgtaggtatgctgcaaggcttttacattgaatttgaccctacatcacttcaagactaatgcataatattaaacatcatgttgaagaaata

SEQ ID NO: 12309 - protein, 598 aa, Homo sapiens
MRAQEDLEGRTQHETTRDPSTPLPTEPKFDMLYKIEDVPPWYLCILLGFQHYLTCFSGTIAVPFLLAEALCVGHDQHMVSQLIGTIFTCVGITTLIQTTVGIRLPLFQASAFAFLVPAKAILALERWKCPPEEEIYGNWSLPLNTSHIWHPRIREVQGAIMVSSVVEVVIGLLGLPGALLNYIGPLTVTPTVSLIGLSVFQAAGDRAGSHWGISACSILLIILFSQYLRNLTFLLPVYRWGKGLTLLRIQIFKMFPIMLAIMTVWLLCYVLTLTDVLPTDPKAYGFQARTDARGDIMAIAPWIRIPYPCQWGLPTVTAAAVLGMFSATLAGIIESIGDYYACARLAGAPPPPVHAINRGIFTEGICCIIAGLLGTGNGSTSSSPNIGVLGITKVGSRRVVQYGAAIMLVLGTIGKFTALFSSLPDPILGGMFCTLFGMITAVGLSNLQFVDMNSSRNLFVLGFSMFFGLTLPNYLESNPGAINTGILEVDQILIVLLTTEMFVGGCLAFILDNTVPGSPEERGLIQWKAGAHANSDMSSSLKSYDFPIGMGIVKRITFLKYIPICPVFKGFSSSSKDQIAIPEDTPENTETASVCTKV

SEQ ID NO: 12310 - DNA, 1293 bp, Homo sapiens
ggcctttgtcaagtcatcccctcttctcctcaggaactgctcaaacctgtgccccaaagatgagggcccaggaggacctcgagggccggacacagcatgaaaccaccagggacccctcgaccccgctacccacagagcctaagtttgacatgttgtacaagatcgaggacgtgccaccttggtacctgtgcatcctgctgggcttccagcactacctgacatgcttcagtggtaccatcgccgtgcccttcctgctggctgaggcgctgtgtgtgggccacgaccagcacatggttagtcagctcatcggcaccatcttcacgtgcgtgggcatgttctgcactctctttggcatgattacagctgtggggctgtccaacctgcaatttgtggacatgaactcctctcgcaacctcttcgtgctgggattttccatgttcttcgggctcacgctgcccaattacctggagtccaaccctggcgccatcaatacaggcattcttgaagtggatcagattctgattgtgctgctgaccacggagatgtttgtgggcgggtgccttgctttcatacttgacaacacagtgccagggagcccagaggagcgtggtctgatacagtggaaagctggggctcatgccaacagtgacatgtcttccagcctcaagagctacgatttccccattgggatgggcatagtaaaaagaattacctttctgaaatacattcctatctgcccagtcttcaaaggattttcttcaagttcaaaagatcagattgcaattccagaagacactccagaaaatacagaaactgcatctgtgtgcaccaaggtctgaaaaatgacttccaggaaaggaagcatggtatataacaggaaaagaaaactacatggggaaccagaagacctaagcctgaaatcccagccctgcccctaactaacttctgtgtaaactcagataagtcacctttctctgggattcaaatttttgcatcagttaaaaaaaaaggggtgggggggaatgggccaaagtctgagtcttagagacttgtaccaatgttatgctatgtctctaaatctttactctcctaagtagacttgtcagcatctaggaagaacagctagaaattttcctctgtgatattttagactgcaagttgaaaaaaataaaaagaaatgagggcaggttccagggcctgaaatgtaggtatgctgcaaggcttttacattgaatttgaccctacatcacttcaagactaatgcataatattaaacatcatgttgaagaaata

SEQ ID NO: 12311 - protein, 259 aa, Homo sapiens
MRAQEDLEGRTQHETTRDPSTPLPTEPKFDMLYKIEDVPPWYLCILLGFQHYLTCFSGTIAVPFLLAEALCVGHDQHMVSQLIGTIFTCVGMFCTLFGMITAVGLSNLQFVDMNSSRNLFVLGFSMFFGLTLPNYLESNPGAINTGILEVDQILIVLLTTEMFVGGCLAFILDNTVPGSPEERGLIQWKAGAHANSDMSSSLKSYDFPIGMGIVKRITFLKYIPICPVFKGFSSSSKDQIAIPEDTPENTETASVCTKV

SEQ ID NO: 12312 - DNA, 939 bp, Homo sapiens
tcccagagagctttgggggctgggggaggggccatgcaacagcctcacaggtgcttcctgctcaaacggctctcttgccactttattttccccagagactctgctcctatcctccccacctccccctaactgagcagcagtcctgaggccctgcctcccagtccctccttgttccagatgtggcaaaatctggcaaaggcagagaccaaacttcatacctcaaactctggggggcggcgggagctgagcgagttggtctacacggatgtcctggaccggagctgctcccggaactggcaggactacggagttcgagaagtggaccaagtgaaacgtctcacaggcccaggacttagcgaggggccagagccaagcatcagcgtgatggtcacagggggcccctggcctaccaggtgatgcccggggcttggggataggatgaagctcctggagccttggtttgccccactgtgggctgggcagcatctgaggctcctgctgggctcccctaggctctccaggacatgtttgcactacttgggggagtttggagaagaccagatctatgaagcccaccaacaaggccgaggggctctggaggcattgctatgtgggggaccccagggggcctgctcagagaaggtgtcagccacaagagaagagctctagtcctggactctaccctcctctgaaagaagctggggcttgctctgacggtctccactcccgtctgcaggcagccaggagggcaggaagcccttgctctgtgctgccatcctgcctccctcctccagcctcagggcactcgggcctgggtgggagtcaacgccttcccctctggactcaaataaaacccagtgacctcacttcttttctctgcaaaaggtgcttgtggggctgggagtgcagacattggtgtttctgctgatgtcccttgtg

SEQ ID NO: 12313 - protein, 79 aa, Homo sapiens
MWQNLAKAETKLHTSNSGGRRELSELVYTDVLDRSCSRNWQDYGVREVDQVKRLTGPGLSEGPEPSISVMVTGGPWPTR

SEQ ID NO: 12314 - DNA, 980 bp, Homo sapiens
cacacacacatctgcacctcaaccacagactacacttgctgaactggctcctggggccatgaggctgtcactgccactgctgctgctgctgctgggagcctgggccatcccagggggcctcggggacagggcgccactcacagccacagccccacaactggatgatgaggagatgtactcagcccacatgcccgctcacctgcgctgtgatgcctgcagagctgtggcttaccagagactctgctcctatcctccccacctccccctaactgagcagcagtcctgaggccctgcctcccagtccctccttgttccagatgtggcaaaatctggcaaaggcagagaccaaacttcatacctcaaactctggggggcggcgggagctgagcgagttggtctacacggatgtcctggaccggagctgctcccggaactggcaggactacggagttcgagaagtggaccaagtgaaacgtctcacaggcccaggacttagcgaggggccagagccaagcatcagcgtgatggtcacagggggcccctggcctaccaggctctccaggacatgtttgcactacttgggggagtttggagaagaccagatctatgaagcccaccaacaaggccgaggggctctggaggcattgctatgtgggggaccccagggggcctgctcagagaaggtgtcagccacaagagaagagctctagtcctggactctaccctcctctgaaagaagctggggcttgctctgacggtctccactcccgtctgcaggcagccaggagggcaggaagcccttgctctgtgctgccatcctgcctccctcctccagcctcagggcactcgggcctgggtgggagtcaacgccttcccctctggactcaaataaaacccagtgacctcacttcttttctctgcaaaaggtgcttgtggggctgggagtgcagacattggtgtttctgctgatgtcccttgtg

SEQ ID NO: 12315 - protein, 130 aa, Homo sapiens
MWQNLAKAETKLHTSNSGGRRELSELVYTDVLDRSCSRNWQDYGVREVDQVKRLTGPGLSEGPEPSISVMVTGGPWPTRLSRTCLHYLGEFGEDQIYEAHQQGRGALEALLCGGPQGACSEKVSATREEL

SEQ ID NO: 12316 - DNA, 773 bp, Homo sapiens
cacacacacatctgcacctcaaccacagactacacttgctgaactggctcctggggccatgaggctgtcactgccactgctgctgctgctgctgggagcctgggccatcccagggggcctcggggacagggcgccactcacagccacagccccacaactggatgatgaggagatgtactcagcccacatgcccgctcacctgcgctgtgatgcctgcagagctgtggcttaccagctacggagttcgagaagtggaccaagtgaaacgtctcacaggcccaggacttagcgaggggccagagccaagcatcagcgtgatggtcacagggggcccctggcctaccaggctctccaggacatgtttgcactacttgggggagtttggagaagaccagatctatgaagcccaccaacaaggccgaggggctctggaggcattgctatgtgggggaccccagggggcctgctcagagaaggtgtcagccacaagagaagagctctagtcctggactctaccctcctctgaaagaagctggggcttgctctgacggtctccactcccgtctgcaggcagccaggagggcaggaagcccttgctctgtgctgccatcctgcctccctcctccagcctcagggcactcgggcctgggtgggagtcaacgccttcccctctggactcaaataaaacccagtgacctcacttcttttctctgcaaaaggtgcttgtggggctgggagtgcagacattggtgtttctgctgatgtcccttgtg

SEQ ID NO: 12317 - protein, 113 aa, Homo sapiens
MMRRCTQPTCPLTCAVMPAELWLTSYGVREVDQVKRLTGPGLSEGPEPSISVMVTGGPWPTRLSRTCLHYLGEFGEDQIYEAHQQGRGALEALLCGGPQGACSEKVSATREEL

SEQ ID NO: 12318 - DNA, 1994 bp, Homo sapiens
agcacacacacatctgcacctcaaccacagactacacttgctgaactggctcctggggccatgaggctgtcactgccactgctgctgctgctgctgggagcctgggccatcccagggggcctcggggacagggcgccactcacagccacagccccacaactggatgatgaggagatgtactcagcccacatgcccgctcacctgcgctgtgatgcctgcagagctgtggcttaccaggtgagtccttcaccactgtcaccctgccctgctcacaccccttctcaagccagacccctccacccacctcacattccaccaccggcctttgatccccaatccctaccactgggcatcaagccacagatgcagcctttcatatattccatgcctcagtttacccatctgcctgcctaacagcagacaatctgggagacctcctcagtattttgagaccccagggaatcactcacttgtccttagacttctccctttccaggcccatccttgagtccggactccctccccaaccctgacggggcggctttggctatgtgtacatggtgcaagtgcacacgtgtgagcgcctgcacgtgagtatgcgtgtgtctggcttcacacacacacctgctgagcatgcctgcgtgccagtgtctctgtgaggtgggggcctgggagtacttgtgtgattgaatattgggctccagtttttcttaccttgctcttgtggtttaaaatggcacgtgccggccgggcgcggtggctcacgcctgtaatcccagcactttgggaggctgagcggggccgatcgcctgaactcaggagttcgagaccagcctggccaacatggtgaaaccccgtcactactgaaaatacaaaattttagccgggtgtggtggcacatacctgtagtcccagctacctgggaggctgagggagaagaatcacttgaacctgggaggtggaggctgcagtgagctgagatcgtaccactgcactccagcctgggcgacgaacggcgtgagactctctctaaataaataaataaataaaaataaaatgacacttgccactgggcaggtgtgccctggacgagggaccccagtgcccaggcctcacctaccacttcagcatttctttcccatcccccatccccatcccagagagctttgggggctgggggaggggccatgcaacagcctcacaggtgcttcctgctcaaacggctctcttgccactttattttccccagagactctgctcctatcctccccacctccccctaactgagcagcagtcctgaggccctgcctcccagtccctccttgttccagatgtggcaaaatctggcaaaggcagagaccaaacttcatacctcaaactctggggggcggcgggagctgagcgagttggtctacacggatgtcctggaccggagctgctcccggaactggcaggactacggagttcgagaagtggaccaagtgaaacgtctcacaggcccaggacttagcgaggggccagagccaagcatcagcgtgatggtcacagggggcccctggcctaccaggctctccaggacatgtttgcactacttgggggagtttggagaagaccagatctatgaagcccaccaacaaggccgaggggctctggaggcattgctatgtgggggaccccagggggcctgctcagagaaggtgtcagccacaagagaagagctctagtcctggactctaccctcctctgaaagaagctggggcttgctctgacggtctccactcccgtctgcaggcagccaggagggcaggaagcccttgctctgtgctgccatcctgcctccctcctccagcctcagggcactcgggcctgggtgggagtcaacgccttcccctctggactcaaataaaacccagtgacctcacttcttttctctgcaaaaggtgcttgtggggctgggagtgcagacattggtgtttctgctgatgtcccttgtg

SEQ ID NO: 12319 - protein, 130 aa, Homo sapiens; identical to SEQ ID NO: 12315

SEQ ID NO: 12320 - DNA, 1065 bp, Homo sapiens
tgaaatggagctgagatggctggagccagggtccagctagaggacaatgcccacgtggcatcttcggggccctggaggagggagtgggaggaggatgggaggggtgaggtgtcagttccccattggtctaggccaggtgttctgtggcggtccccacaccacacaagcacacacacatctgcacctcaaccacagactacacttgctgaactggctcctggggccatgaggctgtcactgccactgctgctgctgctgctgggagcctgggccatcccagggggcctcggggacagggcgccactcacagccacagccccacaactggatgatgaggagatgtactcagcccacatgcccgctcacctgcgctgtgatgcctgcagagctgtggcttaccagatgtggcaaaatctggcaaaggcagagaccaaacttcatacctcaaactctggggggcggcgggagctgagcgagttggtctacacggatgtcctggaccggagctgctcccggaactggcaggactacggagttcgagaagtggaccaagtgaaacgtctcacaggcccaggacttagcgaggggccagagccaagcatcagcgtgatggtcacagggggcccctggcctaccaggctctccaggacatgtttgcactacttgggggagtttggagaagaccagatctatgaagcccaccaacaaggccgaggggctctggaggcattgctatgtgggggaccccagggggcctgctcagagaaggtgtcagccacaagagaagagctctagtcctggactctaccctcctctgaaagaagctggggcttgctctgacggtctccactcccgtctgcaggcagccaggagggcaggaagcccttgctctgtgctgccatcctgcctccctcctccagcctcagggcactcgggcctgggtgggagtcaacgccttcccctctggactcaaataaaacccagtgacctcacttcttttctctgcaaaaggtgcttgtggggctgggagtgcagacattggtgtttctgctgatgtcccttgtg

SEQ ID NO: 12321 - protein, 259 aa, Homo sapiens [sequence omitted]

SEQ ID NO: 12322 - DNA, 865 bp, Homo sapiens
tcccagagagctttgggggctgggggaggggccatgcaacagcctcacaggtgcttcctgctcaaacggctctcttgccactttattttccccagagactctgctcctatcctccccacctccccctaactgagcagcagtcctgaggccctgcctcccagtccctccttgttccagatgtggcaaaatctggcaaaggcagagaccaaacttcatacctcaaactctggggggcggcgggagctgagcgagttggtctacacggatgtcctggaccggagctgctcccggaactggcaggactacggagttcgagaagtggaccaagtgaaacgtctcacaggcccaggacttagcgaggggccagagccaagcatcagcgtgatggtcacagggggcccctggcctaccaggtgatgcccggggcttggggataggatgaagctcctggagccttggtttgccccactgtgggctgggcagcatctgaggctcctgctgggctcccctaggctctccaggacatgtttgcactacttgggggagtttggagaagaccagatctatgaagcccaccaacaaggccgaggggctctggaggcattgctatgtgggggaccccagggggcctgctcagagaaggtgtcagccacaagagaagagctctagtcctggactctaccctcctctgaaagaagctggggcttgctctgacggtctccactcccgtctgcaggcagccaggagggcaggaagcccttgctctgtgctgccatcctgcctccctcctccagcctcagggcactcgggcctgggtgggagtcaacgccttcccctctggactcaaataaaacccagtgacctc

SEQ ID NO: 12323 - protein, 79 aa, Homo sapiens; identical to SEQ ID NO: 12313

SEQ ID NO: 12324 - DNA, 906 bp, Homo sapiens
cacacacacatctgcacctcaaccacagactacacttgctgaactggctcctggggccatgaggctgtcactgccactgctgctgctgctgctgggagcctgggccatcccagggggcctcggggacagggcgccactcacagccacagccccacaactggatgatgaggagatgtactcagcccacatgcccgctcacctgcgctgtgatgcctgcagagctgtggcttaccagagactctgctcctatcctccccacctccccctaactgagcagcagtcctgaggccctgcctcccagtccctccttgttccagatgtggcaaaatctggcaaaggcagagaccaaacttcatacctcaaactctggggggcggcgggagctgagcgagttggtctacacggatgtcctggaccggagctgctcccggaactggcaggactacggagttcgagaagtggaccaagtgaaacgtctcacaggcccaggacttagcgaggggccagagccaagcatcagcgtgatggtcacagggggcccctggcctaccaggctctccaggacatgtttgcactacttgggggagtttggagaagaccagatctatgaagcccaccaacaaggccgaggggctctggaggcattgctatgtgggggaccccagggggcctgctcagagaaggtgtcagccacaagagaagagctctagtcctggactctaccctcctctgaaagaagctggggcttgctctgacggtctccactcccgtctgcaggcagccaggagggcaggaagcccttgctctgtgctgccatcctgcctccctcctccagcctcagggcactcgggcctgggtgggagtcaacgccttcccctctggactcaaataaaacccagtgacctc

SEQ ID NO: 12325 - protein, 130 aa, Homo sapiens; identical to SEQ ID NO: 12315

SEQ ID NO: 12326 - DNA, 699 bp, Homo sapiens
cacacacacatctgcacctcaaccacagactacacttgctgaactggctcctggggccatgaggctgtcactgccactgctgctgctgctgctgggagcctgggccatcccagggggcctcggggacagggcgccactcacagccacagccccacaactggatgatgaggagatgtactcagcccacatgcccgctcacctgcgctgtgatgcctgcagagctgtggcttaccagctacggagttcgagaagtggaccaagtgaaacgtctcacaggcccaggacttagcgaggggccagagccaagcatcagcgtgatggtcacagggggcccctggcctaccaggctctccaggacatgtttgcactacttgggggagtttggagaagaccagatctatgaagcccaccaacaaggccgaggggctctggaggcattgctatgtgggggaccccagggggcctgctcagagaaggtgtcagccacaagagaagagctctagtcctggactctaccctcctctgaaagaagctggggcttgctctgacggtctccactcccgtctgcaggcagccaggagggcaggaagcccttgctctgtgctgccatcctgcctccctcctccagcctcagggcactcgggcctgggtgggagtcaacgccttcccctctggactcaaataaaacccagtgacctc

SEQ ID NO: 12327 - protein, 113 aa, Homo sapiens; identical to SEQ ID NO: 12317

SEQ ID NO: 12328 - DNA, 1920 bp, Homo sapiens
agcacacacacatctgcacctcaaccacagactacacttgctgaactggctcctggggccatgaggctgtcactgccactgctgctgctgctgctgggagcctgggccatcccagggggcctcggggacagggcgccactcacagccacagccccacaactggatgatgaggagatgtactcagcccacatgcccgctcacctgcgctgtgatgcctgcagagctgtggcttaccaggtgagtccttcaccactgtcaccctgccctgctcacaccccttctcaagccagacccctccacccacctcacattccaccaccggcctttgatccccaatccctaccactgggcatcaagccacagatgcagcctttcatatattccatgcctcagtttacccatctgcctgcctaacagcagacaatctgggagacctcctcagtattttgagaccccagggaatcactcacttgtccttagacttctccctttccaggcccatccttgagtccggactccctccccaaccctgacggggcggctttggctatgtgtacatggtgcaagtgcacacgtgtgagcgcctgcacgtgagtatgcgtgtgtctggcttcacacacacacctgctgagcatgcctgcgtgccagtgtctctgtgaggtgggggcctgggagtacttgtgtgattgaatattgggctccagtttttcttaccttgctcttgtggtttaaaatggcacgtgccggccgggcgcggtggctcacgcctgtaatcccagcactttgggaggctgagcggggccgatcgcctgaactcaggagttcgagaccagcctggccaacatggtgaaaccccgtcactactgaaaatacaaaattttagccgggtgtggtggcacatacctgtagtcccagctacctgggaggctgagggagaagaatcacttgaacctgggaggtggaggctgcagtgagctgagatcgtaccactgcactccagcctgggcgacgaacggcgtgagactctctctaaataaataaataaataaaaataaaatgacacttgccactgggcaggtgtgccctggacgagggaccccagtgcccaggcctcacctaccacttcagcatttctttcccatcccccatccccatcccagagagctttgggggctgggggaggggccatgcaacagcctcacaggtgcttcctgctcaaacggctctcttgccactttattttccccagagactctgctcctatcctccccacctccccctaactgagcagcagtcctgaggccctgcctcccagtccctccttgttccagatgtggcaaaatctggcaaaggcagagaccaaacttcatacctcaaactctggggggcggcgggagctgagcgagttggtctacacggatgtcctggaccggagctgctcccggaactggcaggactacggagttcgagaagtggaccaagtgaaacgtctcacaggcccaggacttagcgaggggccagagccaagcatcagcgtgatggtcacagggggcccctggcctaccaggctctccaggacatgtttgcactacttgggggagtttggagaagaccagatctatgaagcccaccaacaaggccgaggggctctggaggcattgctatgtgggggaccccagggggcctgctcagagaaggtgtcagccacaagagaagagctctagtcctggactctaccctcctctgaaagaagctggggcttgctctgacggtctccactcccgtctgcaggcagccaggagggcaggaagcccttgctctgtgctgccatcctgcctccctcctccagcctcagggcactcgggcctgggtgggagtcaacgccttcccctctggactcaaataaaacccagtgacctc

SEQ ID NO: 12329 - protein, 130 aa, Homo sapiens; identical to SEQ ID NO: 12315

SEQ ID NO: 12330 - DNA, 826 bp, Homo sapiens
agcacacacacatctgcacctcaaccacagactacacttgctgaactggctcctggggccatgaggctgtcactgccactgctgctgctgctgctgggagcctgggccatcccagggggcctcggggacagggcgccactcacagccacagccccacaactggatgatgaggagatgtactcagcccacatgcccgctcacctgcgctgtgatgcctgcagagctgtggcttaccagatgtggcaaaatctggcaaaggcagagaccaaacttcatacctcaaactctggggggcggcgggagctgagcgagttggtctacacggatgtcctggaccggagctgctcccggaactggcaggactacggagttcgagaagtggaccaagtgaaacgtctcacaggcccaggacttagcgaggggccagagccaagcatcagcgtgatggtcacagggggcccctggcctaccaggctctccaggacatgtttgcactacttgggggagtttggagaagaccagatctatgaagcccaccaacaaggccgaggggctctggaggcattgctatgtgggggaccccagggggcctgctcagagaaggtgtcagccacaagagaagagctctagtcctggactctaccctcctctgaaagaagctggggcttgctctgacggtctccactcccgtctgcaggcagccaggagggcaggaagcccttgctctgtgctgccatcctgcctccctcctccagcctcagggcactcgggcctgggtgggagtcaacgccttcccctctggactcaaataaaacccagtgacctc

SEQ ID NO: 12331 - protein, 189 aa, Homo sapiens
MRLSLPLLLLLLGAWAIPGGLGDRAPLTATAPQLDDEEMYSAHMPAHLRCDACRAVAYQMWQNLAKAETKLHTSNSGGRRELSELVYTDVLDRSCSRNWQDYGVREVDQVKRLTGPGLSEGPEPSISVMVTGGPWPTRLSRTCLHYLGEFGEDQIYEAHQQGRGALEALLCGGPQGACSEKVSATREEL

SEQ ID NO: 12332 - DNA, 1067 bp, Homo sapiens
cacacacacatctgcacctcaaccacagactacacttgctgaactggctcctggggccatgaggctgtcactgccactgctgctgctgctgctgggagcctgggccatcccagggggcctcggggacagggcgccactcacagccacagccccacaactggatgatgaggagatgtactcagcccacatgcccgctcacctgcgctgtgatgcctgcagagctgtggcttaccaggcccatccttgagtccggactccctccccaaccctgacggggcggctttggctatgtgtacatggtgcaagtgcacacgtgtgagcgcctgcacgtgagtatgcgtgtgtctggcttcacacacacacctgctgagcatgcctgcgtgccagtgtctctgtgaggtgggggcctgggagtacttgtgtgattgaatattgggctccagtttttcttaccttgctcttgtggtttaaaatggcacgtgccggccgggcgcggtggctcacgcctgtaatcccagcactttgggaggctgagcggggccgatcgcctgaactcaggagttcgagaccagcctggccaacatggtgaaaccccgtcactactgaaaatacaaaattttagccgggtgtggtggcacatacctgtagtcccagctacctgggaggctgagggagaagaatcacttgaacctgggaggtggaggctgcagtgagctgagatcgtaccactgcactccagcctgggcgacgaacggcgtgagactctctctaaataaataaataaataaaaataaaatgacacttgccactgggcaggtgtgccctggacgagggaccccagtgcccaggcctcacctaccacttcagcatttctttcccatcccccatccccatcccagagagctttgggggctgggggaggggccatgcaacagcctcacaggtgcttcctgctcaaacggctctcttgccactttattttccccagagactctgctcctatcctccccacctccccctaactgagcagcagtcctgaggccctgcctcccagtccctccttgttc

SEQ ID NO: 12333 - protein, 62 aa, Homo sapiens
MRLSLPLLLLLLGAWAIPGGLGDRAPLTATAPQLDDEEMYSAHMPAHLRCDACRAVAYQAHP

SEQ ID NO: 12334 - DNA, 2269 bp, Homo sapiens
ccccgaggccccggccccgagcagcgccaccttcgggtccacggggcggtcggaacctgagacccgggaaacggcccgcagcacccacgtggtcctggagaaggctaagtctcggccacttcgcgtacgagataattcggcccccgccaaggccccgaggccgtggcccagcctccgcgagcgcgcgattcggcgcgacaagcctgcgcccgggacggagccgctgggtcctgttagttccagcatcttccttcagtcagaggagaagatccaggaggcgcggaagactcggttcccgcgagaggcgccggatcgaactgttcagagggcacggagtccgccttttgagtgtaggatcccctcggaggttccgagtagggctgtgaggccaaggagcccgtccccgccacggcagactccaaatggggctgtacggggtcctcgctgcccgtcgccccagaacctgtccccgtgggatcggactactcggagggtgagtagcccattgttccctgaagcctcctccgagtgggaaaatcaaaatcctgccgtcgaggaaactgtcagcaggagaagcccttcccctccgatcctttcccagtggaatcagtgtgttgctggggaaaggagcccgtccctcgaagccccttccctgtgggagattccacattcggcagtcgcggatgcggtggagccacgtagcagcccgtccccgccggccttcttcccgtgggaggctccagatcgtcctattggaacttggggcccatctccccaagagacatgggatcccatggggccgggctcatcgatagcatttactcaggaagctcagaatgggttaactcaggaggagttggcaccgcctacaccgtccgcacccggcactccagaaccaacagagatgcagagtccatccacgcgggaaatttcagatcttgcctttggagggagtcagcagtccccagaggtagcagcacccgagccgcccggcagccaccctgtgggcaccctggacgcggataagtgcccggaagtcttgggtcctggagaggcggcctcgggacgcccgcgcatggccattccgcggcctcgagacgtgcgcaagttggtgaagaccacgtacgcgccaggcttcccggcaggagcacaaggctctgggctgcctgcgcctcctgccgacccctgcggggaggagggcggcgaatccaagacgcaagagccgccagcactggggccccccgccccggctcactacacttccgttttcatcaaggattttctaccggtggtgccgcacccctacgagcctcctgaaccgtccttcgacacggtcgcccgggacgcctcacagcccaacggggtcctgcggcggagggcagagaacagcacggcgaagcccttcaagcgcacagagatccgcctgcctggggccctggccttgggtcgccggcccgaggtaacctcgcgagtgcgagcgcgcggccctggaggagagaacagggatgtagaggcccagcgcctggtccccgacggcgacggtcggaccagccctctaggcggcgcccgcagctcatcccagcgctcccccgtagggccagcaggggtccgatcgccccgccccggctcccctcagatgcaagccagcccgagccctgggatagcacccaaaccgaagacaccacctacggcccccgagcccgcggctgccgtccaggcgccactcccgcgggagcccctggcgttggcgggcaggacggccccagcccagccccgcgctgcctcggcgcctcccacggaccggtccccgcaaagcccctcccagggagcgcgcaggcagcccggggccgcgcccctggggaaggtcttggtggaccccgagagcggccgctactactttgtggaggcgccgcggcagcctcggctgcgggtgctcttcgaccctgagagtgggcagtacgtggaggtgttgctgccgccctcgtctcccgggccgccccaccgcgtctacacccctctggccctggggctcggcctctacccgcccgcctatgggcctatacccagcctctctctgccaccgtccccgggcccgcaggccctcggcagcccccagctaccctgggtctctgaggcagggcccctggacgggacctactacctgccggtgagcgggacccccaaccccgcacctcctctgctcctctgtgcgccgccctccagctcaggtcccacccagcccggcaagggttcattgttcccgctgtga

SEQ ID NO: 12335 - protein, 491 aa, Homo sapiens [sequence omitted]

SEQ ID NO: 12336 - DNA, 1117 bp, Homo sapiens
atgggctactcaccctccgagcttgtcgcgccgaatcgcgcgctcgcggaggctgggccacggcctcggggccttggcgggggccgaattatctcgtacgcgaagtggccgagacttagccttctccaggaccacgtgggtgctgcgggccgtttcccgggtctcaggttccgaccgccccgtggacccgaaggtggcgctgctcggggccggggcctcggggctcagttttctggccaacgccgtctgcacgaagcccgcggcggcctgcagggggcccagcgactcgtccagggaaccggtgcgcaggagcagccgggggcgcggcgcgccggccgcccttgggggactctggggccgggggcgcagctcgatctgacgcttgggcactgtccggggcctggcgggcgcggcgccctcctccagagccacctccacacactcgaactgcgctggggcggcaggacttggcccacggggccgcagctctaggtaggtggcccagcgggagccaccatcggggacctgggactggcgtgggaccgcggcgggagacgctggccccggcggcaaggggctgatgaaggccggctccgtgaactgttgttgcgcctcgcgatcgtctgcgccggagcagccgaacaggggtccgacgccgaagatgacttccatctcccccgacggcagcgtgcgcagctggggctggggtggccgtgggccggaacctgggcctcgcgggaaacccgagccgggcccgtgccgctggcggctattctgggcgctgacggacaggcgaggctgcgcgcccgccccccgcccaggagccacccagggccaattcgctgggcctttcgcgtccggcccaacgtccgggggctccggagaacctggagccgtgtagtaggagcctgacgaaccggaggagtcctggcgccgcgcgggggccgtgggcagctgcctcgggatcccaggcagggctggcggggcgagcgcggtcagcatggtggggccggacgccgtgcactatctccctcgcattcgcctccgctggtggcgccggcactgtccccgccccgcccgaggatgccgtgggggtcaccgcgccttaaagcggccg

SEQ ID NO: 12337 - protein, 163 aa, Homo sapiens [sequence omitted]

SEQ ID NO: 12338 - DNA, 906 bp, Homo sapiens
atttccaactagctggcgggggcggaagatggcgacgcccctcgggtggtcgaaggcggggtcaggatctgtgtgtctcgctttagatcaactgcgggacgtgattgagtctcaggaggaactaatccaccagctgaggaacgtgatggttctccaggacgaaaattttgtcagtaaagaagagttccaggcagtggagaagaagctggtggaagagaaagctgcccatgccaaaaccaaggtcctcctggccaaggaagaggagaagttacagtttgccctcggagaggtagaggtgctatccaagcagctggagaaagagaagctggcctttgaaaaagcgctctccagtgtcaagagcaaagtccttcaggagtccagcaagaaggaccagctcatcaccaagtgcaatgagattgagtctcacattataaagcaagaagatatacttaatggcaaagagaatgagattaaagagttgcagcaagttatcagccagcagaaacagatcttcagcccaccaccagccggctccgttgcaggaatcacatgtctgacttccggatccagaagcagcaggagagctacatggcccaggtgctggaccagaagcataagaaagcctcagggacacgtcaggcccgcagccaccagcatcccagggaaaaataaaatggccgccgctttcctgttctctggctgtaatccccagcctctgccttctctgctctgggagtccccagcctctagcccctgctacttccctccctcttggatagtggtaggggtccacaaggtgggggcttgtagcctaggggaggagctgggtctttgttgtctggtaggcaccaccgcttcctttgggtatttaatcccttcctatataaacagccctggttacccagt

SEQ ID NO: 12339 - protein, 291 aa, Homo sapiens
MATPLGWSKAGSGSVCLALDQLRDVIESQEELIHQLRNVMVLQDENFVSKEEFQAVEKKLVEEKAAHAKTKVLLAKEEEKLQFALGEVEVLSKQLEKEKLAFEKALSSVKSKVLQESSKKDQLITKCNEIESHIIKQEDILNGKENEIKELQQVISQQKQIFSPPPAGSVAGITCLTSGSRSSRRATWPRCWTRSIRKPQGHVRPAATSIPGKNKMAAAFLFSGCNPQPLPSLLWESPASSPCYFPPSWIVVGVHKVGACSLGEELGLCCLVGTTASFGYLIPSYINSPGY

SEQ ID NO: 12340 - DNA, 682 bp, Homo sapiens
gcggaagatggcgacgcccctcgggtggtcgaaggcggggtcaggatctgtgtgtctcgctttagatcaactgcgggacgtgattgagtctcaggaggaactaatccaccagctgaggaacgtgatggttctccaggacgaaaattttgtcagtaaagaagagttccaggcagtggagaagaagctggtggaagagaaagctgcccatgccaaaaccaaggtcctcctggccaaggaagaggagaagttacagtttgccctcggagaggtagaggtgctatccaagcagctggagaaagagaagctggcctttgaaaaagcgctctccagtgtcaagagcaaagtccttcaggagtccagcaagaaggaccagctcatcaccaagtgcaatgagattgagtctcacattataaagcaagaagatatacttaatggcaaagagaatgagattaaagagttgcagcaagttatcagccagcagaaacagatcttcagcccaccaccagccggctccgttgcaggaatcacatgtctgacttccggatccagaagcagcaggagagctacatggcccaggtgctggaccagaagcataagaaagcctcagggacacgtcaggcccgcagccaccagcatcccagggaaaaataaaatggccgccgctttcctgttctctggctgt

SEQ ID NO: 12341 - protein, 224 aa, Homo sapiens
MATPLGWSKAGSGSVCLALDQLRDVIESQEELIHQLRNVMVLQDENFVSKEEFQAVEKKLVEEKAAHAKTKVLLAKEEEKLQFALGEVEVLSKQLEKEKLAFEKALSSVKSKVLQESSKKDQLITKCNEIESHIIKQEDILNGKENEIKELQQVISQQKQIFSPPPAGSVAGITCLTSGSRSSRRATWPRCWTRSIRKPQGHVRPAATSIPGKNKMAAAFLFSG

SEQ ID NO: 12342 - DNA, 3043 bp, Homo sapiens
aaagcggttggcagcagcggcgcttggaggaaaggaagccggttggagggcgcagcgcacccctgctgcgcggaggagggggctgagctgaactcagcagaagttacatgcacaaggcaaaaattctgacgttctcaagagaccagctctgcccccgtggctcaactgaccctaccatgtggacgctgctcctccaggtgggaactggagttttgaaataaaatggatgatttgacgttacttgatcttctggagtgccctgtgtgctttgagaagctcgatgtcacagccaaagtcctcccttgccagcacaccttctgcaaaccatgtctacagagggttttcaaggcccacaaagagctgcggtgccccgaatgcaggacgcctgtgttttccaacattgaggcgctgccggccaacctgctgctcgtgcgccttctggatggagtgcgctcagggcagagctccgggagagggggctccttccgcaggcctggcacgatgaccttgcaggatggcaggaaaagcaggaccaaccccagacgtctgcaggccagtcctttccggctagtgcctaatgtcagaatccacatggatggggtgcctcgagcaaaggccttatgcaactacagagggcagaatcccggtgacctaaggtttaataagggagatatcatccttctccggagacagcttgatgagaattggtaccagggggaaatcaatggcatcagcgggaacttcccagccagctccgtggaagtcatcaagcagctgccccagccgcccccgctctgcagggccctctacaacttcgacctacgaggcaaggacaagagtgagaaccaggattgcctgaccttcctcaaggacgatatcatcactgtgatcagccgagtggatgagaactgggcagaaggcaagttaggagataaagtaggcatcttccctatcttgtttgtagagccaaacctcaccgcaagacaccttttagagaagaacaaaggtcgccagtcatcccgcacaaaaaacctgtccctggtgtcctcgtcctccagaggcaacacgtctaccctccgtaggggcccagggtccaggaggaaggtgcctgggcagttttccatcacaacagccttgaacactctcaaccggatggtccattctccttcagggcgccatatggtagagatcagcaccccagtgctcatcagctccagcaacccctctgtgatcacccagcccatggagaaagcagacgttccttccagctgtgtgggacaggtcagcacttatcaccccgcacctgtctctccaggacattccacagccgtggtcagtctgcctggctcccagcaacacctctcagcgaacatgtttgtagccctgcactcctactcagcccatggacccgatgagctggacctgcaaaagggagaaggcgtcagggtcctggggaagtgccaggacggctggctcaggggcgtctccttggtcaccgggcgagtcggcatcttcccaaacaattacgtcatccccattttcagaaagacctctagttttccagactcccggagccctggtctctacaccacatggacgttatccacctcctctgtgtcctcccaaggcagcatttcagaaggtgatccacggcaaagccgtcccttcaaatccgtctttgtgcccactgccatagtcaaccccgtgagaagcacagccggccctgggactttaggacaagggtctcttcggaaagggcggagcagcatgagaaagagtaagtggtggcagagagatggatccctgcagagacccctccagtccgggatccccactctcgtggtaggctccctcagacgcagccccaccatggtccttcggcctcagcagttccaattctaccagccacaggggatcccctcctccccctcagccgtggtggtggagatggggtccaagcctgccctcacgggggagcccgccctcacgtgcatcagcaggggcagtgaggcctggatccactccgcggccagctccctcattatggaagacaaagaaatccccatcaagagtgagcctctgccaaaaccgcccgcatctgccccaccatccatcctggtgaaaccagaaaactcaagaaatggcatcgaaaagcaagtcaaaaccgtgagatttcagaattacagccctcctcccaccaaacattacacctcccatcccacctccggaaagcctgaacagccagccaccctcaaggcgtcccagcctgaagcagcgtccttgggcccagagatgaccgtcctatttgcccaccgaagtggctgccactccggacagcagacagacctccggagaaagtcagctcttggcaaggccacaaccctggtgtccactgcctcaggcacgcagaccgtgtttcccagcaaatgaacctacgggtggcttttcctagaccccaaagaggtgaattgcatttaaatacagtctgcctccactgagggcatcctgccattctttggggacttgagcatgggtccttgttcttcctatttcacctccaggaaagcaaaagtgggagcagaaattcctgccctgggtgggaggatagatggcgtggccttccaaacatacaaacataatgatttgatgccacaaagctcgcttactcagaccaaggagtgaaaaattgtcgtgcccactttatgccccagcatggagtatgtggcctcttgtcatccccgtgttactgtgtagaatttctatggtgtcctaaagggggctgcagcaggggtgtgacaacggtgggattgttggcgttgcttctttgaccttacaatatcctcaacaagcattagaacaacttctgccatcttctggggcctgtacactggccactagtagctgccatatctttttccctctgtaaagtcataatcctggctgcaaagggaggatttctgcgcggggtgtgaggtggatactttgaacattctgagaacccaataaaactagaaggagccagcttcctgagtatgctccactt

SEQ ID NO: 12343 - protein, 735 aa, Homo sapiens
MDDLTLLDLLECPVCFEKLDVTAKVLPCQHTFCKPCLQRVFKAHKELRCPECRTPVFSNIEALPANLLLVRLLDGVRSGQSSGRGGSFRRPGTMTLQDGRKSRTNPRRLQASPFRLVPNVRIHMDGVPRAKALCNYRGQNPGDLRFNKGDIILLRRQLDENWYQGEINGISGNFPASSVEVIKQLPQPPPLCRALYNFDLRGKDKSENQDCLTFLKDDIITVISRVDENWAEGKLGDKVGIFPILFVEPNLTARHLLEKNKGRQSSRTKNLSLVSSSSRGNTSTLRRGPGSRRKVPGQFSITTALNTLNRMVHSPSGRHMVEISTPVLISSSNPSVITQPMEKADVPSSCVGQVSTYHPAPVSPGHSTAVVSLPGSQQHLSANMFVALHSYSAHGPDELDLQKGEGVRVLGKCQDGWLRGVSLVTGRVGIFPNNYVIPIFRKTSSFPDSRSPGLYTTWTLSTSSVSSQGSISEGDPRQSRPFKSVFVPTAIVNPVRSTAGPGTLGQGSLRKGRSSMRKSKWWQRDGSLQRPLQSGIPTLVVGSLRRSPTMVLRPQQFQFYQPQGIPSSPSAVVVEMGSKPALTGEPALTCISRGSEAWIHSAASSLIMEDKEIPIKSEPLPKPPASAPPSILVKPENSRNGIEKQVKTVRFQNYSPPPTKHYTSHPTSGKPEQPATLKASQPEAASLGPEMTVLFAHRSGCHSGQQTDLRRKSALGKATTLVSTASGTQTVFPSK

SEQ ID NO: 12344 - DNA, 1541 bp, Homo sapiens
atttaggtgagctgccacgtccggaggagggcagcaagaatgaaagacctctagttttccagactcccggagccctggtctctacaccacatggacgttatccacctcctctgtgtcctcccaaggcagcatttcagaaggtgatccacggcaaagccgtcccttcaaatccgtctttgtgcccactgccatagtcaaccccgtgagaagcacagccggccctgggactttaggacaagggtctcttcggaaagggcggagcagcatgagaaagagtaagtggtggcagagagatggatccctgcagagacccctccagtccgggatccccactctcgtggtaggctccctcagacgcagccccaccatggtccttcggcctcagcagttccaattctaccagccacaggggatcccctcctccccctcagccgtggtggtggagatggggtccaagcctgccctcacgggggagcccgccctcacgtgcatcagcaggggcagtgaggcctggatccactccgcggccagctccctcattatggaagacaaagaaatccccatcaagagtgagcctctgccaaaaccgcccgcatctgccccaccatccatcctggtgaaaccagaaaactcaagaaatggcatcgaaaagcaagtcaaaaccgtgagatttcagaattacagccctcctcccaccaaacattacacctcccatcccacctccggaaagcctgaacagccagccaccctcaaggcgtcccagcctgaagcagcgtccttgggcccagagatgaccgtcctatttgcccaccgaagtggctgccactccggacagcagacagacctccggagaaagtcagctcttggcaaggccacaaccctggtgtccactgcctcaggcacgcagaccgtgtttcccagcaaatgaacctacgggtggcttttcctagaccccaaagaggtgaattgcatttaaatacagtctgcctccactgagggcatcctgccattctttggggacttgagcatgggtccttgttcttcctatttcacctccaggaaagcaaaagtgggagcagaaattcctgccctgggtgggaggatagatggcgtggccttccaaacatacaaacataatgatttgatgccacaaagctcgcttactcagaccaaggagtgaaaaattgtcgtgcccactttatgccccagcatggagtatgtggcctcttgtcatccccgtgttactgtgtagaatttctatggtgtcctaaagggggctgcagcaggggtgtgacaacggtgggattgttggcgttgcttctttgaccttacaatatcctcaacaagcattagaacaacttctgccatcttctggggcctgtacactggccactagtagctgccatatctttttccctctgtaaagtcataatcctggctgcaaagggaggatttctgcgcggggtgtgaggtggatactttgaacattctgagaacccaataaaactagaaggagccagcttcctgagtatgctccactt

SEQ ID NO: 12345 - protein, 220 aa, Homo sapiens
MRKSKWWQRDGSLQRPLQSGIPTLVVGSLRRSPTMVLRPQQFQFYQPQGIPSSPSAVVVEMGSKPALTGEPALTCISRGSEAWIHSAASSLIMEDKEIPIKSEPLPKPPASAPPSILVKPENSRNGIEKQVKTVRFQNYSPPPTKHYTSHPTSGKPEQPATLKASQPEAASLGPEMTVLFAHRSGCHSGQQTDLRRKSALGKATTLVSTASGTQTVFPSK

SEQ ID NO: 12346 - DNA, 957 bp, Homo sapiens
aggtgagctgccacgtccggaggagggcagcaagaatgaaagacctctagttttccagactcccggagccctggtctctacaccacatggacgttatccacctcctctgtgtcctcccaaggcagcatttcagaaggtgatccacggcaaagccgtcccttcaaatccgtctttgtgcccactgccatagtcaaccccgtgagaagcacagccggccctgggactttaggacaagggtctcttcggaaagggcggagcagcatgagaaagagtaagtggtggcagagagatggatccctgcagagacccctccagtccgggatccccactctcgtggtaggctccctcagacgcagccccaccatggtccttcggcctcagcagttccaattctaccagccacaggggatcccctcctccccctcagccgtggtggtggagatggggtccaagcctgccctcacgggggagcccgccctcacgtgcatcagcaggggcagtgaggcctggatccactccgcggccagctccctcattatggaagacaaagaaatccccatcaagagtgagcctctgccaaaaccgcccgcatctgccccaccatccatcctggtgaaaccagaaaactcaagaaatggcatcgaaaagcaagtcaaaaccgtgagatttcagaattacagccctcctcccaccaaacattacacctcccatcccacctccggaaagcctgaacagccagccaccctcaaggcgtcccagcctgaagcagcgtccttgggcccagagatgaccgtcctatttgcccaccgaagtggctgccactccggacagcagacagacctccggagaaagtcagctcttggcaaggccacaaccctggtgtccactgcctcaggcacgcagaccgtgtttcccagcaaatgaacctacgggtggcttttcctagaccccaaagag

SEQ ID NO: 12347 - protein, 220 aa, Homo sapiens; identical to SEQ ID NO: 12345

SEQ ID NO: 12348 - DNA, 725 bp, Homo sapiens; identical to SEQ ID NO: 1194

SEQ ID NO: 12349 - protein, 177 aa, Homo sapiens; identical to SEQ ID NO: 1195

SEQ ID NO: 12350 - DNA, 436 bp, Homo sapiens
cagtggcaggacgacaatcacagcaattgtccagactggcgggggctggagcaccggtctcttcagtgtctgcagagataggagaatttgcattatggagagtgtctttgttggccgttgttacctgggtccacctttgcactgagaattggcaccagggagagacataaaatacagggcacactgtgtgaagactggctggcggtgcactgctgttgggctttttccatctgccaggtggcccgggaactcaagatgaggacctcccaagtctatgaaatctgtgcagtcccaatgactaaggacaccctggtttgacagcaagataactcctcctccttactccccaacaccctcctctcaaacctctcagtggaacaattgctttttcctaagtttttactgaaatggtatgaaaataaatgatttcccccct

SEQ ID NO: 12351 - protein, 55 aa, Homo sapiens
VAGRQSQQLSRLAGAGAPVSSVSAEIGEFALWRVSLLAVVTWVHLCTENWHQGET

SEQ ID NO: 12352 - DNA, 5385 bp, Homo sapiens
atttccttaaatgccttaaagctagtagttgcaaacttgggatatgaacttgcttctgtctgtcttgaaagtctgttctcataaccattttaccatgttgtcttgttttcgagtagggcaaaatggttaaaggaaaagtagattaaaagaaaaggataaatatctttggagtcatcctacgcactggtattataaagatgaatgagacctgatccttattgtctagcaagagagacaaacacccagtttctaagcacaataatagagacaaggagaattcagagatgtcatgtgacttctgggtttcttttttttttttcctgagacagagtctcgcactgtcactcaggctggagtgcaatggcacaatctcagctcactgcagcctctgccaggttcaagctattcttctgccccagcctccctactagctgggattacaggtgcctgccaccacgtctggccaattttttgtatttttagtagagatggggtttcactgtgttggccaggctggtctcgaactcatgaccttgtgatccacctgcctcagtctcccaaagtgctgggattacaggcgtgagccaccacgcccggccaaattctgggtttcttgaaaaataaacaatgttttcagggagaggagaaagtgtggataagccatggaaagggtctgatatttatttgaagtacattatcttgtgggcagaggtaggaaatgaaacaggttggggccagattaggccaaattaagaagaacctggattggtatgagaaaatttttttctgatatccagtattagttattgtaaatgcaataattaaaacctggctatggccaggcactgtggctcacgcctgtaaaccaggcactttgaaaggctgaggtgggaggattgcttgagcccaggagtttgagaccagccagggcaacaaagtgagatcctgtctctacaaaaaaaaaaaaaattagctgggtgtggtggcttgcgcctgtagtcctagtacttgggaggctgaggtgagaagattctttgagcctaggagtttgaggctgcagtgagttgtgatcataccactgcattctagcctaggtgacagagaccctgtctcaaaaaaaaaaaaaaaaaaaaaaaaaaacttggctacaaccttagttaggctattttcatgttgcattttgggctttataagaataaagtgtccatcaggaaatttctgaagaagcatcatttattgtcataaacaggagccctaagcagtgtcagatgacagtacttaaggatggatagacaatagagagattgcagtaatttgttttaaggaacgcaaagatggtgttgtgttgagcagttttaaatgttctgggcattgttctcattttactgcttaaatgagcagtatttcaaatttgtatattaaaaagcagtattttaaatttgtgtatgcagcagttttttatagctatgtataagtgcctttaaactcaataacctttttttccccgtattcaatagtgaattgaatgcaggaattataaaaacagatcaaaactatgaaaagatgatgtttaaagaagctttgaaaacagggttttttgagtttcaggtaggctgttgattcttttggtagctataaaacatgtcaatgtgaacattatgtattttcccccttttttcttcctgctatagcacaattactcgcctaaagtgtagactgaaaatcctgccagaaaaattttaaattcttcaataaattgtgattttaagttattatctttggtattttttctattgtgtccatttaatttaataattctgctcctagttaagctatgagcattaatataaaggagattaaatctaaaattcagctatactttccaggaaaacatttcaaaattgataaaaacaaaggcaaaattgtaattaattgccattaatttgagagcaagcgttttctgaggttttccacaaggtgtcagtatttcctcaagtttggcatttaaagtgcttaaagtaaaaatgtagctttacgcaatgagctgtgtaaaatatcacattgagttttatataacttggttttcagagttgtggttaaataaggataaatggctgggcatagcaatgtgttgtatttatagtctttttttatatttaatatcctatatgctgctaagagcagtcacccttaatatacagttaaagttgttcaacttttatgtctcagttacaaactgtctgtaaaaaaattctttttttgagaattattagtataaaactgccatatactttggacaaagataaatacttgcagattcttaaagtaaaacctttacagtaatttgttatggatttttaaaagactagaaacttaaaaatgtgttaaaaccaagatactgcaatttttccctttatttttattttaaagaaggtgagggaaatggtaaataatttcaaattttataggccgcaaaagataagtaccgtgaattggctgtggaagggatgcacagagaacttgtgttccggtttattgaagttcagacacttctcctcgctccattctgtccacatttgtgtgagcacatctggacactcctgggaaagcctgactcaattatgaatgcttcatggcctgtggcaggtcctgttaatgaagttttaatacactcctcacagtatcttatggaagtaacacatgaccttagactacgactcaagaactatatgatgccagctaaagggaagaagactgacaaacaacccctgcagaagccctcacattgcaccatctatgtggcaaagaactatccaccttggcaacataccaccctgtctgttctacgtaaacactttgaggccaataacggaaaactgcctgacaacaaagtcattgctagtgaactaggcagtatgccagaactgaagaaatacatgaagaaagtcatgccatttgttgccatgattaaggaaaatctggagaagatggggcctcgtattctggatttgcaattagaatttgatgaaaaggctgtgcttatggagaatatagtctatctgactaattcgcttgagctagaacacatagaagtcaagtttgcctccgaagcagaagataaaatcagggaagactgctgtcctgggaaaccacttaatgtttttagaatagaacctggtgtgtccgtttctctggtgaatccccagccatccaatggccacttctcaaccaaaattgaaatcaggcaaggagataactgtgattccataatcaggcgtttaatgaaaatgaatcgaggaattaaagacctttccaaagtgaaactgatgagatttgatgatccactgttggggcctcgacgagttcctgtcctgggaaaggagtacaccgagaagacccccatttctgagcatgctgttttcaatgtggacctcatgagcaagaaaattcatctgactgagaatgggataagggtggatattggcgatacaataatctatctggttcattaaactcatgcacattggagatttatcctggtttcttaggaatactactactctgattgtgtctactgattggctatcagaaccttaggctggacctaaatagattgatttcatttctaaccatccaattctgcatgtattcataattctatcaagtcatctttgattcctggacctaataaattttttttccctttctttgggtgtccaagagaaatggtttttgccaaactctttttaaaaaacaaattgttgctatttcctagaagtttctggtttttaagatgaacataaaagtgtcagtatgcttcttttatgaggtgtactttatactttgatgaaggctaaggtgtacctaacagctttttatagtatattcatttatggagttagctgtatttttttttaaaaaagaaaagtagtaaattagcagcttttttttttaaatgaagagaacttcatgatgatttaaaagaactaatgagaatattttgacttgacttcaattactaagtattttgtataaagaacaaataggtcctgcattttataagactttttaaagctttaattattcaactaagaaccaataatggcttcttcaaggctaatatcaatagtttataagcagtatatttcacctacactaaatatgggcattttaaaagaagattccccccttcccccccagaaatctgcatttactaaatttgtcttaagtccaattgtgtttaaaggtcatgctggtcgggtgtggtggctcacacctataatcccagcactttgggaggccaaggtgggcagtcacctgaggtcaggagtttgagaccagcctgaccaacatggtgaaaccccgtctctactaaaaatacaaaaattagcttggcatggtggcgggtacctgtaatcccagctgcttgggagtgtgaggcaggagaatcgcttgaacctgggagaccgaggttgcagtgagctgaaaccgtgccattgcactccagcttaggcaacaagagtgaaactctgtctcaatcaatccatcaatcaatcaataaaatagaggtcatgctgactattacagatttattcttttattcttgttggagtgtcttttaatatctgcgccatctgtcttcatatgaggaaaaaatgtaaggcattgactaacaggagaaacatttctaattttgatgggtttaatatggagaaagaacaattttgataacccagaggaacctgaattctaactgcggttatgtaaatagagtttattgagcttccttattttgctctccgcagttagggaccactaggcctagtcatatggtttatcacagatttattgaagccaatcataggatgttagaattagaaatcatcaagtgcaaataatcacttatctactagggacaggcactatagcatagtggggtaagagcgcatgctctgaaatcagactagctaggttagatttccagttcttctttttgctactaggatgctcttggccaattactcggagctgcagttcttcatctataaaatggaactaatactggtaccttgtaggcttattgtgagacgtttaggtgaactgatctaggaaaatcataacacagtgcctggcaagtagtaagtctttagtgaatgttaccattgaagaagaagaagatgatggataccaaggtatattggcttcagattactgtagtctgtaatcatgtcctttgtgttggttcctttggggcaactgattctttctttgcactcctctagattcttttgctgtcctctctgatctgcaaagccttaattatttctgaaattaagtaatactttctgttgcctaaacacaaacctacttgtgtttaacttagga

SEQ ID NO: 12353 - protein, 334 aa, Homo sapiens
MHRELVFRFIEVQTLLLAPFCPHLCEHIWTLLGKPDSIMNASWPVAGPVNEVLIHSSQYLMEVTHDLRLRLKNYMMPAKGKKTDKQPLQKPSHCTIYVAKNYPPWQHTTLSVLRKHFEANNGKLPDNKVIASELGSMPELKKYMKKVMPFVAMIKENLEKMGPRILDLQLEFDEKAVLMENIVYLTNSLELEHIEVKFASEAEDKIREDCCPGKPLNVFRIEPGVSVSLVNPQPSNGHFSTKIEIRQGDNCDSIIRRLMKMNRGIKDLSKVKLMRFDDPLLGPRRVPVLGKEYTEKTPISEHAVFNVDLMSKKIHLTENGIRVDIGDTIIYLVH

SEQ ID NO: 12354 - DNA, 3227 bp, Homo sapiens
attttatttcataaaaccaagacaatttcttatgccttcttgtatttagaataaaattacattttttccttcaacaataaaacgaagattttggagtagaggaataaaataattttttttttgagacagagtccaggctggagtgcagcggcacgaactcagcttgctgcatcctctgcctctaaggttcaagcaattctcctgtctcagcctcccgaatattttttattttttttgagacagaggtttgctcttgttgcccaggctggaatgcaatggtgtgatctcagctcactgcaacctccgcctcctgggttcaagcgattctcctgcctcagcctcccgagtagctgggattacaggtgtgcaccactacgcctggctaatttagtatttttagtagagacggggtttaaccgtgttagccaggctggtctcaaactcctgacctcaggtgatccacccgccttggcctcccaaagtgctgagattacaggcatgagccaccgtgcccagcccagaggaataagataaatttaatgtggttcttacactacttgtcatccactgttattacttacctaatttatttatttatttttctacagagtctcactctgtcattcaggctggagtgcaatggcatgatcttggctcactgcagtctcaacttcgcagactcacgtgatcctcacacttccgagtagctgggactagccacatgtcaccttgcctggctaattttgtttattttttgtagagacgaggtctcactttgttgcccaggctggtctcaaactcctggactcaagcgatcctcctgtcttggcctcccaaagtactcggattacaggtatgagccaccgtgcctggccctagtatttttctctattgtttacaatgcatttgtaggcaaattggtatctcagaagtattctttaccaataagttgaatcttcattcctttgcaccaatttttttcacatttgttaggtttttaaaaattacaaataagtattgacatcaagagcttatgccaggtactttttaaatcacttttaataactctttttactatagcttttcgaggaaggtctttaatatccatgtctgtaggcagggaagtgtactgaggaataaagaggaagaaatcataatccaaagctacccagctaatgaagatagtacaagtatgcaaacccagagagattggctccacaactcttgctctcaaccccccatatgatctcattgctagaatgaatgaatgacatgtacatagtttgaaaatttaaagaatacataaaggcaaaaagttaaaagtgaactttcatccttgcctgcacactactctatttcccaaaattcatcatgatgctattggtttcttgtgattttatataccagcatctgatatctctatttgttaatgtatataaagataccacattgtttacactgttctgtcttgttttcacatgtatatgtgtgtatatatgtgtatatatatgtgtgtgtgtatatatatgtgtgtgtgtgtatatatatgtgtgtatatttatatgtgtgtgtgtgtatatatacatttttttgagagggagtcttgctttgtcgcctaggctggagtgcagtggcgcgatcttggcttaccgcaacctccacctcccaggttcaagcaactgtctgcctcagcctccccagcagctgggatcacaggcgccagccaccacacccggctaatatttgtatttttagtagagatggggcttcaccctcctggccaggctggtcttgaactcctggcctcatgatccacccgccttggcctcccaaagtgctgggattacgggcgtgagccactgcgcccagccttcacatatatttttaagatctttttatatccatacgtgtagccccacctaagtagttacgtcattgtatacctgtatcctagtttatgtagccagtcctttgatttgttttcacttcccattacaaaaaggactatagtgtatatccttgcacttttatcttagcaagcctttatgagtctattagcttttacctcaaaattttaagccagaactatcatctttgtttttttattttctatctttaaacatttatctgtgaagtgacaaatggcctacagctgtgagagcaaatggacatctcctcctgaactctgagaagatgtcaaaatccacaggcaacttcctcactttgacccaagctattgacaaattttcagcagatggaatgcgtttggctctggctgatgctggtgacactgtagaagatgccaactttgtggaagccatggcagatgcaggtattctccgtctgtacacctgggtagagtggtgaaactctgtctcaatcaatccatcaatcaatcaataaaatagaggtcatgctgactattacagatttattcttttattcttgttggagtgtcttttaatatctgcgccatctgtcttcatatgaggaaaaaatgtaaggcattgactaacaggagaaacatttctaattttgatgggtttaatatggagaaagaacaattttgataacccagaggaacctgaattctaactgcggttatgtaaatagagtttattgagcttccttattttgctctccgcagttagggaccactaggcctagtcatatggtttatcacagatttattgaagccaatcataggatgttagaattagaaatcatcaagtgcaaataatcacttatctactagggacaggcactatagcatagtggggtaagagcgcatgctctgaaatcagactagctaggttagatttccagttcttctttttgctactaggatgctcttggccaattactcggagctgcagttcttcatctataaaatggaactaatactggtaccttgtaggcttattgtgagacgtttaggtgaactgatctaggaaaatcataacacagtgcctggcaagtagtaagtctttagtgaatgttaccattgaagaagaagaagatgatggataccaaggtatattggcttcagattactgtagtctgtaatcatgtcctttgtgttggttcctttggggcaactgattctttctttgcactcctctagattcttttgctgtcctctctgatctgcaaagccttaattatttctgaaattaagtaatactttctgttgcctaaacacaaacctacttgtgtttaacttagga

SEQ ID NO: 12355 - protein, 57 aa, Homo sapiens
MSKSTGNFLTLTQAIDKFSADGMRLALADAGDTVEDANFVEAMADAGILRLYTWVEW

SEQ ID NO: 12356 - DNA, 1429 bp, Homo sapiens
tctttttcttatcttaaatatgtactaaagcagaaaggccacctcctatctcttacatccagaaatccacatacctaccccaggcaccaaagcatgtcatatctcaggtgcattgctggtctgctagtaattcatttgacctgttaaatgcaggaataattctagaccattagaattggaaagaaccttctctttagagcagagcgccccaaggttccagcattagttgtggtaacattctgactagagtctgtttcttcagagtaatccttctgtccttttccctctttacccagacatgtctacttttccctctagttcctcaagtagctgaggaaacaaacctctcagtctgttcaaattttatttcataaaaccaagacaatttcttatgccttcttgtatttagaataaaattacattttttccttcaacaataaaacgaagattttggagtagaggaataaaataattttttttttgagacagaaatcgcttgaacctgggagaccgaggttgcagtgagctgaaaccgtgccattgcactccagcttaggcaacaagagtgaaactctgtctcaatcaatccatcaatcaatcaataaaatagaggtcatgctgactattacagatttattcttttattcttgttggagtgtcttttaatatctgcgccatctgtcttcatatgaggaaaaaatgtaaggcattgactaacaggagaaacatttctaattttgatgggtttaatatggagaaagaacaattttgataacccagaggaacctgaattctaactgcggttatgtaaatagagtttattgagcttccttattttgctctccgcagttagggaccactaggcctagtcatatggtttatcacagatttattgaagccaatcataggatgttagaattagaaatcatcaagtgcaaataatcacttatctactagggacaggcactatagcatagtggggtaagagcgcatgctctgaaatcagactagctaggttagatttccagttcttctttttgctactaggatgctcttggccaattactcggagctgcagttcttcatctataaaatggaactaatactggtaccttgtaggcttattgtgagacgtttaggtgaactgatctaggaaaatcataacacagtgcctggcaagtagtaagtctttagtgaatgttaccattgaagaagaagaagatgatggataccaaggtatattggcttcagattactgtagtctgtaatcatgtcctttgtgttggttcctttggggcaactgattctttctttgcactcctctagattcttttgctgtcctctctgatctgcaaagccttaattatttctgaaattaagtaatactttctgttgcctaaacacaaacctacttgtgtttaacttagga

SEQ ID NO: 12357 - protein, 42 aa, Homo sapiens
MLPLKKKKMMDTKVYWLQITVVCNHVLCVGSFGATDSFFALL

SEQ ID NO: 12358 - DNA, 5583 bp, Homo sapiens
gtgagatgccttggctgtagttagtaaggagccggatgattgcctcagcaggtgtgaagcgtgtgctttagtttcgtgggaggcctggcatccccgagagggaggggaaaggtaaccactcctttgtggaggtcgccagggtcattgtcgtggatttgcacagtcggctgggcggtgcaatggcggaaagaaaaggaacagccaaagtggactttttgaagaagattgagaaagaaatccaacagaaatgggatactgagagagtgtttgaggtcaatgcatctaatttagagaaacagaccagcaagggcaagtattttgtaaccttcccatatccatatatgaatggacgccttcatttgggacacacgttttctttatccaaatgtgagtttgctgtagggtaccagcgattgaaaggaaaatgttgtctgtttccctttggcctgcactgtactggaatgcctattaaggcatgtgctgataagttgaaaagagaaatagagctgtatggttgcccccctgattttccagatgaagaagaggaagaggaagaaaccagtgttaaaacagaagatataataattaaggataaagctaaaggaaaaaagagtaaagctgctgctaaagctggatcttctaaataccagtggggcattatgaaatcccttggcctgtctgatgaagagatagtaaaattttctgaagcagaacattggcttgattatttcccgccactggctattcaggatttaaaaagaatgggtttgaaggtagactggcgtcgttccttcatcaccactgatgttaatccttactatgattcatttgtcagatggcaatttttaacattaagagaaagaaacaaaattaaatttgggaagcggtatacaatttactctccgaaagatggacagccttgcatggatcatgatagacaaactggagagggtgttggacctcaggaatatactttactcaaattgaaggtgcttgagccatacccatctaaattaagtggcctgaaaggtaaaaatattttcttggtggctgctactctcagacctgagaccatgtttgggcagacaaattgttgggttcgtcctgatatgaagtacattggatttgagacggtgaatggtgatatattcatctgtacccaaaaagcagccaggaatatgtcataccagggctttaccaaagacaatggcgtggtgcctgttgttaaggaattaatgggggaggaaattcttggtgcatcactttctgcacctttaacatcatacaaggtgatctatgttctcccaatgctaactattaaggaggataaaggcactggtgtggttacaagtgttccttccgactcccctgatgatattgctgccctcagagacttgaagaaaaagcaagccttacgagcaaaatatggaattagagatgacatggtcttgccatttgagccggtgccagtcattgaaatcccaggttttggaaatctttctgctgtaaccatttgtgatgagttgaaaattcagagccagaatgaccgggaaaaacttgcagaagcaaaggagaagatatatctaaaaggattttatgagggtatcatgttggtggatggatttaaaggacagaaggttcaagatgtaaagaagactattcagaaaaagatgattgacgctggagatgcacttatttacatggaaccagagaaacaagtgatgtccaggtcgtcagatgaatgtgttgtggctctgtgtgaccagtggtacttggattatggagaagagaattggaagaaacagacatctcagtgcttgaagaacctggaaacattctgtgaggagaccaggaggaattttgaagccaccttaggttggctacaagaacatgcttgctcaagaacttatggtctaggcactcacctgccttgggatgagcagtggctgattgaatcactttctgactccactatttacatggcattttacacagttgcacacctattgcaggggggtaacttgcatggacaggcagagtctccgctgggcattagaccgcaacagatgaccaaggaagtttgggattatgttttcttcaaggaggctccatttcctaagactcagattgcaaaggaaaaattagatcagttaaagcaggagtttgaattctggtatcctgttgatcttcgcgtctctggcaaggatcttgttccaaatcatctttcatattacctttataatcatgtggctatgtggccggaacaaagtgacaaatggcctacagctgtgagagcaaatggacatctcctcctgaactctgagaagatgtcaaaatccacaggcaacttcctcactttgacccaagctattgacaaattttcagcagatggaatgcgtttggctctggctgatgctggtgacactgtagaagatgccaactttgtggaagccatggcagatgcaggtattctccgtctgtacacctgggtagagtgggtgaaagaaatggttgccaactgggacagcctaagaagtggtcctgccagcactttcaatgatagagtttttgccagtgaattgaatgcaggaattataaaaacagatcaaaactatgaaaagatgatgtttaaagaagctttgaaaacagggttttttgagtttcaggccgcaaaagataagtaccgtgaattggctgtggaagggatgcacagagaacttgtgttccggtttattgaagttcagacacttctcctcgctccattctgtccacatttgtgtgagcacatctggacactcctgggaaagcctgactcaattatgaatgcttcatggcctgtggcaggtcctgttaatgaagttttaatacactcctcacagtatcttatggaagtaacacatgaccttagactacgactcaagaactatatgatgccagctaaagggaagaagactgacaaacaacccctgcagaagccctcacattgcaccatctatgtggcaaagaactatccaccttggcaacataccaccctgtctgttctacgtaaacactttgaggccaataacggaaaactgcctgacaacaaagtcattgctagtgaactaggcagtatgccagaactgaagaaatacatgaagaaagtcatgccatttgttgccatgattaaggaaaatctggagaagatggggcctcgtattctggatttgcaattagaatttgatgaaaaggctgtgcttatggagaatatagtctatctgactaattcgcttgagctagaacacatagaagtcaagtttgcctccgaagcagaagataaaatcagggaagactgctgtcctgggaaaccacttaatgtttttagaatagaacctggtgtgtccgtttctctggtgaatccccagccatccaatggccacttctcaaccaaaattgaaatcaggcaaggagataactgtgattccataatcaggcgtttaatgaaaatgaatcgaggaattaaagacctttccaaagtgaaactgatgagatttgatgatccactgttggggcctcgacgagttcctgtcctgggaaaggagtacaccgagaagacccccatttctgagcatgctgttttcaatgtggacctcatgagcaagaaaattcatctgactgagaatgggataagggtggatattggcgatacaataatctatctggttcattaaactcatgcacattggagatttatcctggtttcttaggaatactactactctgattgtgtctactgattggctatcagaaccttaggctggacctaaatagattgatttcatttctaaccatccaattctgcatgtattcataattctatcaagtcatctttgattcctggacctaataaattttttttccctttctttgggtgtccaagagaaatggtttttgccaaactctttttaaaaaacaaattgttgctatttcctagaagtttctggtttttaagatgaacataaaagtgtcagtatgcttcttttatgaggtgtactttatactttgatgaaggctaaggtgtacctaacagctttttatagtatattcatttatggagttagctgtatttttttttaaaaaagaaaagtagtaaattagcagcttttttttttaaatgaagagaacttcatgatgatttaaaagaactaatgagaatattttgacttgacttcaattactaagtattttgtataaagaacaaataggtcctgcattttataagactttttaaagctttaattattcaactaagaaccaataatggcttcttcaaggctaatatcaatagtttataagcagtatatttcacctacactaaatatgggcattttaaaagaagattccccccttcccccccagaaatctgcatttactaaatttgtcttaagtccaattgtgtttaaaggtcatgctggtcgggtgtggtggctcacacctataatcccagcactttgggaggccaaggtgggcagtcacctgaggtcaggagtttgagaccagcctgaccaacatggtgaaaccccgtctctactaaaaatacaaaaattagcttggcatggtggcgggtacctgtaatcccagctgcttgggagtgtgaggcaggagaatcgcttgaacctgggagaccgaggttgcagtgagctgaaaccgtgccattgcactccagcttaggcaacaagagtgaaactctgtctcaatcaatccatcaatcaatcaataaaatagaggtcatgctgactattacagatttattcttttattcttgttggagtgtcttttaatatctgcgccatctgtcttcatatgaggaaaaaatgtaaggcattgactaacaggagaaacatttctaattttgatgggtttaatatggagaaagaacaattttgataacccagaggaacctgaattctaactgcggttatgtaaatagagtttattgagcttccttattttgctctccgcagttagggaccactaggcctagtcatatggtttatcacagatttattgaagccaatcataggatgttagaattagaaatcatcaagtgcaaataatcacttatctactagggacaggcactatagcatagtggggtaagagcgcatgctctgaaatcagactagctaggttagatttccagttcttctttttgctactaggatgctcttggccaattactcggagctgcagttcttcatctataaaatggaactaatactggtaccttgtaggcttattgtgagacgtttaggtgaactgatctaggaaaatcataacacagtgcctggcaagtagtaagtctttagtgaatgttaccattgaagaagaagaagatgatggataccaaggtatattggcttcagattactgtagtctgtaatcatgtcctttgtgttggttcctttggggcaactgattctttctttgcactcctctagattcttttgctgtcctctctgatctgcaaagccttaattatttctgaaattaagtaatactttctgttgcctaaacacaaacctacttgtgtttaacttagga

SEQ ID NO: 12359 - protein, 1176 aa, Homo sapiens; identical to SEQ ID NO: 1197

SEQ ID NO: 12360 - DNA, 3707 bp, Homo sapiens
atttccttaaatgccttaaagctagtagttgcaaacttgggatatgaacttgcttctgtctgtcttgaaagtctgttctcataaccattttaccatgttgtcttgttttcgagtagggcaaaatggttaaaggaaaagtagattaaaagaaaaggataaatatctttggagtcatcctacgcactggtattataaagatgaatgagacctgatccttattgtctagcaagagagacaaacacccagtttctaagcacaataatagagacaaggagaattcagagatgtcatgtgacttctgggtttcttttttttttttcctgagacagagtctcgcactgtcactcaggctggagtgcaatggcacaatctcagctcactgcagcctctgccaggttcaagctattcttctgccccagcctccctactagctgggattacaggtgcctgccaccacgtctggccaattttttgtatttttagtagagatggggtttcactgtgttggccaggctggtctcgaactcatgaccttgtgatccacctgcctcagtctcccaaagtgctgggattacaggcgtgagccaccacgcccggccaaattctgggtttcttgaaaaataaacaatgttttcagggagaggagaaagtgtggataagccatggaaagggtctgatatttatttgaagtacattatcttgtgggcagaggtaggaaatgaaacaggttggggccagattaggccaaattaagaagaacctggattggtatgagaaaatttttttctgatatccagtattagttattgtaaatgcaataattaaaacctggctatggccaggcactgtggctcacgcctgtaaaccaggcactttgaaaggctgaggtgggaggattgcttgagcccaggagtttgagaccagccagggcaacaaagtgagatcctgtctctacaaaaaaaaaaaaaattagctgggtgtggtggcttgcgcctgtagtcctagtacttgggaggctgaggtgagaagattctttgagcctaggagtttgaggctgcagtgagttgtgatcataccactgcattctagcctaggtgacagagaccctgtctcaaaaaaaaaaaaaaaaaaaaaaaaaaacttggctacaaccttagttaggctattttcatgttgcattttgggctttataagaataaagtgtccatcaggaaatttctgaagaagcatcatttattgtcataaacaggagccctaagcagtgtcagatgacagtacttaaggatggatagacaatagagagattgcagtaatttgttttaaggaacgcaaagatggtgttgtgttgagcagttttaaatgttctgggcattgttctcattttactgcttaaatgagcagtatttcaaatttgtatattaaaaagcagtattttaaatttgtgtatgcagcagttttttatagctatgtataagtgcctttaaactcaataacctttttttccccgtattcaatagtgaattgaatgcaggaattataaaaacagatcaaaactatgaaaagatgatgtttaaagaagctttgaaaacagggttttttgagtttcaggtaggctgttgattcttttggtagctataaaacatgtcaatgtgaacattatgtattttcccccttttttcttcctgctatagcacaattactcgcctaaagtgtagactgaaaatcctgccagaaaaattttaaattcttcaataaattgtgattttaagttattatctttggtattttttctattgtgtccatttaatttaataattctgctcctagttaagctatgagcattaatataaaggagattaaatctaaaattcagctatactttccaggaaaacatttcaaaattgataaaaacaaaggcaaaattgtaattaattgccattaatttgagagcaagcgttttctgaggttttccacaaggtgtcagtatttcctcaagtttggcatttaaagtgcttaaagtaaaaatgtagctttacgcaatgagctgtgtaaaatatcacattgagttttatataacttggttttcagagttgtggttaaataaggataaatggctgggcatagcaatgtgttgtatttatagtctttttttatatttaatatcctatatgctgctaagagcagtcacccttaatatacagttaaagttgttcaacttttatgtctcagttacaaactgtctgtaaaaaaattctttttttgagaattattagtataaaactgccatatactttggacaaagataaatacttgcagattcttaaagtaaaacctttacagtaatttgttatggatttttaaaagactagaaacttaaaaatgtgttaaaaccaagatactgcaatttttccctttatttttattttaaagaaggtgagggaaatggtaaataatttcaaattttataggccgcaaaagataagtaccgtgaattggctgtggaagggatgcacagagaacttgtgttccggtttattgaagttcagacacttctcctcgctccattctgtccacatttgtgtgagcacatctggacactcctgggaaagcctgactcaattatgaatgcttcatggcctgtggcaggtcctgttaatgaagttttaatacactcctcacagtatcttatggaagtaacacatgaccttagactacgactcaagaactatatgatgccagctaaagggaagaagactgacaaacaacccctgcagaagccctcacattgcaccatctatgtggcaaagaactatccaccttggcaacataccaccctgtctgttctacgtaaacactttgaggccaataacggaaaactgcctgacaacaaagtcattgctagtgaactaggcagtatgccagaactgaagaaatacatgaagaaagtcatgccatttgttgccatgattaaggaaaatctggagaagatggggcctcgtattctggatttgcaattagaatttgatgaaaaggctgtgcttatggagaatatagtctatctgactaattcgcttgagctagaacacatagaagtcaagtttgcctccgaagcagaagataaaatcagggaagactgctgtcctgggaaaccacttaatgtttttagaatagaacctggtgtgtccgtttctctggtgaatccccagccatccaatggccacttctcaaccaaaattgaaatcaggcaaggagataactgtgattccataatcaggcgtttaatgaaaatgaatcgaggaattaaagacctttccaaagtgaaactgatgagatttgatgatccactgttggggcctcgacgagttcctgtcctgggaaaggagtacaccgagaagacccccatttctgagcatgctgttttcaatgtggacctcatgagcaagaaaattcatctgactgagaatgggataagggtggatattggcgatacaataatctatctggttcattaaactcatgcacattggagatttatcctggtttcttaggaatactactactctgattgtgtctactgattggctatcagaaccttaggctggacctaaatagattgatttcatttctaaccatccaattctgcatgtattcataattctatcaagtcatctttgattcctggacctaataaattttttttccctttc

SEQ ID NO: 12361 - protein, 334 aa, Homo sapiens; identical to SEQ ID NO: 12353

SEQ ID NO: 12362 - DNA, 3905 bp, Homo sapiens
gtgagatgccttggctgtagttagtaaggagccggatgattgcctcagcaggtgtgaagcgtgtgctttagtttcgtgggaggcctggcatccccgagagggaggggaaaggtaaccactcctttgtggaggtcgccagggtcattgtcgtggatttgcacagtcggctgggcggtgcaatggcggaaagaaaaggaacagccaaagtggactttttgaagaagattgagaaagaaatccaacagaaatgggatactgagagagtgtttgaggtcaatgcatctaatttagagaaacagaccagcaagggcaagtattttgtaaccttcccatatccatatatgaatggacgccttcatttgggacacacgttttctttatccaaatgtgagtttgctgtagggtaccagcgattgaaaggaaaatgttgtctgtttccctttggcctgcactgtactggaatgcctattaaggcatgtgctgataagttgaaaagagaaatagagctgtatggttgcccccctgattttccagatgaagaagaggaagaggaagaaaccagtgttaaaacagaagatataataattaaggataaagctaaaggaaaaaagagtaaagctgctgctaaagctggatcttctaaataccagtggggcattatgaaatcccttggcctgtctgatgaagagatagtaaaattttctgaagcagaacattggcttgattatttcccgccactggctattcaggatttaaaaagaatgggtttgaaggtagactggcgtcgttccttcatcaccactgatgttaatccttactatgattcatttgtcagatggcaatttttaacattaagagaaagaaacaaaattaaatttgggaagcggtatacaatttactctccgaaagatggacagccttgcatggatcatgatagacaaactggagagggtgttggacctcaggaatatactttactcaaattgaaggtgcttgagccatacccatctaaattaagtggcctgaaaggtaaaaatattttcttggtggctgctactctcagacctgagaccatgtttgggcagacaaattgttgggttcgtcctgatatgaagtacattggatttgagacggtgaatggtgatatattcatctgtacccaaaaagcagccaggaatatgtcataccagggctttaccaaagacaatggcgtggtgcctgttgttaaggaattaatgggggaggaaattcttggtgcatcactttctgcacctttaacatcatacaaggtgatctatgttctcccaatgctaactattaaggaggataaaggcactggtgtggttacaagtgttccttccgactcccctgatgatattgctgccctcagagacttgaagaaaaagcaagccttacgagcaaaatatggaattagagatgacatggtcttgccatttgagccggtgccagtcattgaaatcccaggttttggaaatctttctgctgtaaccatttgtgatgagttgaaaattcagagccagaatgaccgggaaaaacttgcagaagcaaaggagaagatatatctaaaaggattttatgagggtatcatgttggtggatggatttaaaggacagaaggttcaagatgtaaagaagactattcagaaaaagatgattgacgctggagatgcacttatttacatggaaccagagaaacaagtgatgtccaggtcgtcagatgaatgtgttgtggctctgtgtgaccagtggtacttggattatggagaagagaattggaagaaacagacatctcagtgcttgaagaacctggaaacattctgtgaggagaccaggaggaattttgaagccaccttaggttggctacaagaacatgcttgctcaagaacttatggtctaggcactcacctgccttgggatgagcagtggctgattgaatcactttctgactccactatttacatggcattttacacagttgcacacctattgcaggggggtaacttgcatggacaggcagagtctccgctgggcattagaccgcaacagatgaccaaggaagtttgggattatgttttcttcaaggaggctccatttcctaagactcagattgcaaaggaaaaattagatcagttaaagcaggagtttgaattctggtatcctgttgatcttcgcgtctctggcaaggatcttgttccaaatcatctttcatattacctttataatcatgtggctatgtggccggaacaaagtgacaaatggcctacagctgtgagagcaaatggacatctcctcctgaactctgagaagatgtcaaaatccacaggcaacttcctcactttgacccaagctattgacaaattttcagcagatggaatgcgtttggctctggctgatgctggtgacactgtagaagatgccaactttgtggaagccatggcagatgcaggtattctccgtctgtacacctgggtagagtgggtgaaagaaatggttgccaactgggacagcctaagaagtggtcctgccagcactttcaatgatagagtttttgccagtgaattgaatgcaggaattataaaaacagatcaaaactatgaaaagatgatgtttaaagaagctttgaaaacagggttttttgagtttcaggccgcaaaagataagtaccgtgaattggctgtggaagggatgcacagagaacttgtgttccggtttattgaagttcagacacttctcctcgctccattctgtccacatttgtgtgagcacatctggacactcctgggaaagcctgactcaattatgaatgcttcatggcctgtggcaggtcctgttaatgaagttttaatacactcctcacagtatcttatggaagtaacacatgaccttagactacgactcaagaactatatgatgccagctaaagggaagaagactgacaaacaacccctgcagaagccctcacattgcaccatctatgtggcaaagaactatccaccttggcaacataccaccctgtctgttctacgtaaacactttgaggccaataacggaaaactgcctgacaacaaagtcattgctagtgaactaggcagtatgccagaactgaagaaatacatgaagaaagtcatgccatttgttgccatgattaaggaaaatctggagaagatggggcctcgtattctggatttgcaattagaatttgatgaaaaggctgtgcttatggagaatatagtctatctgactaattcgcttgagctagaacacatagaagtcaagtttgcctccgaagcagaagataaaatcagggaagactgctgtcctgggaaaccacttaatgtttttagaatagaacctggtgtgtccgtttctctggtgaatccccagccatccaatggccacttctcaaccaaaattgaaatcaggcaaggagataactgtgattccataatcaggcgtttaatgaaaatgaatcgaggaattaaagacctttccaaagtgaaactgatgagatttgatgatccactgttggggcctcgacgagttcctgtcctgggaaaggagtacaccgagaagacccccatttctgagcatgctgttttcaatgtggacctcatgagcaagaaaattcatctgactgagaatgggataagggtggatattggcgatacaataatctatctggttcattaaactcatgcacattggagatttatcctggtttcttaggaatactactactctgattgtgtctactgattggctatcagaaccttaggctggacctaaatagattgatttcatttctaaccatccaattctgcatgtattcataattctatcaagtcatctttgattcctggacctaataaattttttttccctttc

SEQ ID NO: 12363 - protein, 1176 aa, Homo sapiens; identical to SEQ ID NO: 1197

SEQ ID NO: 12364 - DNA, 339 bp, Homo sapiens
ccttgcacttttatcttagcaagcctttatgagtctattagcttttacctcaaaattttaagccagaactatcatctttgtttttttattttctatctttaaacatttatctgtgaagtgacaaatggcctacagctgtgagagcaaatggacatctcctcctgaactctgagaaggtaaggcttattgcatcttaaaagtttaaaattctgtggaaggcttttcagatttaggttgttgcacttttttttaaatgtatgtaagaaataatgtgtccaggtgtgatctcatgatctgccctcagcctcccaaagtgctgggattacaggtgtgagccac

SEQ ID NO: 12365 - protein, 33 aa, Homo sapiens
PCTFILASLYESISFYLKILSQNYHLCFFIFYL

SEQ ID NO: 12366 - DNA, 853 bp, Homo sapiens
gtgagatgccttggctgtagttagtaaggagccggatgattgcctcagcaggtgtgaagcgtgtgctttagtttcgtgggaggcctggcatccccgagagggaggggaaaggtaaccactcctttgtggaggtcgccagggtcattgtcgtggatttgcacagtcggctgggcggtgcaatggcggaaagaaaaggaacagccaaagtggactttttgaagaagattgagaaagaaatccaacagaaatgggatactgagagagtgtttgaggtcaatgcatctaatttagagaaacagaccagcaagggcaagtattttgtaaccttcccatatccatatatgaatggacgccttcatttgggacacacgttttctttatccaaatgtgagtttgctgtagggtaccagcgattgaaaggaaaatgttgtctgtttccctttggcctgcactgtactggaatgcctattaaggcatgtgctgataagttgaaaagagaaatagagctgtatggttgcccccctgattttccagatgaagaagaggaagaggaagaaaccagtgttaaaacagaagatataataattaaggataaagctaaaggaaaaaagagtaaagctgctgctaaagctggatcttctaaataccagtggggcattatgaaatcccttggcctgtctgatgaagagatagtaaaattttctgaagcagaacattggcttgattatttcccgccactggctattcaggatttaaaaagaatgggtttgaaggtagactggcgtcgttccttcatcaccactgatgttaatccttactatgattcatttgtcagatggcaatttttaacatt

SEQ ID NO: 12367 - protein, 223 aa, Homo sapiens
MAERKGTAKVDFLKKIEKEIQQKWDTERVFEVNASNLEKQTSKGKYFVTFPYPYMNGRLHLGHTFSLSKCEFAVGYQRLKGKCCLFPFGLHCTGMPIKACADKLKREIELYGCPPDFPDEEEEEEETSVKTEDIIIKDKAKGKKSKAAAKAGSSKYQWGIMKSLGLSDEEIVKFSEAEHWLDYFPPLAIQDLKRMGLKVDWRRSFITTDVNPYYDSFVRWQFL

SEQ ID NO: 12368 - DNA, 753 bp, Homo sapiens
gccggatgattgcctcagcaggtgtgaagcgtgtgctttagtttcgtgggaggcctggcatccccgagagggaggggaaaggtaaccactcctttgtggaggtcgccagggtcattgtcgtggatttgcacagtcggctgggcggtgcaatggcggaaagaaaaggaacagccaaagtggactttttgaagaagattgagaaagaaatccaacagaaatgggatactgagagagtgtttgaggtcaatgcatctaatttagagaaacagaccagcaagggcaagtattttgtaaccttcccatatccatatatgaatggacgccttcatttgggacacacgttttctttatccaaatgtgagtttgctgtagggtaccagcgattgaaaggaaaatgttgtctgtttccctttggcctgcactgtactggaatgcctattaaggcatgtgctgataagttgaaaagagaaatagagctgtatggttgcccccctgattttccagatgaagaagaggaagaggaagaaaccagtgttaaaacagaagatataataattaaggataaagctaaaggaaaaaaggtttgatagtggttgatatttatgttggttgaagttttatatttttctgatttatatgtgcattcccagtactagcacagtgcccaacacataaaatgtactagatcatttttttaaagtatcaaagcaaaaaattatctttctggccaggcgcggtggctcaagcctgtaa

SEQ ID NO: 12369 - protein, 145 aa, Homo sapiens
MAERKGTAKVDFLKKIEKEIQQKWDTERVFEVNASNLEKQTSKGKYFVTFPYPYMNGRLHLGHTFSLSKCEFAVGYQRLKGKCCLFPFGLHCTGMPIKACADKLKREIELYGCPPDFPDEEEEEEETSVKTEDIIIKDKAKGKKV

SEQ ID NO: 12370 - DNA, 6588 bp, Homo sapiens
actgtctcccgcccacctcagccttcgggctaggttgagtgagggctcttgggttagttcctgttaggccccggccgggggagtaggttgaagtctcctaagatgcccggtgggctggggcaccgggagctgtgaagggaacgtgagggggcggcgtagtggagacccacggcaggcctgaagaagagcggcggccgagcccgccttccctgcaccatgctcatagaggatgtggatgccctcaagtcctggctggccaagttactggagccgatatgtgatgctgatccttcagccttagccaactatgttgtagcactggtcaagaaggacaaacctgagaaagaattaaaagccttttgtgctgatcaacttgatgtctttttacaaaaagaaacttcaggttttgtggacaaactatttgaaagtctctatactaagaactaccttccacttttggaaccagtaaagcctgagccaaaaccactagtccaagaaaaagaagaaattaaagaagaggtatttcaggagccagcagaggaagaacgagatggcagaaaaaagaaatatcctagtccccagaagactcgttcagaatctagtgaacgaaggacacgtgagaaaaaaagagaagacgggaaatggagagactatgaccggtactatgagcggaatgaattgtaccgtgagaagtatgactggagaagaggcaggagtaagagtcggagtaagagtcgaggcctgagtcgcagtagaagccgaagtagggggcgcagcaaagaccgggatccaaataggaatgttgagcacagggaaagatcgaagtttaagagtgaaaggaatgacctggagagttcctatgtgcctgtgtctgcaccacctccaaactcttctgagcagtattcctctggggcacagtctattcccagcactgttactgtgatcgcacctgctcaccactctgaaaacacaactgagagttggtctaattactataacaatcatagctcttccaattcttttggtcgaaacctaccaccaaagaggcgatgcagagattatgatgaaagaggattttgtgtacttggtgacctttgtcagtttgatcatggaaatgatcccctagttgttgatgaagttgctctgccaagtatgattcctttcccaccccctcctcctgggcttcctcctccaccacctcctggaatgttaatgcctccaatgccaggtccaggcccaggcccgggcccaggtccaggcccaggcccgggcccaggtccaggtcctggccatagtatgagacttcctgttccccaaggacatggtcagcctccaccatccgttgtgcttcccataccaagaccacctataacacaatcaagcttgataaacagccgtgaccagcctgggacaagtgcagtgcccaatcttgcatcagtgggaacaagactacctcctcctttaccccagaacctcctttacacagtatcagaacgacagcccatgtactctcgtgaacatggtgctgctgcatctgagcgacttcagttggggacaccgcctcctctgttggcagctcgtttggtgccacctcgaaacctcatgggatcctccattggataccatacctcagtctccagccctacccctctggttccagatacatatgaaccagatggttacaacccagaagctcctagtattactagttctggtagatctcagtacagacagttcttttcaagaactcagacacagcgtcccaatctgattggcctaacatctggagatatggatgtaaatccaagagctgctaacattgtgatccagactgaaccaccagttcctgtttcgattaatagcaacataaccagagtagttcttgaaccagatagtcgaaaaagagctatgagtggtttggaagggccactcacaaagaaaccttggctgggaaagcaaggaaataacaatcaaaataaaccagggttcttacgaaagaatcagtatacaaacaccaaattagaagtcaagaaaatccctcaggaattgaacaacattaccaagctcaatgaacacttcagcaaatttggaactattgttaatatccaggttgcttttaagggtgacccagaagcagccctaatccaatatcttaccaatgaggaggccaggaaagccatttctagcacagaagcagttctaaacaaccgattcattcgagtcttgtggcatagggaaaataatgagcaaccgacactacagtcctcagcacagctgctcctgcaacaacagcaaacacttagtcacctctcacagcagcaccatcacctgccacagcatctacatcagcagcaggtgctagtggcccagtctgctccttcaacagtgcacggaggtatccagaagatgatgagcaaaccacagacatcaggtgcatatgttcttaacaaagttcctgttaaacatcgtcttggacatgcaggtggtaaccagagtgatgcatcacatttgttgaatcagtctggtggtgctggagaagattgccagatattttcaactccaggccatccaaaaatgatttacagctcctcaaacttaaagacaccttcaaagctctgttcagggtctaaatctcatgatgttcaagaagtgcttaaaaaaaaacaggaagcaatgaagttacaacaagatatgaggaaaaaaagacaggaagtgttagaaaagcaaatagaatgccaaaagatgttaatatccaagttagaaaaaaacaaaaacatgaaaccagaagaaagagcaaatataatgaagactttgaaagagcttggagagaagatctcacaattaaaagatgaattaaaaacatcttctgcagtctccacaccatctaaagtgaagacaaaaacggaggcccagaaggagttattagatactgaactggacctccacaagaggctgtcctcaggagaagacaccacagaattacggaaaaaactcagtcagttacaggttgaggctgcacggttaggtattttacctgtgggtcgaggaaagaccatgtcctctcaaggtcgaggaagaggccgagggcgtggaggaagaggaaggggctcactaaatcacatggtggtggaccatcgtcccaaagcactaacagttggaggattcattgaggaagaaaaagaagacttgcttcagcatttctcaaccgcaaaccaagggccaaaatttaaagaccgtcggctacagatatcatggcacaagcccaaggtaccatctatatccactgagactgaagaagaagaagtcaaggaggaggaaacagaaacctcagatttgtttttgcctgatgatgacgatgaagatgaagatgaatatgagtctcgctcatggcgaagatgaaatctgatgctagctgtataatttttaggaatattgtttagaagaacaacttttaaaaattatttaaaagaagtcaatgagccaaaaaaaatttttttatttttcttttcaacacagtaggttcaagaacagcaagtttgctatttaaacacatctcataactgtacatgatattaaagcaccaaaggcctagtgacttttacacagttgtgaagatccacagcaatgacatggataatctctagagccttattttccacaccaccttttttttgttgctgttggtgttggattatgatgtaaatgacagggtgttcagaaattttattttggattataatctactgataaaatttaattaaatgtcaaaatcacctgtaatcttttaactctcagttgttatggatgggtcatcagacagtaggaaatatttgtaattaaaatacccttttgctttcaagagtggtcttggaagaaaaatatgtttattttaattttaatttttttttttttttactttggaggagcccaatttgtattcagtctaaatttgtttttcatggtttttatgtgtggtagtactagttcagtgaaaatcacaacaaactgtgtgttcttaaatgctacagcaatggtagctagctctatagtatttccattctcttgtcatatgaactcctggacttttcctgctactgattcttagtttgctttgatatttagtgagcgctggttcggctggtctttttaaaaatttttataactcagaatgtaaaaggctttcacctattgcccctttctcgtcccccttttcttcctcttgcctttctattaataggcctgacttagtcatcattgatataagtggttcatttgggcaaccgcaggcagtctccaataaaaggttcaaaccagcacctggataaataagtgatgttttgatgagaatgatggaaggattttggggagaagagaatcaccagctttattttttccctcttttgaagcttcagttcagtatagttacacagaagggtttaaaaatgtctgaaattcttttcctaaatttaaaccatgatggtgaggtgactggggggtggggggtggaggtgggagggggttgagggctgagtatgctagtaataaatgggagtcatatatgactttgttcagatgaccttattttttcataattttgtagcttgttgctatccatgaacatacgcatccctcagtagacagtttcctttactgtgtgcatttttactgtacactgtatagagtagagtatctgttaagtaaaatatatatgtaaatttatgtcttcgtgttctgaatgttagatggaaaagcagaggagcaacactacactgtactgacccctgggaaaataaaatgattaatgtacctaggctgtcactttttcaaggatatacacatctgtgtttttatatatgtgtggtatgaaaatttgaaacctcctgttgtctccaaaagggtcttggtgaccactatatcaaggattttgtttgctgaggtaaagacaatttctcaatatagaaactattcactaagaacttaaaaccatcaggattctagatttacttagctataagaagttaaatcccacgttctgataatctttattcttctacatgttttcctggaatgatgtgtcaaaccagggtcatttttaagttcatataattttctttcataataatgaggacttcctttttctaggttattgttatatttctagtaacactgaaggtaaaataagcttataaaagaaggaaaacatcagaatggtgtatctagaatacacaatcttgctccttactcctccatcatctctaatgaaatttttcttgatgtctgtggctcagtcagtatatattttgaaagattcattgtggtgaatattttgagtcctgacagtttaaacgtgatagagggaacaaaggatttatatattttttgtacaaagttttttcttaaactgtataattttgtaaataatttgtttgggttttttttttgtgtactaaaactaccagcgtatagatttcaataagaattgttgtatttttgtatttggaaactgaaaattacagtaaataaatggaactctaagaaaaatttcagtagacagttcaacagaatgagattccttttcatatgatttttttgacctcaaaatggacatcttatttcactctcagtaaaaagttgaaaatttgactttttagtattgggggcagaagatagaagtgtgttaaagtgaaaaacagttttttcagtaaggtttgaggccctttctataagttttcagtacaccttaaacaggactaaaaatactttaaaagtgtgctttcaaagaattttaaaacatgtttgactcaaagatgaatttgaagtgagttaattataatactggaaaacttcaggttagcataaaatagtttatatatatcccctgccccctttgggatttacttccaccatcaaatcttcaactgttagaatttcacttaaaagtgaataactgccatacatgttttcttggcatcttcatttacagaaataacatacagcatctaaagcaagttctgtccctcttaatgtgtatgacatctttttaagtagctgatcagcaataatagccaccagttgactaggtcagcctgatatactagtggatcactgtccaagataaaaaggtaaccccaagtattgcaaaatttccctcaatttctttatgtaacattgaagaaatgttgttaccagctaagatgataaattggaaaacagtcttgttaaggtgaaaggggtccttggtgatggatcattatttcaaaaaagaaaaaaatcatgtgaaaaggaatagtggttcctcttgatgtatagtatgcctgtattatagtttttacaaaattgtgaacttgtgtaatagtataataggagatattgttgaatttctaactgtttatacatttaaattcatatatgtaatgtttgttttatcaattacaatctgaatttctaagaagcatgttgacttttgcaataaagatgcaatatggaatggttcacaattggaaaaaaaaaagaaaaaagatgaaagtattacaaatttaaaagaatttggaaaatttatgaaccattccaaaaattataacaatcacc

SEQ ID NO: 12371 - protein, 1060 aa, Homo sapiens
MLIEDVDALKSWLAKLLEPICDADPSALANYVVALVKKDKPEKELKAFCADQLDVFLQKETSGFVDKLFESLYTKNYLPLLEPVKPEPKPLVQEKEEIKEEVFQEPAEEERDGRKKKYPSPQKTRSESSERRTREKKREDGKWRDYDRYYERNELYREKYDWRRGRSKSRSKSRGLSRSRSRSRGRSKDRDPNRNVEHRERSKFKSERNDLESSYVPVSAPPPNSSEQYSSGAQSIPSTVTVIAPAHHSENTTESWSNYYNNHSSSNSFGRNLPPKRRCRDYDERGFCVLGDLCQFDHGNDPLVVDEVALPSMIPFPPPPPGLPPPPPPGMLMPPMPGPGPGPGPGPGPGPGPGPGPGHSMRLPVPQGHGQPPPSVVLPIPRPPITQSSLINSRDQPGTSAVPNLASVGTRLPPPLPQNLLYTVSERQPMYSREHGAAASERLQLGTPPPLLAARLVPPRNLMGSSIGYHTSVSSPTPLVPDTYEPDGYNPEAPSITSSGRSQYRQFFSRTQTQRPNLIGLTSGDMDVNPRAANIVIQTEPPVPVSINSNITRVVLEPDSRKRAMSGLEGPLTKKPWLGKQGNNNQNKPGFLRKNQYTNTKLEVKKIPQELNNITKLNEHFSKFGTIVNIQVAFKGDPEAALIQYLTNEEARKAISSTEAVLNNRFIRVLWHRENNEQPTLQSSAQLLLQQQQTLSHLSQQHHHLPQHLHQQQVLVAQSAPSTVHGGIQKMMSKPQTSGAYVLNKVPVKHRLGHAGGNQSDASHLLNQSGGAGEDCQIFSTPGHPKMIYSSSNLKTPSKLCSGSKSHDVQEVLKKKQEAMKLQQDMRKKRQEVLEKQIECQKMLISKLEKNKNMKPEERANIMKTLKELGEKISQLKDELKTSSAVSTPSKVKTKTEAQKELLDTELDLHKRLSSGEDTTELRKKLSQLQVEAARLGILPVGRGKTMSSQGRGRGRGRGGRGRGSLNHMVVDHRPKALTVGGFIEEEKEDLLQHFSTANQGPKFKDRRLQISWHKPKVPSISTETEEEEVKEEETETSDLFLPDDDDEDEDEYESRSWRR

SEQ ID NO: 12372 - DNA, 7280 bp, Homo sapiens
actgtctcccgcccacctcagccttcgggctaggttgagtgagggctcttgggttagttcctgttaggccccggccgggggagtaggttgaagtctcctaagatgcccggtgggctggggcaccgggagctgtgaagggaacgtgagggggcggcgtagtggagacccacggcaggcctgaagaagagcggcggccgagcccgccttccctgcaccatgctcatagaggatgtggatgccctcaagtcctggctggccaagttactggagccgatatgtgatgctgatccttcagccttagccaactatgttgtagcactggtcaagaaggacaaacctgagaaagaattaaaagccttttgtgctgatcaacttgatgtctttttacaaaaagaaacttcaggttttgtggacaaactatttgaaagtctctatactaagaactaccttccacttttggaaccagtaaagcctgagccaaaaccactagtccaagaaaaagaagaaattaaagaagaggtatttcaggagccagcagaggaagaacgagatggcagaaaaaagaaatatcctagtccccagaagactcgttcagaatctagtgaacgaaggacacgtgagaaaaaaagagaagacgggaaatggagagactatgaccggtactatgagcggaatgaattgtaccgtgagaagtatgactggagaagaggcaggagtaagagtcggagtaagagtcgaggcctgagtcgcagtagaagccgaagtagggggcgcagcaaagaccgggatccaaataggaatgttgagcacagggaaagatcgaagtttaagagtgaaaggaatgacctggagagttcctatgtgcctgtgtctgcaccacctccaaactcttctgagcagtattcctctggggcacagtctattcccagcactgttactgtgatcgcacctgctcaccactctgaaaacacaactgagagttggtctaattactataacaatcatagctcttccaattcttttggtcgaaacctaccaccaaagaggcgatgcagagattatgatgaaagaggattttgtgtacttggtgacctttgtcagtttgatcatggaaatgatcccctagttgttgatgaagttgctctgccaagtatgattcctttcccaccccctcctcctgggcttcctcctccaccacctcctggaatgttaatgcctccaatgccaggtccaggcccaggcccgggcccaggtccaggcccaggcccgggcccaggtccaggtcctggccatagtatgagacttcctgttccccaaggacatggtcagcctccaccatccgttgtgcttcccataccaagaccacctataacacaatcaagcttgataaacagccgtgaccagcctgggacaagtgcagtgcccaatcttgcatcagtgggaacaagactacctcctcctttaccccagaacctcctttacacagtatcagaacgacagcccatgtactctcgtgaacatggtgctgctgcatctgagcgacttcagttggggacaccgcctcctctgttggcagctcgtttggtgccacctcgaaacctcatgggatcctccattggataccatacctcagtctccagccctacccctctggttccagatacatatgaaccagatggttacaacccagaagctcctagtattactagttctggtagatctcagtacagacagttcttttcaagaactcagacacagcgtcccaatctgattggcctaacatctggagatatggatgtaaatccaagagctgctaacattgtgatccagactgaaccaccagttcctgtttcgattaatagcaacataaccagagtagttcttgaaccagatagtcgaaaaagagctatgagtggtttggaagggccactcacaaagaaaccttggctgggaaagcaaggaaataacaatcaaaataaaccagggttcttacgaaagaatcagtatacaaacaccaaattagaagtcaagaaaatccctcaggaattgaacaacattaccaagctcaatgaacacttcagcaaatttggaactattgttaatatccaggttgcttttaagggtgacccagaagcagccctaatccaatatcttaccaatgaggaggccaggaaagccatttctagcacagaagcagttctaaacaaccgattcattcgagtcttgtggcatagggaaaataatgagcaaccgacactacagtcctcagcacagctgctcctgcaacaacagcaaacacttagtcacctctcacagcagcaccatcacctgccacagcatctacatcagcagcaggtgctagtggcccagtctgctccttcaacagtgcacggaggtatccagaagatgatgagcaaaccacagacatcaggtgcatatgttcttaacaaagttcctgttaaacatcgtcttggacatgcaggtggtaaccagagtgatgcatcacatttgttgaatcagtctggtggtgctggagaagattgccagatattttcaactccaggccatccaaaaatgatttacagctcctcaaacttaaagacaccttcaaagctctgttcagggtctaaatctcatgatgttcaagaagtgcttaaaaaaaaacaggaagcaatgaagttacaacaagatatgaggaaaaaaagacaggaagtgttagaaaagcaaatagaatgccaaaagatgttaatatccaagttagaaaaaaacaaaaacatgaaaccagaagaaagagcaaatataatgaagactttgaaagagcttggagagaagatctcacaattaaaagatgaattaaaaacatcttctgcagtctccacaccatctaaagtgaagacaaaaacggaggcccagaaggagttattagatactgaactggacctccacaagaggctgtcctcaggagaagacaccacagaattacggaaaaaactcagtcagttacaggttgaggctgcacggttaggtattttacctgtgggtcgaggaaagaccatgtcctctcaaggtcgaggaagaggccgagggcgtggaggaagaggaaggggctcactaaatcacatggtggtggaccatcgtcccaaagcactaacagttggaggattcattgaggaagaaaaagaagacttgcttcagcatttctcaaccgcaaaccaagggccaaaatttaaagaccgtcggctacagatatcatggcacaagcccaaggtaccatctatatccactgagactgaagaagaagaagtcaaggaggaggaaacagaaacctcagatttgtttttgcctgatgatgacgatgaagatgaagatgaatatgagtctcgctcatggcgaagatgaaatctgatgctagctgtataatttttaggaatattgtttagaagaacaacttttaaaaattatttaaaagaagtcaatgagccaaaaaaaatttttttatttttcttttcaacacagtaggttcaagaacagcaagtttgctatttaaacacatctcataactgtacatgatattaaagcaccaaaggcctagtgacttttacacagttgtgaagatccacagcaatgacatggataatctctagagccttattttccacaccaccttttttttgttgctgttggtgttggattatgatgtaaatgacagggtgttcagaaattttattttggattataatctactgataaaatttaattaaatgtcaaaatcacctgtaatcttttaactctcagttgttatggatgggtcatcagacagtaggaaatatttgtaattaaaatacccttttgctttcaagagtggtcttggaagaaaaatatgtttattttaattttaatttttttttttttttactttggaggagcccaatttgtattcagtctaaatttgtttttcatggtttttatgtgtggtagtactagttcagtgaaaatcacaacaaactgtgtgttcttaaatgctacagcaatggtagctagctctatagtatttccattctcttgtcatatgaactcctggacttttcctgctactgattcttagtttgctttgatatttagtgagcgctggttcggctggtctttttaaaaatttttataactcagaatgtaaaaggctttcacctattgcccctttctcgtcccccttttcttcctcttgcctttctattaataggcctgacttagtcatcattgatataagtggttcatttgggcaaccgcaggcagtctccaataaaaggttcaaaccagcacctggataaataagtgatgttttgatgagaatgatggaaggattttggggagaagagaatcaccagctttattttttccctcttttgaagcttcagttcagtatagttacacagaagggtttaaaaatgtctgaaattcttttcctaaatttaaaccatgatggtgaggtgactggggggtggggggtggaggtgggagggggttgagggctgagtatgctagtaataaatgggagtcatatatgactttgttcagatgaccttattttttcataattttgtagcttgttgctatccatgaacatacgcatccctcagtagacagtttcctttactgtgtgcatttttactgtacactgtatagagtagagtatctgttaagtaaaatatatatgtaaatttatgtcttcgtgttctgaatgttagatggaaaagcagaggagcaacactacactgtactgacccctgggaaaataaaatgattaatgtacctaggctgtcactttttcaaggatatacacatctgtgtttttatatatgtgtggtatgaaaatttgaaacctcctgttgtctccaaaagggtcttggtgaccactatatcaaggattttgtttgctgaggtaaagacaatttctcaatatagaaactattcactaagaacttaaaaccatcaggattctagatttacttagctataagaagttaaatcccacgttctgataatctttattcttctacatgttttcctggaatgatgtgtcaaaccagggtcatttttaagttcatataattttctttcataataatgaggacttcctttttctaggttattgttatatttctagtaacactgaaggtaaaataagcttataaaagaaggaaaacatcagaatggtgtatctagaatacacaatcttgctccttactcctccatcatctctaatgaaatttttcttgatgtctgtggctcagtcagtatatattttgaaagattcattgtggtgaatattttgagtcctgacagtttaaacgtgatagagggaacaaaggatttatatattttttgtacaaagttttttcttaaactgtataattttgtaaataatttgtttgggttttttttttgtgtactaaaactaccagcgtatagatttcaataagaattgttgtatttttgtatttggaaactgaaaattacagtaaataaatggaactctaagaaaaatttcagtagacagttcaacagaatgagattccttttcatatgatttttttgacctcaaaatggacatcttatttcactctcagtaaaaagttgaaaatttgactttttagtattgggggcagaagatagaagtgtgttaaagtgaaaaacagttttttcagtaaggtttgaggccctttctataagttttcagtacaccttaaacaggactaaaaatactttaaaagtgtgctttcaaagaattttaaaacatgtttgactcaaagatgaatttgaagtgagttaattataatactggaaaacttcaggttagcataaaatagtttatatatatcccctgccccctttgggatttacttccaccatcaaatcttcaactgttagaatttcacttaaaagtgaataactgccatacatgttttcttggcatcttcatttacagaaataacatacagcatctaaagcaagttctgtccctcttaatgtgtatgacatctttttaagtagctgatcagcaataatagccaccagttgactaggtcagcctgatatactagtggatcactgtccaagataaaaaggtaaccccaagtattgcaaaatttccctcaatttctttatgtaacattgaagaaatgttgttaccagctaagatgataaattggaaaacagtcttgttaaggtgaaaggggtccttggtgatggatcattatttcaaaaaagaaaaaaatcatgtgaaaaggaatagtggttcctcttgatgtatagtatgcctgtattatagtttttacaaaattgtgaacttgtgtaatagtataataggagatattgttgaatttctaactgtttatacatttaaattcatatatgtaatgtttgttttatcaattacaatctgaatttctaagaagcatgttgacttttgcaataaagatgcaatatggaatggttcacaattggaaaaaaaaaagaaaaaagatgaaagtattacaaatttaaaagaatttggaaaatttatgaaccattccaaaaattataacaatcaccaaaagagctgtaattctggcttgttctggaaagaaagaaaatgtgtgtgtatgcttgcttgtgagagtgagtgagtagtggctatgtatgtgtgttttatgttgtgttcataaacatgagagaacatcactcaatatgaagttgggttcgaagtcactggctattaaatattaagtaggataactttctcaacagagtagcctggagaatgaaagagaaggtattaaaatgctacttgtaagtaacctttgatagccacattattttgttcctggatggttcttggtatcccagataaaaaagcacaaaacagtttcttgaaagcaattattttaatgttgtcttgaggatattcattatgcctgccatcagtaggagggacattttccttaagtagaatagggagaagggaaaaaacacctagaagagatgatttaaacataaatcagttctgaatgtgacaaagatttgtaaggacaaacgggaagatagtgatgttatgcactaaggactgggtggtgatgagaaagagaagggaagtgtatcacctggttttcccattttaaaaaatgctattataaaattccccctccaatgattatgcattgtttaagaaggaacattctttgaatttcagcttatacaagaaaatactcaaagaatgagagtaaagttattttcattcctttcaa

SEQ ID NO: 12373 - protein, 1060 aa, Homo sapiens; identical to SEQ ID NO: 12371

SEQ ID NO: 12374 - DNA, 3760 bp, Homo sapiens
cagccttcgggctaggttgagtgagggctcttgggttagttcctgttaggccccggccgggggagtaggttgaagtctcctaagatgcccggtgggctggggcaccgggagctgtgaagggaacgtgagggggcggcgtagtggagacccacggcaggcctgaagaagagcggcggccgagcccgccttccctgcaccatgctcatagaggatgtggatgccctcaagtcctggctggccaagttactggagccgatatgtgatgctgatccttcagccttagccaactatgttgtagcactggtcaagaaggacaaacctgagaaagaattaaaagccttttgtgctgatcaacttgatgtctttttacaaaaagaaacttcaggttttgtggacaaactatttgaaagtctctatactaagaactaccttccacttttggaaccagtaaagcctgagccaaaaccactagtccaagaaaaagaagaaattaaagaagaggtatttcaggagccagcagaggaagaacgagatggcagaaaaaagaaatatcctagtccccagaagactcgttcagaatctagtgaacgaaggacacgtgagaaaaaaagagaagacgggaaatggagagactatgaccggtactatgagcggaatgaattgtaccgtgagaagtatgactggagaagaggcaggagtaagagtcggagtaagagtcgaggcctgagtcgcagtagaagccgaagtagggggcgcagcaaagaccgggatccaaataggaatgttgagcacagggaaagatcgaagtttaagagtgaaaggaatgacctggagagttcctatgtgcctgtgtctgcaccacctccaaactcttctgagcagtattcctctggggcacagtctattcccagcactgttactgtgatcgcacctgctcaccactctgaaaacacaactgagagttggtctaattactataacaatcatagctcttccaattcttttggtcgaaacctaccaccaaagaggcgatgcagagattatgatgaaagaggattttgtgtacttggtgacctttgtcagtttgatcatggaaatgatcccctagttgttgatgaagttgctctgccaagtatgattcctttcccaccccctcctcctgggcttcctcctccaccacctcctggaatgttaatgcctccaatgccaggtccaggcccaggcccgggcccaggtccaggcccaggcccgggcccaggtccaggtcctggccatagtatgagacttcctgttccccaaggacatggtcagcctccaccatccgttgtgcttcccataccaagaccacctataacacaatcaagcttgataaacagccgtgaccagcctgggacaagtgcagtgcccaatcttgcatcagtgggaacaagactacctcctcctttaccccagaacctcctttacacagtatcagaacgacagcccatgtactctcgtgaacatggtgctgctgcatctgagcgacttcagttggggacaccgcctcctctgttggcagctcgtttggtgccacctcgaaacctcatgggatcctccattggataccatacctcagtctccagccctacccctctggttccagatacatatgaaccagatggttacaacccagaagctcctagtattactagttctggtagatctcagtacagacagttcttttcaagaactcagacacagcgtcccaatctgattggcctaacatctggagatatggatgtaaatccaagagctgctaacattgtgatccagactgaaccaccagttcctgtttcgattaatagcaacataaccagagtagttcttgaaccagatagtcgaaaaagagctatgagtggtttggaagggccactcacaaagaaaccttggctgggaaagcaaggaaataacaatcaaaataaaccagggttcttacgaaagaatcagtatacaaacaccaaattagaagtcaagaaaatccctcaggaattgaacaacattaccaagctcaatgaacacttcagcaaatttggaactattgttaatatccaggttgcttttaagggtgacccagaagcagccctaatccaatatcttaccaatgaggaggccaggaaagccatttctagcacagaagcagttctaaacaaccgattcattcgagtcttgtggcatagggaaaataatgagcaaccgacactacagtcctcagcacagctgctcctgcaacaacagcaaacacttagtcacctctcacagcagcaccatcacctgccacagcatctacatcagcagcaggtgctagtggcccagtctgctccttcaacagtgcacggaggtatccagaagatgatgagcaaaccacagacatcaggtgcatatgttcttaacaaagttcctgttaaacatcgtcttggacatgcaggtggtaaccagagtgatgcatcacatttgttgaatcagtctggtggtgctggagaagattgccagatattttcaactccaggccatccaaaaatgatttacagctcctcaaacttaaagacaccttcaaagctctgttcagggtctaaatctcatgatgttcaagaagtgcttaaaaaaaaacaggaagcaatgaagttacaacaagatatgaggaaaaaaagacaggaagtgttagaaaagcaaatagaatgccaaaagatgttaatatccaagttagaaaaaaacaaaaacatgaaaccagaagaaagagcaaatataatgaagactttgaaagagcttggagagaagatctcacaattaaaagatgaattaaaaacatcttctgcagtctccacaccatctaaagtgaagacaaaaacggaggcccagaaggagttattagatactgaactggacctccacaagaggctgtcctcaggagaagacaccacagaattacggaaaaaactcagtcagttacaggttgaggctgcacggttaggtattttacctgtgggtcgaggaaagaccatgtcctctcaaggtcgaggaagaggccgagggcgtggaggaagaggaaggggctcactaaatcacatggtggtggaccatcgtcccaaagcactaacagttggaggattcattgaggaagaaaaagaagacttgcttcagcatttctcaaccgcaaaccaagggccaaaatttaaagaccgtcggctacagatatcatggcacaagcccaaggtaccatctatatccactgagactgaagaagaagaagtcaaggaggaggaaacagaaacctcagatttgtttttgcctgatgatgacgatgaagatgaagatgaatatgagtctcgctcatggcgaagatgaaatctgatgctagctgtataatttttaggaatattgtttagaagaacaacttttaaaaattatttaaaagaagtcaatgagccaaaaaaaatttttttatttttcttttcaacacagtaggttcaagaacagcaagtttgctatttaaacacatctcataactgtacatgatattaaagcaccaaaggcctagtgacttttacacagttgtgaagatccacagcaatgacatggataatctctagagccttattttccacaccaccttttttttgttgctgttggtgttggattatgatgtaaatgacagggtgttcagaaattttattttggattataatctactgataaaatttaattaaatgtcaaaatcacctgt

SEQ ID NO: 12375 - protein, 1060 aa, Homo sapiens; identical to SEQ ID NO: 12371

SEQ ID NO: 12376 - DNA, 576 bp, Homo sapiens
aaggcctagtgaagagtccagatgtagacttaaagagctctggaatctcctccaagggttcagccagaagccatctgactggctatgaccagtattggggactttattcttccaaaggcagtctatccaatttttggaccactctgatggtgtcagaggccttctgtagattgagctcaaataactcacttctagttgtcttaggtcaacaatgtgtggccacagagattaagtcaaactcctcttcatctctgtgctgttcctgaatttgccagccttccaggtttctgagttgttgataaacaccgcacaggagacatgaggacagaacccttcagtggagacctgtttggatattgcaggggctttctgtgccccgcctatgcgtgatttcagcgctgtggagcctttaaaacagacgtggcctggacgactgagaaggtttgctttgactctgctgcagagggaaggtccagagtctcgtaggtcccactgtgtgctgagaattccatctgatgccctggataaccctcaagcctttgcaacagccagactaaataaagactcttgagtgat

SEQ ID NO: 12377 - protein, 62 aa, Homo sapiens
MRDFSAVEPLKQTWPGRLRRFALTLLQREGPESRRSHCVLRIPSDALDNPQAFATARLNKDS

SEQ ID NO: 12378 - DNA, 1017 bp, Homo sapiens
atgatggccatgaactccaagcagcctttcggcatgcacccggtgctgcaagaacccaaattctccagtctgcactctggctccgaggccatgcgccgagtctgtctcccagccccgcagctgcagggtaatatatttggaagctttgatgagagcctgctggcacgcgccgaagctctggcggcggtggatatcgtctcccacggcaagaaccatccgttcaagcccgacgccacctaccataccatgagcagcgtgccctgcacgtccacttcgtccaccgtgcccatctcccacccagctgcgctcacctcacaccctcaccacgccgtgcaccagggcctcgaaggcgacctgctggagcacatctcgcccacgctgagtgtgagcggcctgggcgctccggaacactcggtgatgcccgcacagatccatccacaccacctgggcgccatgggccacctgcaccaggccatgggcatgagtcacccgcacaccgtggcccctcatagcgccatgcctgcatgcctcagcgacgtggagtcagacccgcgcgagctggaagccttcgccgagcgcttcaagcagcggcgcatcaagctgggggtgacccaggcggacgtgggcgcggctctggctaatctcaagatccccggcgtgggctcgctgagccaaagcaccatctgcaggttcgagtctctcactctctcgcacaacaacatgatcgctctcaagccggtgctccaggcctggttggaggaggccgaggccgcctaccgagagaagaacagcaagccagagctcttcaacggcagcgaacggaagcgcaaacgcacgtccatcgcggcgccggagaagcgttcactcgaggcctatttcgctatccagccacgtccttcatctgagaagatcgcggccatcgctgagaaactggaccttaaaaagaacgtggtgagagtctggttctgcaaccagagacagaaacagaaacgaatgaagtattcggctgtccactga

SEQ ID NO: 12379 - protein, 338 aa, Homo sapiens; identical to SEQ ID NO: 1199

SEQ ID NO: 12380 - DNA, 375 bp, Homo sapiens
gaggacagaacccttcagtggagacctgtttggatattgcaggggctttctgtgccccgcctatgcgtgatttcagcgctgtggctggagtgcaatgacacgatctcggctcaatgcaacctctgcctcctgggttcaagcaattcttctgcctcagcctccagagtagctggcattacagcaattaccagctgatgctgagtaacttctgcccccttaaagccaggcacatactaactggttcacctcaatctgcaccactctgctgcccagtgcccagtgtgtggctattcaaggatattgcagtgtttctttggacccgtgtgagaattatgtactatgtggcacaataaatgggaatacattggttttcaa

SEQ ID NO: 12381 - protein, 79 aa, Homo sapiens
MQPLPPGFKQFFCLSLQSSWHYSNYQLMLSNFCPLKARHILTGSPQSAPLCCPVPSVWLFKDIAVFLWTRVRIMYYVAQ

SEQ ID NO: 12382 - DNA, 512 bp, Homo sapiens
tatgtgcccaggctggtcttgagttcctgagctcaagcagtcctccctccttggcctcccaaagtgctgggattacaggcgtgagccaccatgctcagtacttgagatatctgaggcaacactggggattctcctgtaccctgctccagttgattagtctacacacccagagatgtcaagcatcatttcactgtgataccaaccaggtacccaaaggtggagtaccaccttctacggtggagcccataggaagtacataggaagtactagttacttcctaagtaactagttgagtgtcccatgggtctttaatcccctcattcagaacagaaattgcaatgtgagatggaataaaatttctgttggaaacagaaacctaaacacatattatgttcaggtttaactcaaacccacatgtatttggttgcttaaaattttcatctgttaagccatgttttccaatcctttccctttgcatttgtttggaactatatataaatttttaatctgca

SEQ ID NO: 12383 - protein, 38 aa, Homo sapiens
MFRFNSNPHVFGCLKFSSVKPCFPILSLCICLELYINF

SEQ ID NO: 12384 - DNA, 1422 bp, Homo sapiens
atggatgtaaaggaccggcgacaccgctctttgaccagaggacgctgtggcaaagagtgtcgctacacaagctcctctctggacagtgaggactgccgcgtgcccacacagaaatcctacagctccagtgagactctgaaggcctatgaccatgacagcaggatgcactatggaaaccgagtcacagacctcatccaccgggagtcagatgagtttcctagacaagtattcttatttaaaacccaagacactgatcataaaacaaacacacttctcacatacaaccaagttttgcaaacacagttggatgactctacagatgctcagggtggaaaagaattgccagccagcaaaagtgatgggggcccagagtcagaccttgtccagttaccccagctggcccattcaagtatcaaatgcaagaacctgccatctcccagcaggagaaatgagccaggaaaacgtttcgactgtagggatgtgtactgggctgtcagcactgattctatgccctcccttatggtcatcacctttttgcacaaactctcaacctggaacactaacaaagaaaggtgtcactatctaaatgatattgctcagaccctcttggtttgcagaatggaggcagttctgctgacaccctacagattcgcattcgatgagaggccaaccctgaagatggtttcagtgttcttcccagctgccacagagcttactgaaaacataattatgcgagatgaattagggcaaaatcagtctcccatcgatgagcaaagaaccaacttcacccttgccgaactgggcatctgtgagccctccccacaccgaagcggctactgctccgacatggggatccttcaccagggctactcccttagcacagggtctgacgccgactccgacaccgagggagggatgtctccagaacacgccatcagactgtggggcagagggataaaatccaggcgcagttccggcctgtccagtcgtgaaaactcggcccttaccctgactgactctgacaacgaaaacaaatcagatgatgagaacgacccttatatttttggccccaaagtggattttctcacaaaatggcagttatcagcagaaagccctggtttaagttttcactctcattacatcgatcccctgctgtcaaaatgggctcctgatccaggaaacaaggttcccccagatcctgtgagcacggagccatcggcccctgctcaagagtcccagtcaggtggagccctgtgcttcgctgtagagctgttcaggaaattgacaaatttacagccctgtcgctgccgtcctttcagtggggaagcgcggcttctcttccagcaagcggacttagatgtctgtttactgtttccctcaaatgtgagccctgctggtgatgcacgtcgcaaatggaagtaa

SEQ ID NO: 12385 - protein, 473 aa, Homo sapiens [sequence omitted]

SEQ ID NO: 12386 - DNA, 3766 bp, Homo sapiens
atggatccgccggcgggagccgctcgccgcctgctctgccccgcgctgctgctgctgctgctgctgctgccgccgccgctcctgccgccgccgccgccgcccgcgaacgccaggctcgccgccgccgccgaccccccaggcgggcccctggggcacggagcggagcgcatcctggcggtgcccgtgcgcactgacgcccagggccgcttggtgtcccacgtggtgtcggcagctacgtccagagcaggggtacgagcccgcagggccgccccggtccggaccccgagcttccccggaggcaacgaggaggagcctggcagtcacctcttctacaatgtcacggtctttggccgagacctgcacctgcggctgcggcccaacgcccgcctcgtggcgcccggggccactatggagtggcagggcgagaagggcaccacccgcgtggagcccctgctcgggagctgtctctacgtcggagacgtggccggcctagccgaagcctcctctgtggcgctcagcaactgcgatgggctggctggtctgatccggatggaggaggaggagttcttcatcgaacccttggagaaggggctggcggcgcaggaggctgagcaaggccgtgtgcatgtggtgtatcgccggccacccacgtcccctcctctcggggggccacaggccctggacacaggggcctccctggacagcctggacagcctcagccgcgccctgggcgtcctagaggagcacgccaacagctcgaggcggagggcacgcaggcatgctgcggacgatgactacaacatcgaggtcctgctgggcgtggatgactctgtggtgcagttccacgggaaggagcacgtacagaagtacctgctgacactcatgaacattgtcaatgaaatctaccatgacgagtccttgggtgcccacatcaacgtggtcctggtgcggatcatcctcctgagctatggaaagtccatgagcctcatcgagatcgggaacccctctcagagcctggagaatgtctgccgctgggcctacctccagcagaagccagacacgggccacgatgaataccacgatcacgccatcttcctcacacggcaggactttgggccttccggcatgcaaggctatgctcctgtcaccggcatgtgccatccggtccgcagctgcaccctgaaccatgaggacggcttctcctcagcgtttgtggtggcccatgagactggccacgtgctgggcatggagcacgacgggcagggcaaccgctgtggcgacgaggtgcggctgggcagcatcatggcgcccctggtgcaggccgccttccaccgcttccactggtcccgctgcagccagcaggagctgagccgctacctgcactcctatgactgcctgctggatgaccccttcgcccacgactggccggcgctgccccagctcccgggactgcactactccatgaacgagcaatgccgctttgacttcggcctgggctacatgatgtgcacggcgttccggacctttgacccctgcaagcagctgtggtgcagccatcctgacaacccctacttttgcaagaccaagaaggggccccccttggacgggactatgtgtgcacctggcaagcattgttttaaaggacactgcatctggctgacacctgacatcctcaaacgggacggcagctggggcgcttggagtccgtttggctcctgctcacgtacctgtggcacgggcgtgaagttcaggacccgccagtgtgacaacccacacccggccaacgggggccgcacctgctcgggccttgcctacgacttccagctctgcagccgccaggactgccccgactccctggctgacttccgcgaggagcagtgccgccagtgggacctgtacttcgagcacggcgacgcccagcaccactggctgccccacgagcaccgggatgccaaggagagatgccacctgtactgcgagtccagggagaccggggaggtggtgtccatgaagcgcatggtgcatgacgggacgcgctgctcctacaaggacgccttcagcctctgtgtgcgcggggactgcaggaaggtgggctgtgacggtgtgatcggctccagcaagcaggaagacaagtgtggcgtgtgcggaggggacaacagccactgcaaagtggtcaagggcacgttcacacggtcacccaagaagcatggttacatcaagatgtttgagatccctgcaggagccagacacctgctcattcaggaggtagacgccaccagccaccatctggccgtcaagaacctggagacaggcaagttcatcttaaatgaagagaatgacgtggatgccagttccaaaaccttcattgccatgggcgtggagtgggagtacagagacgaggacggccgggagacgctgcagaccatgggccccctccacggcaccatcaccgttctggtcatcccggtgggagacacccgggtctcactgacgtacaaatacatgatccatgaggactcactgaatgtcgacgacaacaacgtcctggaagaggactctgtggtctacgagtgggccctgaagaagtggtctccgtgctccaagccctgtggcggagggtcccagttcaccaagtatggctgccgccggaggctggaccacaagatggtacaccgtggcttctgtgccgccctctcgaagcccaaagccatccgcagagcgtgcaacccacaggaatgctcccagccagtgtgggtcacaggcgaatgggagccatgtagccagacctgtgggcggacaggcatgcaggtgcgctccgtgcgctgcattcagccgctacacgacaacaccacccgctccgtgcacgccaagcactgcaatgacgcccggcccgagagccgccgggcctgcagccgcgagctctgccctggtcgttggcgagccgggccctggtcccagtgctcagtaacctgtggcaacggcacccaggagcggccagtgctctgccgcaccgcggacgacagcttcggcatctgccaggaggagcgtcctgagacagcgaggacctgcaggcttggcccctgtccccgaaacatctcagatccctccaagaagagctacgtagttcagtggctgtcccgcccggaccccgactcgcccatccggaagatctcgtcaaagggccactgccaaggcgacaagtcaatattctgtaggatggaagtcttgtcccgctattgctccatcccaggctacaacaagctgtgctgcaagtcctgtaacctgtacaacaacctcaccaacgtggagggcaggatagagccaccgcctgggaagcacaacgacattgacgtgttcatgcctaccctcccagtgcccactgtagccatggaggtgcggccatcaccaagcacccccctggaggtccctctcaatgcctccagcaccaatgccacagaggatcacccagaaaccaatgccgtagatgaaccctacaaaatccatggcctggaagatgaagtccagccacccaacctaatccctcgacgaccgagcccctatgaaaagaccagaaaccaaagaatccaagagctcattgatgagatgcggaagaaagagatgctcggaaagttctaataaaatggaaagatagcatccctagcatttttttcttgcttatagagatattccatgggatagcaaatcctgtgtcatggagatgaagtcaaaattcctgattccaaaaggttttgagaaaacaaagagg

SEQ ID NO: 12387 - protein, 1211 aa, Homo sapiens
MDPPAGAARRLLCPALLLLLLLLPPPLLPPPPPPANARLAAAADPPGGPLGHGAERILAVPVRTDAQGRLVSHVVSAATSRAGVRARRAAPVRTPSFPGGNEEEPGSHLFYNVTVFGRDLHLRLRPNARLVAPGATMEWQGEKGTTRVEPLLGSCLYVGDVAGLAEASSVALSNCDGLAGLIRMEEEEFFIEPLEKGLAAQEAEQGRVHVVYRRPPTSPPLGGPQALDTGASLDSLDSLSRALGVLEEHANSSRRRARRHAADDDYNIEVLLGVDDSVVQFHGKEHVQKYLLTLMNIVNEIYHDESLGAHINVVLVRIILLSYGKSMSLIEIGNPSQSLENVCRWAYLQQKPDTGHDEYHDHAIFLTRQDFGPSGMQGYAPVTGMCHPVRSCTLNHEDGFSSAFVVAHETGHVLGMEHDGQGNRCGDEVRLGSIMAPLVQAAFHRFHWSRCSQQELSRYLHSYDCLLDDPFAHDWPALPQLPGLHYSMNEQCRFDFGLGYMMCTAFRTFDPCKQLWCSHPDNPYFCKTKKGPPLDGTMCAPGKHCFKGHCIWLTPDILKRDGSWGAWSPFGSCSRTCGTGVKFRTRQCDNPHPANGGRTCSGLAYDFQLCSRQDCPDSLADFREEQCRQWDLYFEHGDAQHHWLPHEHRDAKERCHLYCESRETGEVVSMKRMVHDGTRCSYKDAFSLCVRGDCRKVGCDGVIGSSKQEDKCGVCGGDNSHCKVVKGTFTRSPKKHGYIKMFEIPAGARHLLIQEVDATSHHLAVKNLETGKFILNEENDVDASSKTFIAMGVEWEYRDEDGRETLQTMGPLHGTITVLVIPVGDTRVSLTYKYMIHEDSLNVDDNNVLEEDSVVYEWALKKWSPCSKPCGGGSQFTKYGCRRRLDHKMVHRGFCAALSKPKAIRRACNPQECSQPVWVTGEWEPCSQTCGRTGMQVRSVRCIQPLHDNTTRSVHAKHCNDARPESRRACSRELCPGRWRAGPWSQCSVTCGNGTQERPVLCRTADDSFGICQEERPETARTCRLGPCPRNISDPSKKSYVVQWLSRPDPDSPIRKISSKGHCQGDKSIFCRMEVLSRYCSIPGYNKLCCKSCNLYNNLTNVEGRIEPPPGKHNDIDVFMPTLPVPTVAMEVRPSPSTPLEVPLNASSTNATEDHPETNAVDEPYKIHGLEDEVQPPNLIPRRPSPYEKTRNQRIQELIDEMRKKEMLGKF

SEQ ID NO: 12388 - DNA, 3653 bp, Homo sapiens
atggatccgccggcgggagccgctcgccgcctgctctgccccgcgctgctgctgctgctgctgctgctgccgccgccgctcctgccgccgccgccgccgcccgcgaacgccaggctcgccgccgccgccgaccccccaggcgggcccctggggcacggagcggagcgcatcctggcggtgcccgtgcgcactgacgcccagggccgcttggtgtcccacgtggtgtcggcagctacgtccagagcaggggtacgagcccgcagggccgccccggtccggaccccgagcttccccggaggcaacgaggaggagcctggcagtcacctcttctacaatgtcacggtctttggccgagacctgcacctgcggctgcggcccaacgcccgcctcgtggcgcccggggccactatggagtggcagggcgagaagggcaccacccgcgtggagcccctgctcgggagctgtctctacgtcggagacgtggccggcctagccgaagcctcctctgtggcgctcagcaactgcgatgggctggctggtctgatccggatggaggaggaggagttcttcatcgaacccttggagaaggggctggcggcgcaggaggctgagcaaggccgtgtgcatgtggtgtatcgccggccacccacgtcccctcctctcggggggccacaggccctggacacaggggcctccctggacagcctggacagcctcagccgcgccctgggcgtcctagaggagcacgccaacagctcgaggcggagggcacgcaggcatgctgcggacgatgactacaacatcgaggtcctgctgggcgtggatgactctgtggtgcagttccacgggaaggagcacgtacagaagtacctgctgacactcatgaacattgtcaatgaaatctaccatgacgagtccttgggtgcccacatcaacgtggtcctggtgcggatcatcctcctgagctatggaaagtccatgagcctcatcgagatcgggaacccctctcagagcctggagaatgtctgccgctgggcctacctccagcagaagccagacacgggccacgatgaataccacgatcacgccatcttcctcacacggcaggactttgggccttccggcatgcaaggctatgctcctgtcaccggcatgtgccatccggtccgcagctgcaccctgaaccatgaggacggcttctcctcagcgtttgtggtggcccatgagactggccacgtgctgggcatggagcacgacgggcagggcaaccgctgtggcgacgaggtgcggctgggcagcatcatggcgcccctggtgcaggccgccttccaccgcttccactggtcccgctgcagccagcaggagctgagccgctacctgcactcctatgactgcctgctggatgaccccttcgcccacgactggccggcgctgccccagctcccgggactgcactactccatgaacgagcaatgccgctttgacttcggcctgggctacatgatgtgcacggcgttccggacctttgacccctgcaagcagctgtggtgcagccatcctgacaacccctacttttgcaagaccaagaaggggccccccttggacgggactatgtgtgcacctggcaagcattgttttaaaggacactgcatctggctgacacctgacatcctcaaacgggacggcagctggggcgcttggagtccgtttggctcctgctcacgtacctgtggcacgggcgtgaagttcaggacccgccagtgtgacaacccacacccggccaacgggggccgcacctgctcgggccttgcctacgacttccagctctgcagccgccaggactgccccgactccctggctgacttccgcgaggagcagtgccgccagtgggacctgtacttcgagcacggcgacgcccagcaccactggctgccccacgagcaccgggatgccaaggagagatgccacctgtactgcgagtccagggagaccggggaggtggtgtccatgaagcgcatggtgcatgacgggacgcgctgctcctacaaggacgccttcagcctctgtgtgcgcggggactgcaggaaggtgggctgtgacggtgtgatcggctccagcaagcaggaagacaagtgtggcgtgtgcggaggggacaacagccactgcaaagtggtcaagggcacgttcacacggtcacccaagaagcatggttacatcaagatgtttgagatccctgcaggagccagacacctgctcattcaggaggtagacgccaccagccaccatctggccgtcaagaacctggagacaggcaagttcatcttaaatgaagagaatgacgtggatgccagttccaaaaccttcattgccatgggcgtggagtgggagtacagagacgaggacggccgggagacgctgcagaccatgggccccctccacggcaccatcaccgttctggtcatcccggtgggagacacccgggtctcactgacgtacaaatacatgatccatgaggactcactgaatgtcgacgacaacaacgtcctggaagaggactctgtggtctacgagtgggccctgaagaagtggtctccgtgctccaagccctgtggcggagggtcccagttcaccaagtatggctgccgccggaggctggaccacaagatggtacaccgtggcttctgtgccgccctctcgaagcccaaagccatccgcagagcgtgcaacccacaggaatgctcccagccagtgtgggtcacaggcgaatgggagccatgtagccagacctgtgggcggacaggcatgcaggtgcgctccgtgcgctgcattcagccgctacacgacaacaccacccgctccgtgcacgccaagcactgcaatgacgcccggcccgagagccgccgggcctgcagccgcgagctctgccctggtcgttggcgagccgggccctggtcccagtgctcagtaacctgtggcaacggcacccaggagcggccagtgctctgccgcaccgcggacgacagcttcggcatctgccaggaggagcgtcctgagacagcgaggacctgcaggcttggcccctgtccccgaaacatctcagatccctccaagaagagctacgtagttcagtggctgtcccgcccggaccccgactcgcccatccggaagatctcgtcaaagggccactgccaaggcgacaagtcaatattctgtaggatggaagtcttgtcccgctattgctccatcccaggctacaacaagctgtgctgcaagtcctgtaacctgtacaacaacctcaccaacgtggagggcaggatagagccaccgcctgggaagcacaacgacattgacgtgttcatgcctaccctcccagtgcccactgtagccatggaggtgcggccatcaccaagcacccccctggaggtccctctcaatgcctccagcaccaatgccacagaggatcacccagaaaccaatgccgtagatgaaccctacaaaatccatggcctggaagatgaagtccagccacccaacctaatccctcgacgaccgagcccctatgaaaagaccagaaaccaaagaatccaagagctcattgatgagatgcggaagaaagagatgctcggaaagttctaataaaatggaaagatagc

SEQ ID NO: 12389 - protein, 1211 aa, Homo sapiens; identical to SEQ ID NO: 12387

SEQ ID NO: 12390 - DNA, 1944 bp, Homo sapiens
atggatccgccggcgggagccgctcgccgcctgctctgccccgcgctgctgctgctgctgctgctgctgccgccgccgctcctgccgccgccgccgccgcccgcgaacgccaggctcgccgccgccgccgaccccccaggcgggcccctggggcacggagcggagcgcatcctggcggtgcccgtgcgcactgacgcccagggccgcttggtgtcccacgtggtgtcggcagctacgtccagagcaggggtacgagcccgcagggccgccccggtccggaccccgagcttccccggaggcaacgaggaggagcctggcagtcacctcttctacaatgtcacggtctttggccgagacctgcacctgcggctgcggcccaacgcccgcctcgtggcgcccggggccactatggagtggcagggcgagaagggcaccacccgcgtggagcccctgctcgggagctgtctctacgtcggagacgtggccggcctagccgaagcctcctctgtggcgctcagcaactgcgatgggctggctggtctgatccggatggaggaggaggagttcttcatcgaacccttggagaaggggctggcggcgcaggaggctgagcaaggccgtgtgcatgtggtgtatcgccggccacccacgtcccctcctctcggggggccacaggccctggacacaggggcctccctggacagcctggacagcctcagccgcgccctgggcgtcctagaggagcacgccaacagctcgaggcggagggcacgcaggcatgctgcggacgatgactacaacatcgaggtcctgctgggcgtggatgactctgtggtgcagttccacgggaaggagcacgtacagaagtacctgctgacactcatgaacattgtcaatgaaatctaccatgacgagtccttgggtgcccacatcaacgtggtcctggtgcggatcatcctcctgagctatggaaagtccatgagcctcatcgagatcgggaacccctctcagagcctggagaatgtctgccgctgggcctacctccagcagaagccagacacgggccacgatgaataccacgatcacgccatcttcctcacacggcaggactttgggccttccggcatgcaaggctatgctcctgtcaccggcatgtgccatccggtccgcagctgcaccctgaaccatgaggacggcttctcctcagcgtttgtggtggcccatgagactggccacgtgctgggcatggagcacgacgggcagggcaaccgctgtggcgacgaggtgcggctgggcagcatcatggcgcccctggtgcaggccgccttccaccgcttccactggtcccgctgcagccagcaggagctgagccgctacctgcactcctatgactgcctgctggatgaccccttcgcccacgactggccggcgctgccccagctcccgggactgcactactccatgaacgagcaatgccgctttgacttcggcctgggctacatgatgtgcacggcgttccggacctttgacccctgcaagcagctgtggtgcagccatcctgacaacccctacttttgcaagaccaagaaggggccccccttggacgggactatgtgtgcacctggcaagttcaggccgggcgcggtggctcatgcctgttatcccagcactttgggaggccaaggtaggtggatcgcctgaggtcagaagttcaagacaagtctggttaacatggcaaaatcccgtctctactaaaaatacaaaaattagctgggcgcggtggtgggtgcctgtaatcccagctactccggaggctgaggcatgaaaatcgtttgagcccaggaggcggaggttgcggtgagccaagatcgcgtcgctgctctccagtctggatcacacagcaagaccctgtctcaaaaaataaaaataaaagtgaagtgcacc

SEQ ID NO: 12391 - protein, 566 aa, Homo sapiens; identical to SEQ ID NO: 1205

SEQ ID NO: 12392 - DNA, 738 bp, Homo sapiens
atggtccagtcaggcggccccgacttcaggtcagagggcacggaggacgtccgggcagaggacttggaggacgtcagggcagaggacttggaggacgtcagggcagagagcacagagtacgtcagggcagagagcaaggaggacgtcagggcagaggactcagagggcgttggggcagagggcacagaggacgtcggtgcagaggactcagaggacgtcagggcagagggcacggaggacgttggggcagaggacttggaggacgtcagggcagaaggcacagaggacgtcgggacagagggcacggaggacgtcggggcagaggactcagaggacatcagggcagagagctcagaggacatcggggcagagagcacagaggacgtcggggcagagggcacggaggacgtcggggcagaggactcagaggacattggggcagagagcacgcaggacgtcagggcagaggactcagaggacgtcggggcagagggcacggaggacgttggggcagagggcacagaggacgtcggggcagaggactcaggatggtcctgcaagcccctgctcctacacatccacaacatcgccctctgctccgccagctcccgtctgtccaggttgcaccatcataacccagacaccaacaccctcaaccaggacttgcagtccaccatcatgcccgtccctgctgaattccactactgtgcctctcgacacgctttccactctcattag

SEQ ID NO: 12393 - protein, 245 aa, Homo sapiens
MVQSGGPDFRSEGTEDVRAEDLEDVRAEDLEDVRAESTEYVRAESKEDVRAEDSEGVGAEGTEDVGAEDSEDVRAEGTEDVGAEDLEDVRAEGTEDVGTEGTEDVGAEDSEDIRAESSEDIGAESTEDVGAEGTEDVGAEDSEDIGAESTQDVRAEDSEDVGAEGTEDVGAEGTEDVGAEDSGWSCKPLLLHIHNIALCSASSRLSRLHHHNPDTNTLNQDLQSTIMPVPAEFHYCASRHAFHSH

SEQ ID NO: 12394 - DNA, 354 bp, Homo sapiens
gtggtgtggagggcagaggcagtggtgggaagcctgtgtgtggccgacgcatgcttttacgctgtcatcacggccttgctttctatagcagggatctgagaagcaggcaggcagctgctctgcccgagactgtcaggagttggtggatgtgaatccatgtctgaaggatgggtgtcccgtttctgaaacccacagagcagccttgattgggaggcgtcctgtgcccatctcgtgccccccgtccttctcctgcgtccaggttctggttctgccgcctcctccgcacgctgctcaccagcctgctaagtggatgtgaataaacaatcatgcagggtttggtgcattctttcctgg

SEQ ID NO: 12395 - protein, 33 aa, Homo sapiens
MLLRCHHGLAFYSRDLRSRQAAALPETVRSWWM

SEQ ID NO: 12396 - DNA, 624 bp, Homo sapiens
aggcaggcagctgctctgcccgagactgtcaggagttggtggatgtgaatccatgtctgaagcccaagctctcactactctgctgtctccctgaggggtgcatgaaggccccagcccagccagtgacacagaggttgggaagaccagggcgtgaagcttctgtgcttggagaacaggagggcttgtggagctgtggttgatggcgtgtccaggaagcctggccaggctggggtctggcaacagcctcaccacgatggcatggcggtgggcccggcctctacccgctgcgccacagctcctggctcctggctccaggtcatctctgcccacagccagtgtctctggtgagcctgggcaggtgggaggccgaagctgtgccccactggtttggatgctgagctctggggtgacctgcaccctgtagtcctacagttcacacgctatggatgcctgaagggatgggtgtcccgtttctgaaacccacagagcagccttgattgggaggcgtcctgtgcccatctcgtgccccccgtccttctcctgcgtccaggttctggttctgccgcctcctccgcacgctgctcaccagcctgctaagtggatgtgaataaacaatcatgcagg

SEQ ID NO: 12397 - protein, 74 aa, Homo sapiens
MACPGSLARLGSGNSLTTMAWRWARPLPAAPQLLAPGSRSSLPTASVSGEPGQVGGRSCAPLVWMLSSGVTCTL

SEQ ID NO: 12398 - DNA, 1424 bp, Homo sapiens
gtccccgccccctgctgggcctctctccgcagccgcgagacccgcgcttggcgcataggccggttctaatttacaagaacaccgcggcctgaggccggagagtcccttcaacccgggaggcggcggctgcagggagccgagacggcgccattgccctccagcctgggcaaaaagagcgaaactccgtctcaaaaaaaaaaaaacatggccgaaaccaggaagctgcgcgatggcgccacggcccctcttctcccggcctgtgtccggaaggtttccctccgaggcgccccggctcccgcaagcggaggagagggcgggacgtgccggggccggagctcagaggccctggggccgctctgctctcccgccatcgcaagggcggcgctgacctgaggcctccccgcaaaggtccccgaggcggcggcggcggcgggctgtgagaaccgcagaagaacgctgggcgcgcagcgacccgtccacccccgcgaggagagacttccacagaggcagcgtttccacagcccaaagccacgtttctagggtgatgcagccccagtaagttcctggcggggaagctcacggctgtcaaaagaactcttcgctccagccggcgcacgaaggggaggagggcaggaggctgccgcccgcacaggtcatctgatcacgtcgcccgccctagtctgcttttgtgaatctccactttgttcaacccccacccgccgtctctccctccctgcgccttccctctaaccttaaagacccagctacctctacgcaaatggtagctacctctgcgcaggtggaagttgagttcggttcacgcgggaccctcttccctgtggcaagctgctgaaggagacctgctgttactgctttagctgctgttctgcttaatctcagacagctggaaggtagtattccgccctcacccagccacccgagtaaattgcccctttcttcccttgatctaagaaggttgctccggatctcgccatctggcctgcgttcaatcagcagaagcttcctggaggagcaggaggaggcactgtgctcgcatcacataccagtggccagaagttggcttcagggaagctcaggaaataggatgcgagaagccatgagacctccccaaactctgcagtaacagagtcaacaagacaatggcttaaagatggagagaccagttgatcggtcacacaagctgttccacgataattcttgtgtcagaaggggaggctgactaccaggaccactggccccacttccagcccctccattctgagtacacttcagagggctctggcagggtgagggggtcttggtggtgccacagagagtaaaggtctagcacacccattgtggagatatttcatggggacaacccagtgacttcacttgaagtaaagtgggattttccaaccttg

SEQ ID NO: 12399 - protein, 62 aa, Homo sapiens
MAETRKLRDGATAPLLPACVRKVSLRGAPAPASGGEGGTCRGRSSEALGPLCSPAIARAALT

SEQ ID NO: 12400 - DNA, 948 bp, Homo sapiens
aggttggaaaatcccactttacttcaagtgaagtcactgggttgtccccatgaaatatctccacaatgggtgtgctagacctttactctctgtggcaccaccaagaccccctcaccctgccagagccctctgaagtgtactcagaatggaggggctggaagtggggccagtggtcctggtagtcagcctccccttctgacacaagaattatcgtggaacagcttgtgtgaccgatcaactggtctctccatctttaagccattgtcttgttgactctgttactgcagagtttggggaggtctcatggcttctcgcatcctatttcctgagcttccctgaagccaacttctggccactggtatgtgatgcgagcacagtgcctcctcctgctcctccaggaagcttctgctgattgaacgcaggccagatggcgagatccggagcaaccttcttagatcaagggaagaaaggggcacaagaggggagtaggtaacaagataaaaggagctccctccctgatgactacagagccatcgtggcagccctgggcctccatttcagacgttcatcttgcctaagccaccacaccatcagggtctcagtcagtcatcattctcatttactcgggtggctgggcgagggcggaatactaccttccagctgtctgagattaagcagaacagcagctaaagcagtaacagcaggtctccttcagcagcttgccacagggaagagggtcccgcgtgaaccgaactcaacttccacctgcgcagaggtagctaccatttgcgtagaggtagctgggtctttaaggttagagggaaggcgcagggagggagagacggcgggtgggggttgaacaaagtggagattcacaaaagcagactagggcgggcgacgtgatcagatgacctgtgcgggcggcagcctcctgccctcctccccttc

SEQ ID NO: 12401 - protein, 38 aa, Homo sapiens
MGVLDLYSLWHHQDPLTLPEPSEVYSEWRGWKWGQWSW

SEQ ID NO: 12402 - DNA, 1414 bp, Homo sapiens
gtgagcttccccgccaggaacttactggggctgcatcaccctagaaacgtggctttgggctgtggaaacgctgcctctgtggaagtctctcctcgcgggggtggacgggtcgctgcgcgcccagcgttcttctgcggttctcacagcccgccgccgccgccgcctcggggacctttgcggggaggcctcagggcaccttcctcctctctctcaggcacgtcctcgacctcagttgccacgtgcacatgctggtgccttccaggctggagtatagtggcatgatcatagatcactgcagcctcaaactcctgggctcaagcgatcctcccacctcagcctccatatagctggtggggaccaagtttctaacacatgaatgttgggagacacattcagaccatcgcagtggccttataaaaagagacacaagagcttgctctctgccatgtgagaataccacaagaagactgtcctcagcaaatcagaaagcgggtggaccctcatcagacaccagatgtgcctgcaccttgatcttggacttgccagccttcagaacagtaagaaagaaatgtgtgttgtttaagccacccagtctatggtaacttgctatagcagcccactaggagaccccaagatatttaaaaactcatcagcacctgctttctgcatctggaccctgatcttctggtgggtttaccagttacttgtagagtgtccctgtgatagttttaggtgtcaacttgacaggattgagggatgcctagatggctggggaagcactgtttctgagaaggaccatgtttttggaggagactgttttatgagtgaatttcaggggacacattcagatcatggcagtggcattataaagagagacacaaaagcttgctctctctctctgccatgtaagactaccacacaaagactgccatctgcaaaccagaagcaggtgggctttcctcagacaccagatctgcctgcaccttgatcttggacttgccagccttcagaactctaagaaagaaatggtagcatggcttggtctaagttggaaggcctgagaaacaagcacatggtggaactgagttcaaggataaagacttgagaatacctgctcagtggactgagtagggaagatcaaccctcaatgtaggcaggcactatccaatcacctgagggcccagatggaacaaaaaggtggaagaagggtgaattctctcttccagagctgtgacacccttctcatgcccttgtaccacacaactctaggtcctttggcctttggactctgacacttgcaccagtggccctctggggctctcaagcctttagccttgaacttagttacaccatgtgcctccttgtttctcaggccttccaacttggatcaggccatgccaccggcttctctgat

SEQ ID NO: 12403 - protein, 33 aa, Homo sapiens
MLVPSRLEYSGMIIDHCSLKLLGSSDPPTSASI

SEQ ID NO: 12404 - DNA, 500 bp, Homo sapiens
gggagaagaggggccgtggcgccatcgcgcagcttcctggtttcggccatgtttttttttttttgagacggagtttcgctctttttgcccaggctggagggcaatggcgccgtctcggctccctgcagccgccgcctcccgggttgaagggactctccggcctcaggccgcggtgttcttgtaaattagaaccggcctatgcgccaagcgcgggtctcgcggctgcggagagaggcccagcagggggcggggacgccgggaggcggggcctggccgagctgcgcacacccgggtggttctggctacgggtacccggacctgcccaacgaccgttctccattcccgacctccgcaccctacccggtccgcagggcaccttcctcctctctctcaggcacgtcctcgacctcagttgccacgtgcacatgctggtgccttccaggctggagtgcagtggcgtaatcatggctcactgcagcctcaaccttcctggactcaag

SEQ ID NO: 12405 - protein, 87 aa, Homo sapiens [sequence omitted]

SEQ ID NO: 12406 - DNA, 1290 bp, Homo sapiens
acgggtacccggacctgcccaacgaccgttctccattcccgacctccgcaccctacccggtccgcagggcaccttcctcctctctctcaggcacgtcctcgacctcagttgccacgtgcacatgctggtgccttccaggctggagtatagtggcatgatcatagatcactgcagcctcaaactcctgggctcaagcgatcctcccacctcagcctccatatagctggtggggaccaagtttctaacacatgaatgttgggagacacattcagaccatcgcagtggccttataaaaagagacacaagagcttgctctctgccatgtgagaataccacaagaagactgtcctcagcaaatcagaaagcgggtggaccctcatcagacaccagatgtgcctgcaccttgatcttggacttgccagccttcagaacagtaagaaagaaatgtgtgttgtttaagccacccagtctatggtaacttgctatagcagcccactaggagaccccaagatatttaaaaactcatcagcacctgctttctgcatctggaccctgatcttctggtgggtttaccagttacttgtagagtgtccctgtgatagttttaggtgtcaacttgacaggattgagggatgcctagatggctggggaagcactgtttctgagaaggaccatgtttttggaggagactgttttatgagtgaatttcaggggacacattcagatcatggcagtggcattataaagagagacacaaaagcttgctctctctctctgccatgtaagactaccacacaaagactgccatctgcaaaccagaagcaggtgggctttcctcagacaccagatctgcctgcaccttgatcttggacttgccagccttcagaactctaagaaagaaatggtagcatggcttggtctaagttggaaggcctgagaaacaagcacatggtggaactgagttcaaggataaagacttgagaatacctgctcagtggactgagtagggaagatcaaccctcaatgtaggcaggcactatccaatcacctgagggcccagatggaacaaaaaggtggaagaagggtgaattctctcttccagagctgtgacacccttctcatgcccttgtaccacacaactctaggtcctttggcctttggactctgacacttgcaccagtggccctctggggctctcaagcctttagccttgaacttagttacaccatgtgcctccttgtttctcaggccttccaacttggatcaggccatgccaccggcttctctgat

SEQ ID NO: 12407 - protein, 33 aa, Homo sapiens; identical to SEQ ID NO: 12403

SEQ ID NO: 12408 - DNA, 1391 bp, Homo sapiens
attcccgacctccgcaccctacccggtccgcagggcaccttcctcctctctctcaggcacgtcctcgacctcagttgccacgtgcacatgctggtgccttccaggtcggtctttctccaccagactccacctggaactttcttccttttcgtcctgtgctggcctaacccctgctcggcctcggccctcagctgccggctctaacaaagcctctgtctttcccagacccctgtgaccaggctggagtatagtggcatgatcatagatcactgcagcctcaaactcctgggctcaagcgatcctcccacctcagcctccatatagctggtggggaccaagtttctaacacatgaatgttgggagacacattcagaccatcgcagtggccttataaaaagagacacaagagcttgctctctgccatgtgagaataccacaagaagactgtcctcagcaaatcagaaagcgggtggaccctcatcagacaccagatgtgcctgcaccttgatcttggacttgccagccttcagaacagtaagaaagaaatgtgtgttgtttaagccacccagtctatggtaacttgctatagcagcccactaggagaccccaagatatttaaaaactcatcagcacctgctttctgcatctggaccctgatcttctggtgggtttaccagttacttgtagagtgtccctgtgatagttttaggtgtcaacttgacaggattgagggatgcctagatggctggggaagcactgtttctgagaaggaccatgtttttggaggagactgttttatgagtgaatttcaggggacacattcagatcatggcagtggcattataaagagagacacaaaagcttgctctctctctctgccatgtaagactaccacacaaagactgccatctgcaaaccagaagcaggtgggctttcctcagacaccagatctgcctgcaccttgatcttggacttgccagccttcagaactctaagaaagaaatggtagcatggcttggtctaagttggaaggcctgagaaacaagcacatggtggaactgagttcaaggataaagacttgagaatacctgctcagtggactgagtagggaagatcaaccctcaatgtaggcaggcactatccaatcacctgagggcccagatggaacaaaaaggtggaagaagggtgaattctctcttccagagctgtgacacccttctcatgcccttgtaccacacaactctaggtcctttggcctttggactctgacacttgcaccagtggccctctggggctctcaagcctttagccttgaacttagttacaccatgtgcctccttgtttctcaggccttccaacttggatcaggccatgccaccggcttctctgat

SEQ ID NO: 12409 - protein, 130 aa, Homo sapiens [sequence omitted]

SEQ ID NO: 12410 - DNA, 1124 bp, Homo sapiens
agctgttgcattagggatagatggaaagacttatttatgtattgactgactgattgatggggccttgttctgttgcctaggctggagtatagtggcatgatcatagatcactgcagcctcaaactcctgggctcaagcgatcctcccacctcagcctccatatagctggtggggaccaagtttctaacacatgaatgttgggagacacattcagaccatcgcagtggccttataaaaagagacacaagagcttgctctctgccatgtgagaataccacaagaagactgtcctcagcaaatcagaaagcgggtggaccctcatcagacaccagatgtgcctgcaccttgatcttggacttgccagccttcagaacagtaagaaagaaatgtgtgttgtttaagccacccagtctatggtaacttgctatagcagcccactaggagaccccaagatatttaaaaactcatcagcacctgctttctgcatctggaccctgatcttctggtgggtttaccagttacttgtagagtgtccctgtgatagttttaggtgtcaacttgacaggattgagggatgcctagatggctggggaagcactgtttctgagaaggaccatgtttttggaggagactgttttatgagtgaatttcaggggacacattcagatcatggcagtggcattataaagagagacacaaaagcttgctctctctctctgccatgtaagactaccacacaaagactgccatctgcaaaccagaagcaggtgggctttcctcagacaccagatctgcctgcaccttgatcttggacttgccagccttccaacttggatcaggccatgccaccggcttctctgattctccagcttgcagatggtatattgtgaccctggcatttaataactatgactttggtcttaagcaattttcttcctctgtggattgatatttacatatcaatgtggataataatttcttaccacggtaactgttgtgaggtaaaaatgagttaacataagtaaaaccgagcacatgcaaaccatccgaaatggttaatacttactatttgtacttgaagaaataaatgtttttgacaataaacttcttgtgcagttttcctc

SEQ ID NO: 12411 - protein, 130 aa, Homo sapiens [sequence omitted]

SEQ ID NO: 12412 - DNA, 1461 bp, Homo sapiens
gtgatgtgtgtgggaaaacgttcagaaacaatgcaggcctcaaagtccacaggaggctccatactggggaaaaaccatataagtgtgatgtgtgtgggaaagcctatatctcacgctctagccttaaaaatcacaaaggaatccaccttggggagaagccctataaatgtagctattgtgagaaatccttcaactacagctctgcccttgaacagcataaaaggattcataccagggaaaaaccctttgggtgtgatgagtgtggtaaagctttcagaaataattctggccttaaagtacataaacgaatccacactggggaacgaccttacaaatgtgaagaatgtgggaaagcatacatctctctctcgagccttataaatcataaaagtgtacaccctggggagaagccctttaagtgtgacgagtgtgagaaggccttcatcacataccgaacccttacaaaccacaaaaaagttcatcttggggagaagccctacaaatgtgatgtgtgtgagaaatcttttaattacacatcgctcctttctcagcacagaagggtccacactagagagaaaccctatgaatgtgacaggtgtgagaaggtcttcagaaacaactcaagccttaaagttcataaaagaatccatactggggagaggccctatgaatgtgatgtgtgtggaaaagcctacatctcacactcaagccttattaaccataagagtacccaccctggcaggacaccccatacatgtgatgaatgtggaaaagcttttttctcaagcagaactcttataagccataaaagagtccatcttggggagaaacccttcaagtgtgttgagtgtgggaaatctttcagttacagctctctcctttctcagcacaagaggatccacacaggggagaaaccctatgtgtgtgataggtgtgggaaggccttcaggaacagctcaggcctcacagtgcataaaaggatccacacagtttcagatgaactcccataatgaatgatgaatttgtgatgagggataacctggaagtggtattcacacattatgctacaataaaaggttctaccgtggagaggattttgacacattcagtaactaatggaacacaccgtcaacatgaattcgcaccttacatgacagaagtgattcagggattcctatgaatagaaatgctgagaaggaacgcattttattgcagaagctaaaaagctaaagtaccagtcatctagagagaaggaaattaatgtttcttaataatcctgttaaatgtttgattgtttttggaatgtgttattgtaaagatgtcatgcaggacatgtatatgttgtctgttgtaaaatgttaacgaatactttgttcagggctcactctctctttgtcatgaaagccagctccttgtggcgaggtaaagtggaattccaataaagaaattccttaaatcaaa

SEQ ID NO: 12413 - protein, 32 aa, Homo sapiens
MCVIGVGRPSGTAQASQCIKGSTQFQMNSHNE

SEQ ID NO: 12414 - DNA, 2047 bp, Homo sapiens
gacagctgtgtctcgatggagtagactctcagaacagcgcagtttgccctccgctcacgcagagcctctccgtggcttccgcaccttgagcattaggccagttctcctcttctctctaatccatccgtcacctctcctgtcatccgtttccatgccgtgaggtccattcacagaacacatccatggctctcatgctcagtttggttctgagtctcctcaagctgggatcagggcagtggcaggtgtttgggccagacaagcctgtccaggccttggtgggggaggacgcagcattctcctgtttcctgtctcctaagaccaatgcagaggccatggaagtgcggttcttcaggggccagttctctagcgtggtccacctctacagggacgggaaggaccagccatttatgcagatgccacagtatcaaggcaggacaaaactggtgaaggattctattgcggaggggcgcatctctctgaggctggaaaacattactgtgttggatgctggcctctatgggtgcaggattagttcccagtcttactaccagaaggccatctgggagctacaggtgtcagcactgggctcagttcctctcatttccatcacgggatatgttgatagagacatccagctactctgtcagtcctcgggctggttcccccggcccacagcgaagtggaaaggtccacaaggacaggatttgtccacagactccaggacaaacagagacatgcatggcctgtttgatgtggagatctctctgaccgtccaagagaacgccgggagcatatcctgttccatgcggcatgctcatctgagccgagaggtggaatccagggtacagataggagatacctttttcgagcctatatcgtggcacctggctaccaaagtactgggaatactctgctgtggcctattttttggcattgttggactgaagattttcttctccaaattccagtggaaaatccaggcggaactggactggagaagaaagcacggacaggcagaattgagagacgcccggaaacacgcagtggaggtgactctggatccagagacggctcacccgaagctctgcgtttctgatctgaaaactgtaacccatagaaaagctccccaggaggtgcctcactctgagaagagatttacaaggaagagtgtggtggcttctcagagtttccaagcagggaaacattactgggaggtggacggaggacacaataaaaggtggcgcgtgggagtgtgccgggatgatgtggacaggaggaaggagtacgtgactttgtctcccgatcatgggtactgggtcctcagactgaatggagaacatttgtatttcacattaaatccccgttttatcagcgtcttccccaggaccccacctacaaaaataggggtcttcctggactatgagtgtgggaccatctccttcttcaacataaatgaccagtcccttatttataccctgacatgtcggtttgaaggcttattgaggccctacattgagtatccgtcctataatgagcaaaatggaactcccatagtcatctgcccagtcacccaggaatcagagaaagaggcctcttggcaaagggcctctgcaatcccagagacaagcaacagtgagtcctcctcacaggcaaccacgcccttcctccccaggggtgaaatgtaggatgaatcacatcccacattcttctttagggatattaaggtctctctcccagatccaaagtcccgcagcagccggccaaggtggcttccagatgaagggggactggcctgtccacatgggagtcaggtgtcatggctgccctgagctgggagggaagaaggctgacattacatttagtttgctctcactccatctggctaagtgatcttgaaataccacctctcaggtgaagaaccgtcaggaattcccatctcacaggctgtggtgtagattaagtagacaaggaatgtgaataatgcttagatcttattgatgacagagtgtatcctaatggtttgttcattatattacactttcagtaa

SEQ ID NO: 12415 - protein, 500 aa, Homo sapiens; identical to SEQ ID NO: 1209

SEQ ID NO: 12416 - DNA, 2147 bp, Homo sapiens
agaacagcgcagtttgccctccgctcacgcagagcctctccgtggcttccgcaccttgagcattaggccagttctcctcttctctctaatccatccgtcacctctcctgtcatccgtttccatgccgtgaggtccattcacagaacacatccatggctctcatgctcagtttggttctgagtctcctcaagctgggatcagggcagtggcaggtgtttgggccagacaagcctgtccaggccttggtgggggaggacgcagcattctcctgtttcctgtctcctaagaccaatgcagaggccatggaagtgcggttcttcaggggccagttctctagcgtggtccacctctacagggacgggaaggaccagccatttatgcagatgccacagtatcaaggcaggacaaaactggtgaaggattctattgcggaggggcgcatctctctgaggctggaaaacattactgtgttggatgctggcctctatgggtgcaggattagttcccagtcttactaccagaaggccatctgggagctacaggtgtcagcactgggctcagttcctctcatttccatcacgggatatgttgatagagacatccagctactctgtcagtcctcgggctggttcccccggcccacagcgaagtggaaaggtccacaaggacaggatttgtccacagactccaggacaaacagagacatgcatggcctgtttgatgtggagatctctctgaccgtccaagagaacgccgggagcatatcctgttccatgcggcatgctcatctgagccgagaggtggaatccagggtacagataggagatacctttttcgagcctatatcgtggcacctggctaccaaagtactgggaatactctgctgtggcctattttttggcattgttggactgaagattttcttctccaaattccagtgtaagcgagagagagaagcatgggccggtgccttattcatggttccagcagggacaggatcagagatgctcccacatccagctgcttctcttcttctagtcctagcctccaggggcccaggcccaaaaaaggaaaatccaggcggaactggactggagaagaaagcacggacaggcagaattgagagacgcccggaaacacgcagtggaggtgactctggatccagagacggctcacccgaagctctgcgtttctgatctgaaaactgtaacccatagaaaagctccccaggaggtgcctcactctgagaagagatttacaaggaagagtgtggtggcttctcagagtttccaagcagggaaacattactgggaggtggacggaggacacaataaaaggtggcgcgtgggagtgtgccgggatgatgtggacaggaggaaggagtacgtgactttgtctcccgatcatgggtactgggtcctcagactgaatggagaacatttgtatttcacattaaatccccgttttatcagcgtcttccccaggaccccacctacaaaaataggggtcttcctggactatgagtgtgggaccatctccttcttcaacataaatgaccagtcccttatttataccctgacatgtcggtttgaaggcttattgaggccctacattgagtatccgtcctataatgagcaaaatggaactcccatagtcatctgcccagtcacccaggaatcagagaaagaggcctcttggcaaagggcctctgcaatcccagagacaagcaacagtgagtcctcctcacaggcaaccacgcccttcctccccaggggtgaaatgtaggatgaatcacatcccacattcttctttagggatattaaggtctctctcccagatccaaagtcccgcagcagccggccaaggtggcttccagatgaagggggactggcctgtccacatgggagtcaggtgtcatggctgccctgagctgggagggaagaaggctgacattacatttagtttgctctcactccatctggctaagtgatcttgaaataccacctctcaggtgaagaaccgtcaggaattcccatctcacaggctgtggtgtagattaagtagacaaggaatgtgaataatgcttagatcttattgatgacagagtgtatcctaatggtttgttcattatattacactttcagtaa

SEQ ID NO: 12417 - protein, 347 aa, Homo sapiens; identical to SEQ ID NO: 1211

SEQ ID NO: 12418 - DNA, 420 bp, Homo sapiens
atgcccacgcttcagagactggagccatcaccataccaagctggtgtacactccaggccctggagccaagagggagcaactatggctgcggaagtcctggaggcagcctccgcggaggagcagaaggaaaaggaagataaagtgactagtccagagaaagctgaagaagcaaaattaaaagcaaggtatcctcatctgggacaaaagcctggaggttcagatttcttaaggaaacgattgcagaaagggcaaaaatattttgattctgggcattacaacagggctaaagcaaaaacgaagagcaagcaacttcctactgcagctccagataagacggaggtcactggtgaccacattcctactccacaggaccttcctcaacggaaaccatcccttgttgctaacaagctggctggctga

SEQ ID NO: 12419 - protein, 139 aa, Homo sapiens
MPTLQRLEPSPYQAGVHSRPWSQEGATMAAEVLEAASAEEQKEKEDKVTSPEKAEEAKLKARYPHLGQKPGGSDFLRKRLQKGQKYFDSGHYNRAKAKTKSKQLPTAAPDKTEVTGDHIPTPQDLPQRKPSLVANKLAG

SEQ ID NO: 12420 - DNA, 2054 bp, Homo sapiens
atgtttagggaggctctagggagaaatgcacagtttgacatcgttcatgaagagcctctccacggctcctgcgcctgagacagctggcctgacctccaaatcatccatccacccctgctgtcatctgttttcatagtgtgagatcaacccacaggaatatccatggcttttgtgctcattttggttctcagtttctacgagctggtgtcaggacagtggcaagtcactggaccgggcaagtttgtccaggccttggtgggggaggacgccgtgttctcctgctccctctttcctgagaccagtgcagaggctatggaagtgcggttcttcaggaatcagttccatgctgtggtccacctctacagagatggggaagactgggaatctaagcagatgccacagtatcgagggagaactgagtttgtgaaggactccattgcaggggggcgtgtctctctaaggctaaaaaacatcactccctcggacatcggcctgtatgggtgctggttcagttcccagatttacgatgaggaggccacctgggagctgcgggtggcagcactgggctcacttcctctcatttccatcgtgggatatgttgacggaggtatccagttactctgcctgtcctcaggctggttcccccagcccacagccaagtggaaaggtccacaaggacaggatttgtcttcagactccagagcaaatgcagatgggtacagcctgtatgatgtggagatctccattatagtccaggaaaatgctgggagcatattgtgttccatccaccttgctgagcagagtcatgaggtggaatccaaggtattgataggagagacgtttttccagccctcaccttggcgcctggcttctattttactcgggttactctgtggtgccctgtgtggtgttgtcatggggatgataattgttttcttcaaatccaaagggaaaatccaggcggaactggactggagaagaaagcacggacaggcagaattgagagacgcccggaaacacgcagtggaggtgactctggatccagagacggctcacccgaagctctgcgtttctgatctgaaaactgtaacccatagaaaagctccccaggaggtgcctcactctgagaagagatttacaaggaagagtgtggtggcttctcagggtttccaagcagggaaacattactgggaggtggacgtgggacaaaatgtagggtggtatgtgggagtgtgtcgggatgacgtagacagggggaagaacaatgtgactttgtctcccaacaatgggtattgggtcctcagactgacaacagaacatttgtatttcacattcaatccccattttatcagcctcccccccagcacccctcctacacgagtaggggtcttcctggactatgagggtgggaccatctccttcttcaatacaaatgaccagtcccttatttataccctgctgacatgtcagtttgaaggcttgttgagaccctatatccagcatgcgatgtatgacgaggaaaaggggactcccatattcatatgtccagtgtcctggggatgagacagagaagaccctgcttaaagggccccacaccacagacccagacacagccaagggagagtgctcccgacaggtggccccagcttcctctccggagcctgcgcacagagagtcacgccccccactctcctttagggagctgaggttcttctgccctgagccctgcagcagcggcagtcacagcttccagatgaggggggattggcctgaccctgtgggagtcagaagccatggctgccctgaagtggggacggaatagactcacattaggtttagtttgtgaaaactccatccagctaagcgatcttgaacaagtcacaacctcccaggctcctcatttgctagtcacggacagtgattcctgcctcacaggtgaagattaaagagacaacgaatgtgaatcatgcttgcaggtttgagggcacagtgtttgctaatgatgtgtttttatattatacattttcccaccataaactctgtttgcttattcc

SEQ ID NO: 12421 - protein, 466 aa, Homo sapiens; identical to SEQ ID NO: 1215

SEQ ID NO: 12422 - DNA, 1951 bp, Homo sapiens
atgtttagggaggctctagggagaaatgcacagtttgacatcgttcatgaagagcctctccacggctcctgcgcctgagacagctggcctgacctccaaatcatccatccacccctgctgtcatctgttttcatagtgtgagatcaacccacaggaatatccatggcttttgtgctcattttggttctcagtttctacgagctggtgtcaggacagtggcaagtcactggaccgggcaagtttgtccaggccttggtgggggaggacgccgtgttctcctgctccctctttcctgagaccagtgcagaggctatggaagtgcggttcttcaggaatcagttccatgctgtggtccacctctacagagatggggaagactgggaatctaagcagatgccacagtatcgagggagaactgagtttgtgaaggactccattgcaggggggcgtgtctctctaaggctaaaaaacatcactccctcggacatcggcctgtatgggtgctggttcagttcccagatttacgatgaggaggccacctgggagctgcgggtggcagcactgggctcacttcctctcatttccatcgtgggatatgttgacggaggtatccagttactctgcctgtcctcaggctgccctcaccttggcgcctggcttctattttactcgggttactctgtggtgccctgtgtggtgttgtcatggggatgataattgttttcttcaaatccaaagggaaaatccaggcggaactgggtatgtgtcatgtcctgagcctcccacacatggttctcccgggtccctccctgatccacagtttgagcctctggacgaccctggctgcaggctggacaggaagcaccgactggagaagaaagcacggacaggcagaattgagagacgcccggaaacacgcagtggaggtgactctggatccagagacggctcacccgaagctctgcgtttctgatctgaaaactgtaacccatagaaaagctccccaggaggtgcctcactctgagaagagatttacaaggaagagtgtggtggcttctcagggtttccaagcagggaaacattactgggaggtggacgtgggacaaaatgtagggtggtatgtgggagtgtgtcgggatgacgtagacagggggaagaacaatgtgactttgtctcccaacaatgggtattgggtcctcagactgacaacagaacatttgtatttcacattcaatccccattttatcagcctcccccccagcacccctcctacacgagtaggggtcttcctggactatgagggtgggaccatctccttcttcaatacaaatgaccagtcccttatttataccctgctgacatgtcagtttgaaggcttgttgagaccctatatccagcatgcgatgtatgacgaggaaaaggggactcccatattcatatgtccagtgtcctggggatgagacagagaagaccctgcttaaagggccccacaccacagacccagacacagccaagggagagtgctcccgacaggtggccccagcttcctctccggagcctgcgcacagagagtcacgccccccactctcctttagggagctgaggttcttctgccctgagccctgcagcagcggcagtcacagcttccagatgaggggggattggcctgaccctgtgggagtcagaagccatggctgccctgaagtggggacggaatagactcacattaggtttagtttgtgaaaactccatccagctaagcgatcttgaacaagtcacaacctcccaggctcctcatttgctagtcacggacagtgattcctgcctcacaggtgaagattaaagagacaacgaatgtgaatcatgcttgcaggtttgagggcacagtgtttgctaatgatgtgtttttatattatacattttcccaccataaactctgtttgcttattcc

SEQ ID NO: 12423 - protein, 251 aa, Homo sapiens
MGMIIVFFKSKGKIQAELGMCHVLSLPHMVLPGPSLIHSLSLWTTLAAGWTGSTDWRRKHGQAELRDARKHAVEVTLDPETAHPKLCVSDLKTVTHRKAPQEVPHSEKRFTRKSVVASQGFQAGKHYWEVDVGQNVGWYVGVCRDDVDRGKNNVTLSPNNGYWVLRLTTEHLYFTFNPHFISLPPSTPPTRVGVFLDYEGGTISFFNTNDQSLIYTLLTCQFEGLLRPYIQHAMYDEEKGTPIFICPVSWG

SEQ ID NO: 12424 - DNA, 2417 bp, Homo sapiens
atgtttagggaggctctagggagaaatgcacagtttgacatcgttcatgaagagcctctccacggctcctgcgcctgagacagctggcctgacctccaaatcatccatccacccctgctgtcatctgttttcatagtgtgagatcaacccacaggaatatccatggcttttgtgctcattttggttctcagtttctacgagctggtgtcaggacagtggcaagtcactggaccgggcaagtttgtccaggccttggtgggggaggacgccgtgttctcctgctccctctttcctgagaccagtgcagaggctatggaagtgcggttcttcaggaatcagttccatgctgtggtccacctctacagagatggggaagactgggaatctaagcagatgccacagtatcgagggagaactgagtttgtgaaggactccattgcaggggggcgtgtctctctaaggctaaaaaacatcactccctcggacatcggcctgtatgggtgctggttcagttcccagatttacgatgaggaggccacctgggagctgcgggtggcagcactgggctcacttcctctcatttccatcgtgggatatgttgacggaggtatccagttactctgcctgtcctcaggctggttcccccagcccacagccaagtggaaaggtccacaaggacaggatttgtcttcagactccagagcaaatgcagatgggtacagcctgtatgatgtggagatctccattatagtccaggaaaatgctgggagcatattgtgttccatccaccttgctgagcagagtcatgaggtggaatccaaggtattgataggagagacgtttttccagccctcaccttggcgcctggcttctattttactcgggttactctgtggtgccctgtgtggtgttgtcatggggatgataattgttttcttcaaatccaaagggaaaatccaggcggaactggactggagaagaaagcacggacaggcagaattgagagacgcccggaaacacgcagtggaggtgactctggatccagagacggctcacccgaagctctgcgtttctgatctgaaaactgtaacccatagaaaagctccccaggaggtgcctcactctgagaagagatttacaaggaagagtgtggtggcttctcagggtttccaagcagggaaacattactgggaggtggacgtgggacaaaatgtagggtggtatgtgggagtgtgtcgggatgacgtagacagggggaagaacaatgtgactttgtctcccaacaatgggtattgggtcctcagactgacaacagaacatttgtatttcacattcaatccccattttatcagcctcccccccagcacccctcctacacgagtaggggtcttcctggactatgagggtgggaccatctccttcttcaatacaaatgaccagtcccttatttataccctgctgacatgtcagtttgaaggcttgttgagaccctatatccagcatgcgatgtatgacgaggaaaaggggactcccatattcatatgtccagtgtcctggggatgagacagagaagaccctgcttaaagggccccacaccacagacccagacacagccaagggagagtgctcccgacaggtggccccagcttcctctccggagcctgcgcacagagagtcacgccccccactctcctttagggagctgaggttcttctgccctgagccctgcagcagcggcagtcacagcttccagatgaggggggattggcctgaccctgtgggagtcagaagccatggctgccctgaagtggggacggaatagactcacattaggtttagtttgtgaaaactccatccagctaagcgatcttgaacaagtcacaacctcccaggctcctcatttgctagtcacggacagtgattcctgcctcacaggtgaagattaaagagacaacgaatgtgaatcatgcttgcaggtttgagggcacagtgtttgctaatgatgtgtttttatattatacattttcccaccataaactctgtttgcttattccacattaatttacttttctctataccaaatcacccatggaatagttattgaacacctgctttgtgaggctcaaagaataaagaggaggtaggatttttcactgattctataagcccagcattacctgataccaaaaccaggcaaagaaaacagaagaagaggaaggaaaactacaggtccatatccctcattaacacagacacaaaaattctaaataaaattttaacaaattaaactaaacaatatatttaaagatgatatataactactcagtgtggtttgtcccacaaatgcagagttggtttaatatttaaatatcaaccagtgtaattcagcacattaataaagtaaaaaagaaaaccat

SEQ ID NO: 12425 - protein, 466 aa, Homo sapiens; identical to SEQ ID NO: 1215

SEQ ID NO: 12426 - DNA, 2314 bp, Homo sapiens
atgtttagggaggctctagggagaaatgcacagtttgacatcgttcatgaagagcctctccacggctcctgcgcctgagacagctggcctgacctccaaatcatccatccacccctgctgtcatctgttttcatagtgtgagatcaacccacaggaatatccatggcttttgtgctcattttggttctcagtttctacgagctggtgtcaggacagtggcaagtcactggaccgggcaagtttgtccaggccttggtgggggaggacgccgtgttctcctgctccctctttcctgagaccagtgcagaggctatggaagtgcggttcttcaggaatcagttccatgctgtggtccacctctacagagatggggaagactgggaatctaagcagatgccacagtatcgagggagaactgagtttgtgaaggactccattgcaggggggcgtgtctctctaaggctaaaaaacatcactccctcggacatcggcctgtatgggtgctggttcagttcccagatttacgatgaggaggccacctgggagctgcgggtggcagcactgggctcacttcctctcatttccatcgtgggatatgttgacggaggtatccagttactctgcctgtcctcaggctgccctcaccttggcgcctggcttctattttactcgggttactctgtggtgccctgtgtggtgttgtcatggggatgataattgttttcttcaaatccaaagggaaaatccaggcggaactgggtatgtgtcatgtcctgagcctcccacacatggttctcccgggtccctccctgatccacagtttgagcctctggacgaccctggctgcaggctggacaggaagcaccgactggagaagaaagcacggacaggcagaattgagagacgcccggaaacacgcagtggaggtgactctggatccagagacggctcacccgaagctctgcgtttctgatctgaaaactgtaacccatagaaaagctccccaggaggtgcctcactctgagaagagatttacaaggaagagtgtggtggcttctcagggtttccaagcagggaaacattactgggaggtggacgtgggacaaaatgtagggtggtatgtgggagtgtgtcgggatgacgtagacagggggaagaacaatgtgactttgtctcccaacaatgggtattgggtcctcagactgacaacagaacatttgtatttcacattcaatccccattttatcagcctcccccccagcacccctcctacacgagtaggggtcttcctggactatgagggtgggaccatctccttcttcaatacaaatgaccagtcccttatttataccctgctgacatgtcagtttgaaggcttgttgagaccctatatccagcatgcgatgtatgacgaggaaaaggggactcccatattcatatgtccagtgtcctggggatgagacagagaagaccctgcttaaagggccccacaccacagacccagacacagccaagggagagtgctcccgacaggtggccccagcttcctctccggagcctgcgcacagagagtcacgccccccactctcctttagggagctgaggttcttctgccctgagccctgcagcagcggcagtcacagcttccagatgaggggggattggcctgaccctgtgggagtcagaagccatggctgccctgaagtggggacggaatagactcacattaggtttagtttgtgaaaactccatccagctaagcgatcttgaacaagtcacaacctcccaggctcctcatttgctagtcacggacagtgattcctgcctcacaggtgaagattaaagagacaacgaatgtgaatcatgcttgcaggtttgagggcacagtgtttgctaatgatgtgtttttatattatacattttcccaccataaactctgtttgcttattccacattaatttacttttctctataccaaatcacccatggaatagttattgaacacctgctttgtgaggctcaaagaataaagaggaggtaggatttttcactgattctataagcccagcattacctgataccaaaaccaggcaaagaaaacagaagaagaggaaggaaaactacaggtccatatccctcattaacacagacacaaaaattctaaataaaattttaacaaattaaactaaacaatatatttaaagatgatatataactactcagtgtggtttgtcccacaaatgcagagttggtttaatatttaaatatcaaccagtgtaattcagcacattaataaagtaaaaaagaaaaccat

SEQ ID NO: 12427 - protein, 251 aa, Homo sapiens; identical to SEQ ID NO: 12423

SEQ ID NO: 12428 - DNA, 1937 bp, Homo sapiens
gtgttccagacagttttatcatccacattgctgacctggaagatgcatcattgtctatgatatctgcaatggaaatgatcactaggcaatttcagccttgcaaatctaactgtggcgtgtggaaagaagaggaaccagaaaagaatgtttgtgaagttctggcttgaatctcgtgccgggagtgtgaagaaggtccttgcttccccttcaccttctgccatgattctaagtttcctgacgcctcccagccgtgcttcctgttaagcctgtgaaactcctttggaatgagtacacatccaggagtgaagaagacaagctcaactgccattctctgagcagttcaaggcatactgagttgcgggagttgtgtggtggtccactctgactgcaagcacccctttcttgaaccgaacagagtcaagtggaatcaaaggacattacctgttgattcttgggcaaggcccagaatttggtggacatacttaaagaagaaaggaatcttcagctaaagtgtctacgatcaattcagatttggagggcatggatcttctgacagtaggggccattctaggattttttggttgaagagatgaacttcaacttggttccagatgggtggtccagctattctgctgacaacatttttcagggcaaggcttttgctactggaatgatttaaggaagatccctcagtgtttcagagtaaagatatttctaaagaagtacctgtgtcattgcccatcttgaagattgacttttatggattgctcaaatactgatatcagctcaatgtcaatatatactcctacatataaaatccatcttctaatcataatcactaggttttaaccatttaaggccatgaggtgtgaggtcttttgagagtgaaagaactcatattaatccagctcctgactcctaaaaaaacagtaactcttgtaattaaaatgggcagagtccatcaagaagcagtgtccagaagcactgggccatgtggcgagcagcagtgtcaccaggaaacatgccgagctgggtcaggaactgcgcaaggaggaggagacactgctcctgttgaaggcagccctcgcatgacctgctgaatcacatcaaggttgaagcattggccctccaatcaatgattagttctgggagaggggatgaggtgctgtcttctccaacttctccaactgtgcctgaacagtcacacgtcatgtcagtgcatatagagaatgaagcatcagtcaaccaaactacgctggagtggagcatagagtcctgtgacagaagaggaggaggaagagaaagaagaatcagatccctaaaggagggaaaaagccaggattcattatacaaattaaatttctaagtctcaggctctttctccccaaggaaatcatcttgccatgagccctagggcctgcttgaatggagagcaagaactataggaggatgtgtagctgcaaaaatttctcatcaataactcaatcttcagaacgttatgacatacagaaaatcaaagatgctgtgtcttagcattgagcaatatgggtggtgctatgtctgtagtctggtcaaattcagtaactgtgttcaaaacaaaatttcctctggaatactattgagaaaatctggcatttgcaaaaagggcagagtttaaatatgagccagtctttccaatcaacaatacctcttttaagaaaaccaactaacagctgtttgcatgccgttgaatccttgtgagcagttaggccacagtctaggacagaaagatgacacggggaaggactgagggccatctgagaacaaaagttgttgctacttctcagaggcattgagacacactgcatgctgtagactgctttgtgtaactgttgtcacatcttgcttgagatgtcattggcagaatgttcttaaaaataaattatagataaatagcc

SEQ ID NO: 12429 - protein, 50 aa, Homo sapiens
MGRVHQEAVSRSTGPCGEQQCHQETCRAGSGTAQGGGDTAPVEGSPRMTC

SEQ ID NO: 12430 - DNA, 2819 bp, Homo sapiens
atcattgtctatgatatctgcaatggaaatgatcactaggcaatttcagccttgcaaatctaacatccagataccaacctcaccatcgtctgactactatgtccctggtgcacaatgcctgccttcactacagcctttcacacaaagcatttaccctgttgcttaattgtctgatcgtcccactcccttggatgagaactgcatctcttccatctcttattctgagtggcttggctaagacattcactgactccatggggaaacttcacctacagaggaaagagccatcctcctgtgggcaggtgatgtgtccttgttctttccctgacgtgcccagtcctcttgcaagtgacttgaaaggatgcaccagcctggctgcaggcagaggtgtgaagaaggtccttgcttccccttcaccttctgccatgattctaagtttcctgacgcctcccagccgtgcttcctgttaagcctgtgaaactcctttggaatgagtacacatccaggagtgaagaagacaagctcaactgccattctctgagcagttcaaggcatactgagttgcgggagttgtgtggtggtccactctgactgcaagcacccctttcttgaaccgaacagagtcaagtggaatcaaaggacattacctgttgattcttgggcaaggcccagaatttggtggacatacttaaagaagaaaggaatcttcagctaaagtgtctacgatcaattcagatttggagggcatggatcttctgacagtaggggccattctaggattttttggttgaagagatgaacttcaacttggttccagatgggtggtccagctattctgctgacaacatttttcagggcaaggcttttgctactggaatgatttaaggaagatccctcagtgtttcagagtaaagatatttctaaagaagtacctgtgtcattgcccatcttgaagattgacttttatggattgctcaaatactgatatcagctcaatgtcaatatatactcctacatataaaatccatcttctaatcataatcactaggtggatattgttatgcaaggaagagatgtgaatatacaggaaatgagatccttaaaggggttgccgtccagatgttagatcaaagagattatgattcattcaaccaagtcgctggacttttgaaggcctatccaagtcatggtgcctttgaggttgcgcctgttactattcaaaacttggtatgtgttattccatgtaaatgttatgcaatgattcaaaaatgaataccaggttgaaagatgttataacagtcccttgttccaatgaactctacctttgtgagcaaaggtgaccaaaaagaccacactgcatgaccagcagcccacaaaccagactgggctaagttctgctgctatttctagagcttgctgctgttcaaagcactccttgggtccagccagattgccatactttcttgatgtatttcccatggctgcttcatttgttgttcatttctcttagtgcttttagtaggttattgttttaggtggcgtatctgtacctcctcataaaagatttttgggtccacattttccactcaaaatcatagtagccatgatgaacacctggcatcctttggacaactttccataactacataataatgagccagtttttaccatccatattagatatggctagagtgactattttctgaatcaaaattgtgctgagcatttgccaaatatcagataaacttaaagccctagaagtatcttagaaagtccaaggggagtgtcattgttctagacttagttcaaaagatgctagacaatggcgtccaagttcagcctttgtagacatatagagtgaacattacccttgctgttataggttttattctccactgagggccacagagcctcaccattggtttgccccacacacaacagggtaaattcctactcctttgtcaattaggaattttccaggcaatgtgtttacctcttgggtaaatacattactttcatcagtgtaacttaactataaagtatttttagaggatcagattatttgagtatggctgtgataagtctctccttaaatggaccttaacaaagtagaaagaaaacgttagcagacatttcagactaatgatgttttctttttttcaagtgggttatttagagttgaatagcaattacttaaagctagtagcaaaggaacattttctgtaatgatgtttatttatgccttttcattctataacattcagcatgtgacaaaggaattagagaaaagactagtcgaatctggagccatgcaattaatgaaatccatatgtttgaagaaatcgtcttatataactcccatgcttctgatatttcctagaacgtcttagattgaggtcattgtgcactattaacagagtcctggttaataatgtacaatgaccttaattcagcatgtttttaatgaatagctgaacttcatgcttataacatcctgactatgcttacaaatatttttctaaattgctggtctgtttgcagatgcattatcagtgcatgcaaaaaataagattatgcctcgtttaggattctctttcttgtaaagtccaatcactgctgcattaagataggtatgggaatgtgtaggcaaagtcacatatagtgacacacattggataaaaaatataaacttcagccacatgattctttcactcaaaaacataatgtggctctcctttatatctttttttaatgatttgcatagctttccattgtgtgtatgtgctataatttgttttaataaacccccactaattgat

SEQ ID NO: 12431 - protein, 123 aa, Homo sapiens
MSLVHNACLHYSLSHKAFTLLLNCLIVPLPWMRTASLPSLILSGLAKTFTDSMGKLHLQRKEPSSCGQVMCPCSFPDVPSPLASDLKGCTSLAAGRGVKKVLASPSPSAMILSFLTPPSRASC

SEQ ID NO: 12432 - DNA, 939 bp, Homo sapiens
cttatggtgagagcagcggccctggtggaagcgtggtagcccctagaaggtccaggatggaacacagaagctttcccttgggatatgtgagtgctccagcagttgtaaagagagctctgaacatatgtgagtgaggagagcaattgaggcctttggaatgagtacacatccaggagtgaagaagacaagctcaactgccattctctgagcagttcaaggcatactgagttgcgggagttgtgtggtggtccactctgactgcaagcacccctttcttgaaccgaacagagtcaagtggaatcaaaggacattacctgttgattcttgggcaaggcccagaatttggtggacatacttaaagaagaaaggaatcttcagctaaagtgtctacgatcaattcagatttggagggcatggatcttctgacagtaggggccattctaggattttttggttgaagagatgaacttcaacttggttccagatgggtggtccagctattctgctgacaacatttttcagggcaaggcttttgctactggaatgatttaaggaagatccctcagtgtttcagagtaaagatatttctaaagaagtacctgtgtcattgcccatcttgaagattgacttttatggattgctcaaatactgatatcagctcaatgtcaatatatactcctacatataaaatccatcttctaatcataatcactaggtaagatgctagtgcaagttgaagttcttaaaggagatgacctgaacagccttcttagtgtaccagggagaccagattgagtttaaactatgtttaccctgcactcagacacgcctaggtgtgtctgggagattagtagatggtgttcaacaaggatctatttaaacaagggagacattaatttggattcctttggttgtaaatttccaaaaaaaaaaaaaagg

SEQ ID NO: 12433 - protein, 44 aa, Homo sapiens
MFTLHSDTPRCVWEISRWCSTRIYLNKGDINLDSFGCKFPKKKK

SEQ ID NO: 12434 - DNA, 995 bp, Homo sapiens
acatttgccaatgtagtgttccagacagttttatcatccacattgctgacctggaagatgcatcattgtctatgatatctgcaatggaaatgatcactaggcaatttcagccttgcaaatctaactgtgaagaaggtccttgcttccccttcaccttctgccatgattctaagtttcctgacgcctcccagccgtgcttcctgttaagcctgtgaaactcctttggaatgagtacacatccaggagtgaagaagacaagctcaactgccattctctgagcagttcaaggcatactgagttgcgggagttgtgtggtggtccactctgactgcaagcacccctttcttgaaccgaacagagtcaagtggaatcaaaggacattacctgttgattcttgggcaaggcccagaatttggtggacatacttaaagaagaaaggaatcttcagctaaagtgtctacgatcaattcagatttggagggcatggatcttctgacagtaggggccattctaggattttttggttgaagagatgaacttcaacttggttccagatgggtggtccagctattctgctgacaacatttttcagggcaaggcttttgctactggaatgatttaaggaagatccctcagtgtttcagagtaaagatatttctaaagaagtacctgtgtcattgcccatcttgaagattgacttttatggattgctcaaatactgatatcagctcaatgtcaatatatactcctacatataaaatccatcttctaatcataatcactaggtaagatgctagtgcaagttgaagttcttaaaggagatgacctgaacagccttcttagtgtaccagggagaccagattgagtttaaactatgtttaccctgcactcagacacgcctaggtgtgtctgggagattagtagatggtgttcaacaaggatctatttaaacaagggagacattaatttggattcctttggttgtaaatttccaa

SEQ ID NO: 12435 - protein, 47 aa, Homo sapiens
MISAMEMITRQFQPCKSNCEEGPCFPFTFCHDSKFPDASQPCFLLSL

SEQ ID NO: 12436 - DNA, 476 bp, Homo sapiens
tccagagaccacatctgcagctcccaaaacaaggtctgttctgcagctggacaattcactgctaaaatcccaaacctaagagcagagccaaagccagaggagaggaaagtgacaatagggccaaagcctcattccagattccaaatgtcattctgtagccctcgtgctatcaactgctgcctgctggctgcagccaggtccctgggtccatacacagcctgcatcaagagcctgcagagactcgggggctggagatgggaaacagatggtggcctgcgctttgtctttcccaagtttacagcctcacctgggggtggaggctgttctgaggggcccccaagaggcccccaccatgaagggtttcacagccactctcttcctctggactctgatttttcccagctgcagtggaggcggcggtgggaaagcctggcccacacacgtggtctgtagcgacagcggcttggaagtgctct

SEQ ID NO: 12437 - protein, 102 aa, Homo sapiens
MSFCSPRAINCCLLAAARSLGPYTACIKSLQRLGGWRWETDGGLRFVFPKFTASPGGGGCSEGPPRGPHHEGFHSHSLPLDSDFSQLQWRRRWESLAHTRGL

SEQ ID NO: 12438 - DNA, 915 bp, Homo sapiens
ggaagaaattttacaggctttttattggccggttatttttctgtgtgtcccatacaggcccccaccatgaagggtttcacagccactctcttcctctggactctgatttttcccagctgcagtggaggcggcggtgggaaagcctggcccacacacgtggtctgtagcgacagcggcttggaagtgctctaccagagttgcgatccattacaagattttggcttttctgttgaaaagtgttccaagcaattaaaatcaaatatcaacattagatttggaattattctgagagaggacatcaaagagctttttcttgacctagctctcatgtctcaaggctcatctgttttgaatttctcctatcccatctgtgaggcggctctgcccaagttttctttctgtggaagaaggaaaggagagcagatttactatgctgggcctgtcaataatcctgaatttactattcctcagggagaataccaggttttgctggaactgtacactgaaaaacggtccaccgtggcctgtgccaatgctactatcatgtgctcctgactgtggcctgtagcaaaaatcacagccagctgcatctcgtgggacctccaagctcctctgactgaacctactgtgggaggagaagcagctgatgacagagagaggctctacaaagaagcgcccccaaagagtgcagctgctaattttagtcccaggaccagacatccccagactccacagatgtaatgaagtccccgaatgtatctgtttctaaggagcctcttggcagtccttaagcagtcttgagggtccatcctttttctctaattggtcgcctcccaccagactcacctgcttttcaactttttaggagtgcttcctcacagttaccaagaataaagaaagctggccaccattgtt

SEQ ID NO: 12439 - protein, 162 aa, Homo sapiens; identical to SEQ ID NO: 1219

SEQ ID NO: 12440 - DNA, 355 bp, Homo sapiens
atacaggcccccaccatgaagggtttcacagccactctcttcctctggactctgatttttcccagctgcagtggaggcggcggtgggaaagcctggcccacacacgtggtctgtagcgacagcggcttggaagtgctctaccagagttgcggggtgattctaggaccgttaagatctggccgtgtctgagcaaacaccagccacctccgacctccagcctttcaaagaaacaagctggactgtttgcatttatatgattcaaaatgaaggtcacaaaagcacaactgacttgattttatgaagagcttttgttgacaaacgtgaagttcccagaatacacagtctttgggacttg

SEQ ID NO: 12441 - protein, 57 aa, Homo sapiens
MKGFTATLFLWTLIFPSCSGGGGGKAWPTHVVCSDSGLEVLYQSCGVILGPLRSGRV

SEQ ID NO: 12442 - DNA, 775 bp, Homo sapiens
ctcttcctctggactctgatttttcccagctgcagtggaggcggcggtgggaaagcctggcccacacacgtggtctgtagcgacagcggcttggaagtgctctaccagagttgcgatccattacaagattttggcttttctgttgaaaagtgttccaagcaattaaaatcaaatatcaacattagatttggaattattctgagagaggacatcaaagagctttttcttgacctagctctcatgtctcaaggctcatctgttttgaatttctcctatcccatctgtgaggcggctctgcccaagttttctttctgtggaagaaggaaaggagggagaataccaggttttgctggaactgtacactgaaaaacggtccaccgtggcctgtgccaatgctactatcatgtgctcctgactgtggcctgtagcaaaaatcacagccagctgcatctcgtgggacctccaagctcctctgactgaacctactgtgggaggagaagcagctgatgacagagagaggctctacaaagaagcgcccccaaagagtgcagctgctaattttagtcccaggaccagacatccccagactccacagatgtaatgaagtccccgaatgtatctgtttctaaggagcctcttggcagtccttaagcagtcttgagggtccatcctttttctctaattggtcgcctcccaccagactcacctgcttttcaactttttaggagtgcttcctcacagttaccaagaataaagaaagctggccaccattgtt

SEQ ID NO: 12443 - protein, 41 aa, Homo sapiens
MSQGSSVLNFSYPICEAALPKFSFCGRRKGGRIPGFAGTVH

SEQ ID NO: 12444 - DNA, 882 bp, Homo sapiens
gaacgtcatcctatgaattcgccaagaaaattaagacactccagtaaaagtacagccatgaaagaagacagacttctagatccatgcccaactagatctgtttgataaatagaacacaagctggcagaattggccatcagccaacctaaaagaagaaatcaaaagcaagatccattacaagattttggcttttctgttgaaaagtgttccaagcaattaaaatcaaatatcaacattagatttggaattattctgagagaggacatcaaagagctttttcttgacctagctctcatgtctcaaggctcatctgttttgaatttctcctatcccatctgtgaggcggctctgcccaagttttctttctgtggaagaaggaaaggagagcagatttactatgctgggcctgtcaataatcctgaatttactattcctcagggagaataccaggttttgctggaactgtacactgaaaaacggtccaccgtggcctgtgccaatgctactatcatgtgctcctgactgtggcctgtagcaaaaatcacagccagctgcatctcgtgggacctccaagctcctctgactgaacctactgtgggaggagaagcagctgatgacagagagaggctctacaaagaagcgcccccaaagagtgcagctgctaattttagtcccaggaccagacatccccagactccacagatgtaatgaagtccccgaatgtatctgtttctaaggagcctcttggcagtccttaagcagtcttgagggtccatcctttttctctaattggtcgcctcccaccagactcacctgcttttcaactttttaggagtgcttcctcacagttaccaagaataaagaaagctggccaccattgtt

SEQ ID NO: 12445 - protein, 75 aa, Homo sapiens
MSQGSSVLNFSYPICEAALPKFSFCGRRKGEQIYYAGPVNNPEFTIPQGEYQVLLELYTEKRSTVACANATIMCS

SEQ ID NO: 12446 - DNA, 677 bp, Homo sapiens
cttagctatgagctcacatttgccaatgtagtgttccagacagttttatcatccacattgctgacctggaagatgcatcattgtctatgatatctgcaatggaaatgatcactaggcaatttcagccttgcaaatctaactatgaacagtgacggacaggctgagagcggagagactttcccttggacccttgcctcagtaacttttaatacatgtaagacggatcatctgactttggactttctgaagcaataacatcggaaagttaatcagagttggcgttctgggaattcaagggcagagataagtgtttcctccagatacttcactgtatttcagcaaatgacctgaggaaagaagtcaaaacttcatcacgaaatagaagactgttcattttcaatatttcttccttggcctctatgtggcactcccttgctgtctgtcctgttgacttctatggcttccacccaagggaggacagcattatagtgggtgaatccagcacaccccaaactgcccctgctcccctctcccccgggcatgtgggccctcgaaggcaggcttctccaaaccagcagcatgtgaaccctgccagaagtgaggaagagctctaggagagcagccagcagcatctgttttgcatacaaagggcagcaacaatcaaatctcttctagaa

SEQ ID NO: 12447 - protein, 64 aa, Homo sapiens
MWHSLAVCPVDFYGFHPREDSIIVGESSTPQTAPAPLSPGHVGPRRQASPNQQHVNPARSEEEL

SEQ ID NO: 12448 - DNA, 568 bp, Homo sapiens
agccctgtcttctccacctagggagagagaccccatgagctcgtcaagctccttctgtgactgatcagagatcccaccgtgagtccagctcctggtcccatgctctggatatatcggtccctggcagcgtggtatctcacagaatctctgaccaatggagagctaatcaaagacaagtttaataggtgaagaaaatacttggattgggaggatggctgaaaagtcccattgaacaaggccctcaaatggagttcctgtggagtggtcacctttttgatgacttcaactgggaacatcagtacggaaccatcgctgggtgttcattccatcaccccttcctatgtccctgctcaggacaccctgcgtctgtctatatgcattgctaccagtttagacagtgagttacatttagtccatttgtgcattgttctttattgtatccatggtatctagcacaattcttgttcttattagagcttggtaaatgtcattgattaatccagggcagattatctctctcattttcgtgaatcctctgcataaacaatttgattaaaaatttatgaca

SEQ ID NO: 12449 - protein, 58 aa, Homo sapiens
MTSTGNISTEPSLGVHSITPSYVPAQDTLRLSICIATSLDSELHLVHLCIVLYCIHGI

SEQ ID NO: 12450 - DNA, 3339 bp, Homo sapiens
aactgctgtgttctcatcagcagaagtggcccctgcccacccccatcctaatcccttctcatgtgggagaaggtctgtgagccctctccctaccaggcaggttctatggcaatgtgggcacataccctggggcaggggccgagggacttaactcacttcatgagcgccaatggaggagcgaagggaatgcctgatgaaaacaacattctaccagtatgcactgttttctaacctacagagtgcctctgtgttcactgtcccatttgagaattctaagtagaattctgaacaggctggagcagattgcccaccccaagggacagatgttggctggtactgttggtattcatggaagattccttctgacactccctccttctttgtaattgccatgaactggagcactgggccaatataaatcatccaagggtgaacacgctgcacatggacggctcctctttgtttttgaagggattccatctctattttgccatgtgctccttcaccccactccccacccccgtctttcatttctttctctggaaaagatacttcaactcacaggactgcgatgttgaaacggacacccaagagcatcacagatgggccaggcctggacctctcgggacaacattcctcacgacttttagatagaagagattagagatttgggactggtggcaactggtaacgttttcagtgtttggtaaacagccagggtccggagctctgggaacagcctgatttagctctttgtttaagttttgtgttagaggctcccaagaagctgatgcaggggaaagaaattaacaaccatggctcattcacagccaggcagccaaatggacagctctataagactcaagccgacagcggagagagtgcaaccaaacagccttggcccagctttcagaggagaacgttattcaccccaactgctctgcatctgcctggatgtctgccaagatctcagtcttctttccaccaatgacccctcgcgctgcttccagaagccaagaaagtgggctttgtccttggggatttaggaggcggagcggcgcccccttgaggccacatggtggaggcagcgatgagacctggagtctaaaattcagactgaatcacaggaagaagctatttacacaagtcaaacatggtccaatcttggcaatttcataaggttccaatccttaagggatcaaaacctggccaactgcttccaccgagaggtgtgcctttcaatgccaggcttggagtgtccctctttatttaaaaaggagaggattccacagcagagcttctcaaactcttccacccaaatcccctcaccacagagggacaggagtcctgggcatgtagcctaaagcagccaggagaaaaaaaccttgaccttaatttttttaatgatttcacatgaatcagtggaatgtgtttatgataaaatcatctcctcctgaaatacatgtgtaaaactgctgccccagttaaacgcacttagtctaaccaagccctaggattggcctctccagcatgagaagcatttccagcactccagctccccagctcccactctgggatcccacctcagaccctcccacttccttgcactctggcctctcgctcttgaccctgctcccgccacgctctttcctcagagtccatcagtcctgtcttgtcttcaccttggtctctgccaagtgtgggtccaagtcatatatttgggctgtgatcacaggaaccccaagccccagacctcccaaagcaccctatggagagaccttaccctcctggacagaccctctccccccagctagacctcatcctctgggtagacccatctccccaaccagaactcaccctcctgagtaaaccccatccccctagctagacttcatcctcctggacagatcccatccccccagctagacctcaccctcttgggtagatgcatctccccaaccagaactctcctgggtagaccccttctacccagctagacctgatcctctggacagaccccatcatcccagctagacttctccctcctggactgtccccatcccccctccagccagacctcacccctctgggtagaccccatccccccaactagacctcaccctcctggatggactctaccctcctggagataccttcccctcctgggtacatcccacgtggctacacactccttcccctgtcagctttctcccccagggttctgggcagcagagtctgtgataaaggatactaagtgattccccaatacttcccgtttccagcctccagtgggctctccctggggctaacggttctttttgctatttctccaggctttgcctgatgacaagtatactctgagagtgtcctaatgatacagattttggaccctatcccagttctactgaatccaagtctctgggggaggagttggggctctgcatctggacaccttcctgcagggtccctcctgggaggcaagcccggggagcaccgctgaggctcgcctcagtgcccatcctagaccttcagcagctagcagaggatgtccccaccatccctcagcccacactcccactgtcgccccagccaggcttggcactgcctcctttctcagaagattaagaccatctgctgtttcccaagtttcccaccctccaccctaaaaatttctccgtttcccagtctttcctcgtctctcagaaaataaacatcttcccaggctgcctccccagtgggtctgcactccttgctgtcttcccagcacctgcccttccagcccgccctctgtgtgtccagtgtttccctcaccaaaggactcgctttgtttttcaaattggaggttttgtcttctccctaaaaaccaaaacatctccctgagaagtaactccctcaagctactgatacggaaggggggcggggaagtgctgggaagggaagggtgtggtccctggctagggctccacccccgggcctgtgcccacagacctaggtgaggacaggcatttctgttttcgtgcttaaatgttggatttcccaagactaccctggcctaccacaccctcattctgtgcctgtaaaaaaacctgagagcttagcaggcacgcacacaagcctctggacgtcaagaggaacacaccggtgtaagagcagactgatagtggcccacggcaggctggcaggccatcgacaggcagaaccactcagtgcagctggaggacagcctggccacggagcggtccgacttcagaggggaaaaccacctccccactccgtctcccttctggctcccccatctgagagctacttccactcaataaaaccttgcactcattctcc

SEQ ID NO: 12451 - protein, 76 aa, Homo sapiens
MAHSQPGSQMDSSIRLKPTAERVQPNSLGPAFRGERYSPQLLCICLDVCQDLSLLSTNDPSRCFQKPRKWALSLGI

SEQ ID NO: 12452 - DNA, 622 bp, Homo sapiens
agtttgaagtagattggagacattttctcatgtttcagcctccttggaccaagcaaaataagctgacctttgaagagaacagatcttgagggggatctgtagatggacacagggagattccaggtgcctcagagggatcaacttgcagttccaagttgtcctcagggaaatcttgccattttttgggataatgaactgaattctcatcacagtggaatacgtatcatcggaagggatttttaaagggcagggtgagaagtggattgagaatttcgcatagcaccaaggttaaacagaagccaactacgaaacaaagccagaagggcactcaagcaaataatcaaaatcaaatccttaccacgctgccagggaccgatatatccagagcatgggaccaggagctggactcacggtgggatctctgatcagtcacagaaggagcttgacgagctcatggggtctctctccctaggtggagaagacagggctccaaatggacttccagtcccatccacgtcacagaggcaaattgtcagagacaaagaccttcatcacctctttaaagacctcttcaaatacgttcacactctgagttactgggggtttggactccaacatctga

SEQ ID NO: 12453 - protein, 55 aa, Homo sapiens
MGSLSLGGEDRAPNGLPVPSTSQRQIVRDKDLHHLFKDLFKYVHTLSYWGFGLQH

SEQ ID NO: 12454 - DNA, 972 bp, Homo sapiens
agtttgaagtagattggagacattttctcatgtttcagcctccttggaccaagcaaaataagctgacctttgaagagaacagatcttgagggggatctgtagatggacacagggagattccaggtgcctcagagggatcaacttgcagttccaagttgtcctcagggaaatcttgccattttttgggataatgaactgaattctcatcacagtggaatacgtatcatcggaagggatttttaaagggcagggtgagaagtggattgagaatttcgcatagcaccaaggttaaacagaagccaactacgaaacaaagccagaagggcactcaagcaaataatcaaaatcaaatccttaccacgctgccagggaccgatatatccagagcatgggaccaggagctggactcacggtgggatctctgatcagtcacagaaggagcttgacgagctcatggggtctctctccctaggtggagaagacagggctccaaatggacttccagtcccatccacgtcacagaggcaaattgtcagagacaaagacctaagccggaaacaaggcagtcacccatgactgttacggaaatcacaagaacgagtatacggcatttatgaatggacctactggtgtgctagtagggctgccataacaaagtactgcacagatggggcttaaccagagatgcatcgtctcaccatgctggaggctggaagtcccaggtcaacacatggacagggctggtttctcctctggcctctcccctcagccatcttctccctgtgtccccacatggtctttcctccatgtgtctgtgtcctcatctcctctacttatgaggacacctgtcaggttggattagggcccaccctagtgacttcattttaccttcatcacctctttaaagacctcttcaaatacgttcacactctgagttactgggggtttggactccaacatctgaattttaag

SEQ ID NO: 12455 - protein, 40 aa, Homo sapiens
MGSLSLGGEDRAPNGLPVPSTSQRQIVRDKDLSRKQGSHP

SEQ ID NO: 12456 - DNA, 807 bp, Homo sapiens
agtttgaagtagattggagacattttctcatgtttcagcctccttggaccaagcaaaataagctgacctttgaagagaacagatcttgagggggatctgtagatggacacagggagattccaggtgcctcagagggatcaacttgcagttccaagttgtcctcagggaaatcttgccattttttgggataatgaactgaattctcatcacagtggaatacgtatcatcggaagggatttttaaagggcagggtgagaagtggattgagaatttcgcatagcaccaaggttaaacagaagccaactacgaaacaaagccagaagggcactcaagcaaataatcaaaatcaaatccttaccacgctgccagggaccgatatatccagagcatgggaccaggagctggactcacggtgggatctctgatcagtcacagaaggagcttgacgagctcatggggtctctctccctaggtggagaagacagggctccaaatggacttccagtcccatccacgtcacagaggcaaattgtcagagacaaagacctaagccggagtaaatgaccatcgtgcgcccatgggaagagtgctgcatccacggaggacatgggccaacagtgctctcaaatgggtttcatgaaagcatctgtgactcatccctgttcaagaatgttttcattacgattcagcagaagcgatgtgccaggtcagcaaatacaactgcaaaaccggggcctgccagcctggccaacacagcaagaccccgtctctactaaaaagtaaaattaaaattagctgagtatggtg

SEQ ID NO: 12457 - protein, 36 aa, Homo sapiens
MGSLSLGGEDRAPNGLPVPSTSQRQIVRDKDLSRSK

SEQ ID NO: 12458 - DNA, 1802 bp, Homo sapiens
aaagcgagaataatgagctgtgtaaacaagccccattcccagtactggggcgttgctagccctccttagagagggcgagggagaggaggatgctgtgcctggaaagcggctcttgaggagagctggaatctcggcaaagcgtccactccctcccctcccctttcctctcacctctagtgttcccaccagccccggggaggagacaaaggacgtgggagggcagcagcatgcagggggcctgcctttgacgcccaggagttgaacaccagacagaaaatgaaatctaaacatttacccagagccctgggctagaaatgggccaacctgaccctggaaaacaaacaacccgcgtcaccgccacacctgctgcaggccccagatgccacagagcccttggacaggaggcgttgcaggtgccgggcattggagggacctcacgctccgcgtttccttccctagcagagctcaaacgacctgctgccgcatcgggcattgttctctccctcctcacccagaggaaagtccccatggcccattttctgagctgtgcttttccactctttcgtaatctattattgtgaccttgagatgcagagagagaaggctttggcaggacgcactgcctttggaaccagagctgctgctatctgtgccctggaccacatgctccatggccatggccgtgccagtcctactggttcctctgcaaccgccacccaagtcagcgcctgcaggagcgtggacactgagaggactgggacagcgaggaaagtctatgttccctttatgagctgtaacgcacaccatgaaggtctgcggcttggctattgagtcagtgagagcgtgaacctactattagaagaaaaactctgaatacgtctgaacgtcagaaagaacgaagtttggacacattgtctttaagaactgtaacactcaccccaagggtttatggattcattcttgaaatcagtgaaaccaaaagctttccaaagtttaacacacagggaaatgacttactgcaaagaaccactcttccccacgagacttcgagaagacccgctgtcacggactgagttgtgtcctcttaaaattcagatgttggagtccaaacccccagtaactcagagtgtgaacgtatttgaagaggtctttaaagaggtgatgaaggtaaaatgaagtcactagggtgggccctaatccaacctgacaggtgtcctcataagtagaggagatgaggacacagacacatggaggaaagaccatgtggggacacagggagaagatggctgaggggagaggccagaggagaaaccagccctgtccatgtgttgacctgggacttccagcctccagcatggtgagacgatgcatctctggttaagccccatctgtgcagtactttgttatggcagccctactagcacaccagtaggtccattcataaatgccgtatactcgttcttgtgatttccgtaacagtcatgggtgactgccttgtttcctgtgataaggacacagagaccctccaaattaccattctttgtttcttaaatgattagctgaactatttgtccctccaaacaagctagaaacagctagatactccttgtccagctgattgacagatgcctcctgatgacataaacatgccaactgtaaaatcacccccacctggaactggttcactcctccctataaaagtctagacaaaaccaactgccaggacactcaggttttgggatctgggtgctctcccgactataatataataacctgaataaagtcagtttgcttaccggctt

SEQ ID NO: 12459 - protein, 88 aa, Homo sapiens
MGQPDPGKQTTRVTATPAAGPRCHRALGQEALQVPGIGGTSRSAFPSLAELKRPAAASGIVLSLLTQRKVPMAHFLSCAFPLFRNLLL

SEQ ID NO: 12460 - DNA, 1333 bp, Homo sapiens
gggagacaccgctcttggggaagttgggctgcagcccccgcacgtgctaggaagataagtgaaggtcccaacacatcctgtccccttagagcccctggggcccagcagccgggcccagcagcccgacccagcgcctagagcccattcgcagacagcgcgctgaggcggcttgggcgccatgccctttgggttactcagctcttcagcctcctggaacgctaggacaaaggagtgccttggtgctggcagaagccggggggcacagctgggttttacaaggaaggacgaaatctcatctcagcaatcgggatagatcaaccgttgcccgtctgaggtgacccaattcagggaccagccgcttggctctgaacacacacgtgtcacaaccccagctcgtacccaggccttgctagagctccaggtttatgagccgtaactcagcagaagcctagcatgagaacaactcatctgaagctccaacatttggggaatgcaacctttcgacagacatttgctgaatggataggagactcctgaaagcagaattctgcacattctgtggaccagccctgactacggagagcaggtgttagccagtatccatgcgcagtgcctcttagtcttacctgtctgctgccttacgcaagcatggagcttaatatgctagctgtgttctcctaacctcagatatctgtaaaaccagccacagtaagataacatggtagagcacaaaatgcttagaagagatttatttgaagcaatgcttcccagaagtttttcaatgcagcttatggcgagaaacacattttacatctctactcagtacgcagccactcatactcaactgaaacatcttctgaaacaatatttcacttcactctctgcaatacagaaaataccagatcgtattgtatgttatttcattgttttaaaatcctgagcctagcttgctaatagattacaactcagtttgaaaagcacaggctaaggggcttcaaataggggtgacacattgaacacacacatttatcacctctcccttcacagatctcattaaaatgataataaaggaacaaaatggcagaaatccacaaggacaaacagcaaacaagagggacatcagcagataggcaacctcaacaagtatatcacaatgagtgacacaccccctataacagccaattttgatggtcctcccatagctcttgccttattctttgtaataggattcagattgtttaaaatccccatattctaccgcaaagtcatgttatcaggaaagaccaaccctaaccccagttccatggagtaaagattaattaatctaaactct

SEQ ID NO: 12461 - protein, 73 aa, Homo sapiens [sequence omitted]

SEQ ID NO: 12462 - DNA, 506 bp, Homo sapiens
gttgctagccctccttagagagggcgagggagaggaggatgctgtgcctggaaagcggctcttgaggagagctggaatctcggcaaagcgtccactccctcccctcccctttcctctcacctctagtgttcccaccagccccggggaggagacaaaggacgtgggagggcagcagcatgcagggggcctgcctttgacgcccaggagttgaacaccagacagaaaatgaaatctaaacatttacccagagccctgggctagaaatgggccaacctgaccctggaaaacaaacaacccgcgtcaccgccacacctgctgcaggccccagatgccacagatgaggttttgctctgttgcccaggctggtctcaaactcctgcacaagcaatctgcctgccctggccttccaaaagtcctaagatttcaggtgtgactcaccgcgcccagcctcaggttgccttaaagaaaagtttctgtatattaaatataaactatatgatgcacaa

SEQ ID NO: 12463 - protein, 34 aa, Homo sapiens
MPQMRFCSVAQAGLKLLHKQSACPGLPKVLRFQV

SEQ ID NO: 12464 - DNA, 8192 bp, Homo sapiens
cgggatggcaactgcggtcaccctgctaaagtcggggcgggggcggcggtcctccccctcaccccccccagtccgagcgccgccgccgccgccgccgccgccgccgcggccgctcagtaacacgtccccaggagactcgcaggagcaacacgtgatgtgtctacttatcagggttgctccgactgtgtgttccaggagtggtggctctgaggtgtgaccctgcccacgtttgggcccagccaggttcagccccccaataaggagggcagcttgataacacaaagaaaacagtgtcaacgagtactaccaagagaagaagacaagaggtcaacacagactcattttctactccgtgtgaatgatagctacagcaggggaaagtttcatagtctatcagtgggtcagaaaatggagttttatagcagaggcttcttagaagcttaaacccctgtcccaatgacgtcaagttcgcccgctggcttggaaggttcagacctatcttccatcaacaccatgatgtcggcggtcatgagtgtagggaaggtcacagagaatggcgggagcccccaggggatcaagtccccctcgaagcctccaggaccaaatcggattggcagaaggaaccaggaaacgaaagaggagaagtcttcctataactgccccctgtgtgagaagatttgcactacccagcaccagctgaccatgcacattcgccagcacaacacagacactggaggagccgaccactcatgcagcatctgcggaaagtcactgagctcggccagctccctcgatcgccacatgctggtgcactctggcgagaggccttacaagtgcactgtgtgtggccagtcatttaccaccaatgggaacatgcacagacatatgaagatccatgagaaggaccctaacagtgccacagccacagcccctccatctcctctgaaacgtaggcgattgtcctccaagaggaaactgagtcacgatgccgagtcagagagagaagacccagcaccagctaaaaagatggtagaagacgggcagtcaggtgacttggagaagaaagctgatgaagtctttcactgcccagtatgtttcaaggagtttgtttgcaagtatggactggagacccacatggagacccattcagataacccactaagatgtgacatttgttgtgtcacctttcgaacacatcgaggactgctgcgtcacaacgcgcttgtccacaaacaacttcccagggatgcaatgggcagacctttcatacagaacaacccttcaattcctgctggcttccacgacttaggattcacggacttctcctgtaggaagtttcctcgcatttctcaggcctggtgcgaaacaaacctgcggaggtgcatcagcgagcaacaccgttttgtctgcgacacctgtgacaaggcgttccccatgctctgctcactggctctgcacaagcagacccatgtggcggcagaccagggtcaagaaaagccgcaggccacgcccctgcctggtgacgccctggaccagaagggcttcctggccttgcttggcctgcagcacaccaaagacgtcaggcctgcccccgccgaggagcccctgccggatgacaaccaggcaattcagctccagacactcaagtgtcagctacctcaggaccccggctgcaccaacctgctgagcctgtcacctttcgaagctgcttccctaggcggttctctcacagttctccccgcgaccaaggacagcataaagcacctgtccctgcagcccttccagaagggcttcatcatccagcctgacagcagcattgtggtcaagcccatctctggcgagtcggccatcgagctggcagacatccagcaaattctgaagatggcagcctcggctccccctcagatcagtcttccgcccttctccaaggcccctgccgccccactgcaggcgatcttcaagcacatgccccctctgaagccaaagcccctggtcacaccacggacggtggtggccacctccacgcccccgcctctcatcaacgcccagcaggcttccccgggctgtatcagccccagcctgccgccaccgcccctgaagctcctcaaaggctcagtggaggcggcctccaacgcccacctgctgcagtccaagtccgggacccagccccacgcggccacgcggctctccctgcagcagccgcgggcggagctgccgggccagcctgagatgaagacgcagctggagcaggacagcatcatcgaggccctgctgccgctgagcatggaggccaagatcaagcaggagatcacagagggggaactcaaggccttcatgacagcgcccggcggcaagaagacgcccgccatgcgcaaggtgctctacccctgccgcttctgcaaccaggtgtttgccttctcgggggtcttgcgtgcccacgtgcgctcccacctgggcatctcgccataccagtgcaacatctgcgactacatcgccgccgacaaggccgcgctcatccgccacctgcgcacgcacagtggggagcggccctacatttgcaagatctgccactaccccttcactgtcaaagccaactgcgagcggcacctgcgcaagaagcacctcaaggccacccgcaaggatatcgagaagaacatcgagtatgtgagtagcagcgcggccgagctggtggacgccttctgcgccccggacaccgtgtgccggctgtgcggcgaggacctcaagcactatcgtgccctgcgcatccacatgcgcacgcactgcggccgcggcctgggcgggggccacaagggccgcaagcccttcgagtgcaaggagtgcagcgccgcgttcgcggccaagcgcaactgcatccaccacatcctcaagcagcacctgcacgtgcccgagcaggacatcgagagctacgtgctggccgccgacggcctgggccccgcagaggcgccggccgctgaggcgtcggggcgcggggaggacagtggctgcgctgcccttggtgactgcaagcccctcactgccttcctggaaccccagaacggctttcttcacaggggccccacccagcctccacctccccatgtctcgatcaagttggagcccgccagtagctttgcggtggacttcaatgagcccctggacttctcgcagaagggcctggccctggtccaagtgaagcaggaaaacatctcctttctgagcccttcttccctggtcccctatgactgctccatggagcccatcgacctgtccatccccaagaacttcaggaaaggggacaaggatttggccactcccagcgaagccaagaagcctgaggaggaggcggggagcagcgagcagccctctccctgcccagcacccggcccttctcttcctgtaactttggggcccagcggaatcctggaaagccccatggcccctgctccggcggccaccccggaacccccagcacagcccctgcagggccctgttcagctggcggtcccaatctactcctcagccctggtcagcagccctccactcgtgggcagctcagccctcctgagtggcacagccttgctgcgtccactgcggcccaagcccccgctgcttttgccaaagccccccgtgacagaagagctgcccccgctggcctccattgcccagatcatctcatctgtatcctcggcccccaccctgctgaaaaccaaggtggcggacccagggcccgcaagcactggcagtaacaccacggcttcagacagcttaggaggttctgtccccaaagccgccaccaccgccacccccgctgccaccaccagcccaaaagagtctagtgagcctcccgctccagccagcagcccagaggctgcctctcccaccgagcagggcccagcgggcacgtcgaagaagaggggccggaaaagggggatgaggagccgaccccgcgccaacagcggcggggtggacctggactccagcggggagtttgccagcatcgagaagatgctggccaccacagacaccaacaagttcagtccgtttctgcagacagcggaggacaacactcaggatgaggtggccggagcccctgccgaccaccatgggcccagtgatgaagagcagggcagtcccccagaagacaagctgctgagggccaagcggaactcgtacaccaactgcctgcagaagatcacctgtccccactgtccccgggttttcccttgggccagctccctacagaggcacatgctcacacacactgacagtcagtcggatgcggagactgcagccgccgcgggcgaagtgctagacctcacctcacgggacagagagcagccgtcggagggcgccactgagctccgccaggtcgcaggggatgcgcctgtggagcaggccacggcggaaacggcctcgccggtgcaccgggaagagcacgggcgtggggagagccatgagccggaggaggagcatggcactgaggagagcactggggacgccgacggcgcggaagaggacgcgtcgagcaaccagagcctggacctggacttcgccaccaagctcatggacttcaagctggcggagggcgacggcgaggcaggcgccgggggcgcggcctcgcaggagcagaagctcgcctgcgacacctgtgggaagagcttcaagttcctgggcaccctgagccgccaccggaaggcgcacggccgccaggagcccaaggacgagaagggagatggcgccagcactgcagaggaggggccccagcccgcccctgaacaggaggagaagccccccgagaccccggcagaggtggtggagtcggccccgggtgccggggaggccccggcggaaaagctcgcggaggagacggagggcccctccgacggggagagcgcggccgagaaaaggtcctcagagaagagcgacgatgacaagaaaccaaagacagactcccccaaaagcgtggccagcaaggcagacaagaggaagaaggtctgcagcgtgtgcaacaagcggttctggtcgctgcaggacctgacccggcacatgcgctcccacacaggggaaaggccatacaaatgtcagacctgcgagcgaaccttcaccttgaagcacagcctggttcgccaccagcggatccaccagaaagccaggcatgccaaacaccacgggaaggacagcgacaaggaagagcggggtgaggaggacagcgagaatgagtccacccacagcggcaacaacgccgtctcagagaacgaggctgagctggctcccaatgccagcaaccacatggctgtcacccggagccggaaggagggcttggccagtgccaccaaggactgcagccacagggaggagaaggtcacggcagggtggccgtctgagcctggccagggtgaccttaacccagagagcccggcggccctggggcaggacctgctggagccgcgcagcaagaggcctgcccacccaatcctggccacagctgatggcgcctcccagctcgtggggatggagtgacagcctcagtccccctcagcacagacaaaagccagcagagcaaagcgtctatacttcatggggtttcctcagtgccctttggctgttgaggagtgagagagagagagagagagagagagagagagagagagagagacaagcaggagcgtggctgctcgctcagtgccatagccttaccgcagcctgcgcgggaggccacagcccgtgccgattccagtgccttaactacttaccggatccctccatattatcatgggtgttgtatttttccaaaatgacttcttaaacaaaacaaatattataatgaattgtctggagaggacctcttcatttgagcattagcgttattttgtattggtgtgtgtgagcttgttcttgtgaatctgtgatagcaccgtttgttctgtgagctggaaacagaaggaaaaaacatacccttgggtacccatagccaataactggaagaaaatgatgtgaatttcatgtaaatgaccagaggaaagatggataagatgataatttcttaaatagacattttccttttttctttgtgcttcatggtggagctgtcatctggtccttggtattacaggatgtggttgatgaaggtttccaatatggtttcaggccaaaaccagggaagattctagcttcagcctcatgtccatttccagtctgtcagcattagacatggtcactgttcaagtttcaagacatccattcttaactatagagaagagttactcccctggcgtcttaacctatggaaaacatgcacggataggatatatttgattgcctcctcttccctttcagtatatgtattattaatattattattattattattattattagttcatcagtttgctgttctctgcagtgagcagaatcaaatgggcaatatttgtcctgggagacctgtgccgcacccaggtccccgtgttaacgtgtgcctgcggttgtggttggcaccctcgggtggtagctcttctactgtaatgagacaagcctttcttctgtcactgcagaatttagaaggggccgtgagcagtcttcccaagcatggtccaggagcagctcagagagggtggagtgaggatgcatgcatccagggaacaggcatcaagaagccagggccgtgcctggagcactgcagagatgactttggagaaagcaaagcagtgacccagtgaccaggcacattactcgtgagcgaggtattcccagtcttcctgctaagcctaatccaagccttacccagctgtgctactgtcatttgcaaagcaaggaaatactactactggtaataaaactacacatgcaagatgtcagataagaaataggtttatatttaccttcctgcgatgtggggttggtgcttgaagataaatgtgctgtttctagtttcttaaatagcccacacccctggatgcaaaaaggcagggttatttttacccatgagcatcctgtgcaggcaatagacttccctcactgtctccgcctgcagggaggagaatgtaccccactgcacctgagctcctggtccctcagccaagacctcaggggtccccagccagcctgctgctggggacccctgtgcttgctgcagtgtatggagcctcttgccttcccctggggaggcacccctgtaccccagcttccttcccctggccttttctggccccagtgctcctcctttacatagacttgttcacacagaaacgtgcacgcccccttttctccgccacttcaccagtttctgaaatccaacctcccagacttcacaggaagatagatattcttgagataatgaaaagtgatatcttcgcatacgaaaggaaaaaaggttgaggtatatatgatttttaactgtattaggggtgtatgaaccagtttaaaaacgaggttttatttactgtagagatgaatgcaaatcagaaccaatgatcccttggcctacttagttaaaaccagttcatacatcccttagggtttttattattattattattattattacagttgttattgttgtttttgttgttattattatttggggtttcttgtgttttttctttgcgactctccacactaaacttgcaatattgtggggagaagctgtgactaaactctacgctgcggtgagatgtagcagtaatcagctcccagcgacgtgtgtagctggggctgccgctcgcaataatcactattgatttaaagctttacttagccttgatctgtaccctcgtagtcaataaggtcttgccacattttattagtgaggtggagaaacgtattatttgtttgttgtttttgcccttcccccaccccccaatattaaactgtgaaatttgtgatttgtttaaactctgggtgaatcatagcttagtttgcatgtccagctaatttgtttctatacattttgtttgattctctttctccttctctcagggcttttacaaaaaaatatatatatatggatcttctgaaaagttttttgaggtgcaagttttttctcttttttttttttttttttttttctcattgattaatggacatgatgctgagattcaatcactacatgaaacacctggctgtgaaaacaaaacaacccagagggctgtgttccaagcagcgctggggaagctacgtaacagtcggatgccagt

SEQ ID NO: 12465 - protein, 1687 aa, Homo sapiens; identical to SEQ ID NO: 1221

SEQ ID NO: 12466 - DNA, 1059 bp, Homo sapiens
gggagagcgagactccgagcgtgcgggcgaggaagctgggcggggggccgagacgggggccgggacgacggctggggcgccggggtcgccagctcctcgcccacctccctccctgtgggagaagaggaggaggggaagtgactgcggagttgatgaactttgcacatccagaaacgccattttgattccttttccggaacaagtttgcatctctcctcggtctctccctgaagcccaccggtccccaacgcatcatgccagggagccaagcgtcctgcccggccgtaagttgctccgactgtgtgttccaggagtggtggctctgaggtgtgaccctgcccacgtttgggcccagccaggttcagccccccaataaggagggcagcttgataacacaaagaaaacagtgtcaacgagtactaccaagagaagaagacaagaggtcaacacagactcattttctactccgtgtgaatgatagctacagcaggggaaagtttcatagtctatcagtgggtcagaaaatggaggtaatcagcagtgtggcgggagggttcttctttccctcctaggttttatagcagaggcttcttagaagcttaaacccctgtcccaatgacgtcaagttcgcccgctggcttggaaggttcagacctatcttccatcaacaccatgatgtcggcggtcatgagtgtagggaaggtcacagagaatggcgggagcccccaggggatcaagtccccctcgaagcctccaggaccaaatcggattggcagaaggaaccaggtaagtgttcacacctagtggtgacctctggtgggttcaatccatgagaacattgggagatgtttccgagtttcctatgataaaaccttggaagaattgggaataaaacggacatacccagaggccttgatcatttttcaagggcaaaatttttatggcttatgttagtttcctttcatggagaaggttttctttgctgtggtgtcgatgttggtggaagtgcccttatttttggccccaccattggattttaactcaagctttcttcacttg

SEQ ID NO: 12467 - protein, 62 aa, Homo sapiens
MTSSSPAGLEGSDLSSINTMMSAVMSVGKVTENGGSPQGIKSPSKPPGPNRIGRRNQVSVHT

SEQ ID NO: 12468 - DNA, 986 bp, Homo sapiens
gggagagcgagactccgagcgtgcgggcgaggaagctgggcggggggccgagacgggggccgggacgacggctggggcgccggggtcgccagctcctcgcccacctccctccctgtgggagaagaggaggaggggaagtgactgcggagttgatgaactttgcacatccagaaacgccattttgattccttttccggaacaagtttgcatctctcctcggtctctccctgaagcccaccggtccccaacgcatcatgccagggagccaagcgtcctgcccggccgtaagttgctccgactgtgtgttccaggagtggtggctctgaggtgtgaccctgcccacgtttgggcccagccaggttcagccccccaataaggagggcagcttgataacacaaagaaaacagtgtcaacgagtactaccaagagaagaagacaagaggtcaacacagactcattttctactccgtgtgaatgatagctacagcaggggaaagtttcatagtctatcagtgggtcagaaaatggagttttatagcagaggcttcttagaagcttaaacccctgtcccaatgacgtcaagttcgcccgctggcttggaaggttcagacctatcttccatcaacaccatgatgtcggcggtcatgagtgtagggaaggtcacagagaatggcgggagcccccaggggatcaagtccccctcgaagcctccaggaccaaatcggattggcagaaggaaccaggaaacgaaagaggagaagtcttcctataactgccccctgtgtgagaagatttgcactacccagcaccagctgaccatgcacattcgccagcacaacacagacactggaggagccgaccactcatgcagcatctgcggaaagtcactgagctcggccagctccctcgatcgccacatgctggtgcactctggcgagaggccttacaagtgcactgtgtgtggccagtcatttaccaccaatggg

SEQ ID NO: 12469 - protein, 137 aa, Homo sapiens
MTSSSPAGLEGSDLSSINTMMSAVMSVGKVTENGGSPQGIKSPSKPPGPNRIGRRNQETKEEKSSYNCPLCEKICTTQHQLTMHIRQHNTDTGGADHSCSICGKSLSSASSLDRHMLVHSGERPYKCTVCGQSFTTN

SEQ ID NO: 12470 - DNA, 8192 bp, Homo sapiens
atactttcgagtccttctcgggccgggaagcgcggagatgacggcgcccgccctcccgccgccgccctaaggttgctccgactgtgtgttccaggagtggtggctctgaggtgtgaccctgcccacgtttgggcccagccaggttcagccccccaataaggagggcagcttgataacacaaagaaaacagtgtcaacgagtactaccaagagaagaagacaagaggtcaacacagactcattttctactccgtgtgaatgatagctacagcaggggaaagtttcatagtctatcagtgggtcagaaaatggaggtaatcagcagtgtggcgggagggttcttctttccctcctagggtacgttacctgctttatacatattttttaagaaacaggctttgatatgtcaatttgaaatttgtttgtaactctgatagcgttggcttcttaaatctcttataaaattcaggctccccatcagaatcactgtattgcagcagtggagttaaatgaaacctgatgtttctcatcactagttttaggtctggaacatttgtgtagtagtgaataagcctaggttcttaggagggtgctgcagggcggcagctttctgggctttgtcattgttggcttggcctttcccactctgcctaacccagattaggaaaggtagagaaacctgcctctcatgagtttgagtcctgttggtagtgcacactcagaaaggaggcaaggttacttcgtccttggtatgccaagacttggtttaaatgaaagcttccatcactctgggcgtgaatgtggcctttaactggagaaagacagcgttggatgtttttgacctgaattacaattagagtagccatggccagcgccccctggcaatgacagaagcctaaacttccccatgatcacatcagcaatttccaattttcagttttatagcagaggcttcttagaagcttaaacccctgtcccaatgacgtcaagttcgcccgctggcttggaaggttcagacctatcttccatcaacaccatgatgtcggcggtcatgagtgtagggaaggtcacagagaatggcgggagcccccaggggatcaagtccccctcgaagcctccaggaccaaatcggattggcagaaggaaccaggaaacgaaagaggagaagtcttcctataactgccccctgtgtgagaagatttgcactacccagcaccagctgaccatgcacattcgccagcacaacacagacactggaggagccgaccactcatgcagcatctgcggaaagtcactgagctcggccagctccctcgatcgccacatgctggtgcactctggcgagaggccttacaagtgcactgtgtgtggccagtcatttaccaccaatgggaacatgcacagacatatgaagatccatgagaaggaccctaacagtgccacagccacagcccctccatctcctctgaaacgtaggcgattgtcctccaagaggaaactgagtcacgatgccgagtcagagagagaagacccagcaccagctaaaaagatggtagaagacgggcagtcaggtgacttggagaagaaagctgatgaagtctttcactgcccagtatgtttcaaggagtttgtttgcaagtatggactggagacccacatggagacccattcagataacccactaaggtaggagaaagagtgaactagaccttgttcattcctgtttctcctggcatgtgacaatgttcttaagtcccgttactccacaccgggctccagtgattgaacttgggcacaacaacattagggaggcagttaagaaagtatcggtgtggggaaaaagttggctgagagttgtcagagggtggctgtatccacagggtgttcacatggttcactgtgccttctttctctcagcaaagccccttgagtagtcaccagtgagcccctgaacactggggagtctgctatcatgggtgttcttggacaacagatagattttcttcgcaaaagatgttgcaactcaaatgactattagcaatgcatgaatatgtggcccaaacagggacagcccacgtgttggatacccctggcacagcactggtccatcataggcactccgaagtgtttgaactgagctggacctgatagcacagaaacctgagaagccattttggggtcagagaaagttctacttagtgcaggacacttggccaaaaatggaacctgatatgtttcaataaaaaagtgacaggtgattgctctgccatccagcttcaattgtaggggcttcgcagctccagtgtttctgatcctcagccttgccaggcagaaaacacgggtagtgacaggacttcccacaagaattcaggggactcatctttctttctttaccttctctgataactcatcaggcaaccgttagttctgtattcttgatgagttgatagatttggaagttattcctagagaattgccactttaaaactgttaactgccagagattttaagcattggaaagaacaaagaactacttaggaacccctgttgtcgttgagagacttgaaagtagcccatcctggaagtcacacacagctgcagggtcacgagcacacagcagggccatacacgcgtgcagctttgggttttagaagacagcttgggaatgcaggaatttgggcatctgtttgcctgaatccctgatatatggaccagatttccttcttgaagacacatgtttagctgtgacttaggaatgggaaagtctgagcaagctgaagacttatgttatagggaaaatccaaattgtacagtaacttgatgccaggtcaaatatgattatccttaatcacattagcctgacatttttccattggtgagggaaaaaggaacttacgaagaatttaaactgctgaacaattgaagtgctataaaatgtctttacggaactccccagtctcaagaaattgcctgatcattgggttgggcacagactggttgtcaggcctagaccccactcctccctctgctcatacaggacctcagccagctacatctgaacctgttttctcatccttcaaattgaaggagggcaggaccagataatccttgtgttcctaaaaccttatttttatttatttatttatttttgggtttttttgagaaaagttttgctttgtcacccaggctggagtacactggcgcaatcttggctcactgcaacctctgcctcctgggttcaagtgattctcctgcctcagcctcccgagtagctgggattacaggtgtgtaccaccacacctggctaattttttgtgtttttggtagagatggggtttcaccattttggccaggcttgtctcaaactcctgacctctggtgatctgccccatcttggcctcctaaagtgctgggattataggcatgaaccaccatgctcagccccaaagcctgcctcttaacagttgttttattctgtctaccaggaaaaggcatatggcccctccctgtgtaggccctctagttctgagagatttgggaaacttcacaggttcaggaatgttcacagcatccccaggatgtgggcttgtggtgggtggcaaatactgaaatagttctctagatcaaggacctgagtgagcagagatgacattaccagctgaacctcccaaagagaatcatgagcagaggcagaaacagcacaggggaccccagctcctgctcacgttcctacccagcagccttcagagccagtgctgcagtgaatacaggctgtctctgagcccgtctgtatacttcatctcacttcatattttattctgtgatcagataccaccttagaaactattatttacccccttctagataattctgttctgcaggaaaaataatgtggctcccacaagagatttctgagcagtccaagcctgcatagcatggtgtgtggcagcgatagaggcagatcaggtgtctccttctgaaatgctgacctgggtgagggacgaggttctcctggagcaatcctctgaacaaggacctgctccagggagaggccaggcttcctctgcacagaggttggagatgggcattgcactggacgctcgtcatttttttcatagttgggatgggtaggatttggtgggtgattaatccacagtgatggtagggctggtgctgtagacaggctgtgaagttgaaccctcagtcctgcacgtccagctagccgacctagaggattttcctcacctgtttactaataatgccctgtgtttggtgaggggttggcttaacaattttgtaacctgacagggacttggcccctctgggcaggctctcacttcgctggccccacagctgtggctgaggggtggcccgtaagaagagagttgccaggcatcctttgtgggggcacacaggccacccctgccctgtgcctctatctataattgttgctagatggggtggggctggcatctggaaaccaaaaagagttgattacagaacatggttaatgtccctttgctcctctctgctctgccgatccccataataggctgctatcataggaggcctggggcagcctgcgccagcggggcctagccaggcggtgaactgggacagtagctagtgggagagacagcttgttaacccagaactaaaatagacaccagctccatttcaaatcccagaggcagcagaaccacagtgggatgctacccgcttagactgaaggtttgtaactcaaaacagctgttgccttctcactctcctgcacttatcccccttctccactccccaccaacactggcaaggtgcccattgttccttaataaaaagtgttggaaatccaaactcatataaatctcaactccatttccctccactccactgtgtttcaaatgaatgaagtgttgtcgtagaacaaaaggaagacacaaagctgcctgtagagatgccagctcttaggatcaggtgttagcttcaccctgacatgaccaatggtcagtcatcccccttcccccagggctccccagatgagggagagaaggcagaggaggaagcggagtcaggctatggcgagctggcgtttggaatcggaggtgagggacggagtgttcaagagagcaggcggctacacagaggacatcctttgtgtgaggatgttgctgggcattgaatgtccatcagaatagaactgagcaactggccataccctgctgtgaatgaagtcagctgggagaagcatccaggtcagcccggccagcaagagaatctgggccacgcacgtccttggaattttctagtagccgttttttatttcatttcatttcattttgaggatctcgttctgtcacccaggctggtgtccagtgacatgattatgactcactgcaccttgacctcccaggcttttaagtgacccttccacctcagcctcccaagtagctggaaccacaggcatgtgccgtcacatgcagctaatttttttgtatattttgcagagacagagtctccctttgttgcccaggctggtcttgaactcctgggctcaagtgatctgcccaccttagcctcccaaagtgctgggattgtaggcgtgagccaccctgcctggccctagtagtcatgttttaaaaagtaaaaagaaagagacaaaatgaataatgcttcatcgagtataccagtatcatcaaaatataatgtcaacacataatcaatagaaaaatggtgagtgatgtggttcacattcttgcttccatgtactgactctttgaaatctggtgtgtgtgacgtgaccccagcccgtcttggctgcaccacaccagccacatttcaggtgcttaacagcccacagagaggtttcagatgagccacctacggcagggagggctgcagctttgacgcggagccatgtcttgtgtgtgaagaaggcccaagggcggcagctggatggtcaccctgttggcacagccactgctgagggtgaaactcggccaaagttattgtgtaatcttagatggccccctgatgaaaggagttcgggtaataagtaacgttaacatcatttcagttaaaatgtacccagcaaatgattgagtttgtactgtgtgccaggcacttgcccaggcttgaaggaaagagtgatgtttgagacagggtacgggctaggcacaaaacaagctggttggttataaaacaaagttcaggggtgagttcagggcccaggagggcacatttccctcagattccaggcaggcagagggatctggtggatgcaaaacttctccttgggattttacatcagaggctgtggtgcttcacttaatttcctctgggtcagggcccaaccgggtctggtacttcattgaccctggtcatctctgagttcaaggtgatgacattaaatctctgttgggaattggtacatagggagcccaagggggctctgacaggaacctcggctccatgagtagtgagggcagctgagaccacccccttcctgtatcttagtagtggggccaccaaagggaaatgccttctttttcctgcattctccactgttccaaggaatgtttatctcccttcaccacacgcctaccacctacagagaccccaagactcctcatgtacccgggattgatcccacccttgtcaaatgtcatcctaaaaacagggaaaagataaaatatttgtcagcatcttctgttgaagagtctgtgagtctgaggcttgggcaggcagaaacagattttaaacacttccgggggctatgaacagaggtccctcaaggaggggaagactgcccccacccctcacctgacaggtacagaagccttggtcaggactaccctgtcccccacccaaggcccagagcaaggagtggcccacccagcttcggtagccactacacaccctttgtgaagtccctcagactctgcccagtgcttcacgccacgctggtttggttgaacagtcagagcggggcattgggttgctgtgtgcagcctgggcgggttcctgggtcatggggagggacggctgcctggccagggccctgtcacagggccatcactgttgctcgcagcaactgggagagattagtgcagctgtcggatgtcagttctctgccccgagatgggcaggggagggtgggctgaggagagaagaatgtgtgagttggttgggactctagaggagaggttgtttgcacttactccttctggcctctggagacagaacaggaaaaatgaagcatgaaatcccttttgagaaggaatgccagtctctccattaaaacacaataatgaggaaggaattcagtatctgaaggaaatggtcaagctgagtggcagcttctcggcaggtatttcgcaggttcttctgatgagggttgcagggagcagggagtgtcagcattaggaaatgctcccagctgagccagcgtccaggcattaaggatgtgtgggtcacataaggagccagggcatctgcaaatagctgtcctctgaacgcacagcctggcagagtggaacgaagccagccggctccgtcccagcctgccgcctggcagctctgtgacctcgggcaagtgctgacttggtttccctatctggaaaatagatttgaaggctgttgtgaggatgaagggagataatccacaatcctcagagtgtaacaaatactaaatgaaatttttcttctgatactattatttagaatgtattttttatataaaattttatataaaattaaaatttttagatattttaaaccttccaacatttacagttataggtgttgtggcactctatggctatcccattccaatggaattgaaaaggagtcaacttccaggtgcgattcacttggcagagaacatgaaagcaatttgtcctttactcttataaacagctgtttttatctagttttcgcttttgtaaagattgggaaatggagtggctctttaaatttggtttgagtcttgcttcccacgtttcttaatcccactgtgtgaaaagcagatatttagaaacgtgaaggaactcgacacctttatgtaacagaacaacacatcactttctttagattgttgggggaaccctagggttctaaggaagtgagtttcctgatgtttgaaatttgccaatgcagcctttcaaaaatatgcttagcatagtttaaaaaaaagaaaat

SEQ ID NO: 12471 - protein, 236 aa, Homo sapiens [sequence omitted]

SEQ ID NO: 12472 - DNA, 8192 bp, Homo sapiens
ttcagacacctgagagcatcctgttctgggtacagtgtgtgtatgtatatgtttgtttgaagccgctggtcctcgccttttactccttagctggacagcgggttcgggatctgccccatgactaaggctgaagtggaaagttgcgaagatagaacaagagttgttccttagggtggtgtccctaaacttgaaagtggacttggtcctgctcgcaggttgctccgactgtgtgttccaggagtggtggctctgaggtgtgaccctgcccacgtttgggcccagccaggttcagccccccaataaggagggcagcttgataacacaaagaaaacagtgtcaacgagtactaccaagagaagaagacaagaggtcaacacagactcattttctactccgtgtgaatgatagctacagcaggggaaagtttcatagtctatcagtgggtcagaaaatggagttttatagcagaggcttcttagaagcttaaacccctgtcccaatgacgtcaagttcgcccgctggcttggaaggttcagacctatcttccatcaacaccatgatgtcggcggtcatgagtgtagggaaggtcacagagaatggcgggagcccccaggggatcaagtccccctcgaagcctccaggaccaaatcggattggcagaaggaaccaggaaacgaaagaggagaagtcttcctataactgccccctgtgtgagaagatttgcactacccagcaccagctgaccatgcacattcgccagcacaacacagacactggaggagccgaccactcatgcagcatctgcggaaagtcactgagctcggccagctccctcgatcgccacatgctggtgcactctggcgagaggccttacaagtgcactgtgtgtggccagtcatttaccaccaatgggaacatgcacagacatatgaagatccatgagaaggaccctaacagtgccacagccacagcccctccatctcctctgaaacgtaggcgattgtcctccaagaggaaactgagtcacgatgccgagtcagagagagaagacccagcaccagctaaaaagatggtagaagacgggcagtcaggtgacttggagaagaaagctgatgaagtctttcactgcccagtatgtttcaaggagtttgtttgcaagtatggactggagacccacatggagacccattcagataacccactaagatgtgacatttgttgtgtcacctttcgaacacatcgaggactgctgcgtcacaacgcgcttgtccacaaacaacttcccagggatgcaatgggcagacctttcatacagaacaacccttcaattcctgctggcttccacgacttaggattcacggacttctcctgtaggaagtttcctcgcatttctcaggcctggtgcgaaacaaacctgcggaggtgcatcagcgagcaacaccgttttgtctgcgacacctgtgacaaggcgttccccatgctctgctcactggctctgcacaagcagacccatgtggcggcagaccagggtcaagaaaagccgcaggccacgcccctgcctggtgacgccctggaccagaagggcttcctggccttgcttggcctgcagcacaccaaagacgtcaggcctgcccccgccgaggagcccctgccggatgacaaccaggcaattcagctccagacactcaagtgtcagctacctcaggaccccggctgcaccaacctgctgagcctgtcacctttcgaagctgcttccctaggcggttctctcacagttctccccgcgaccaaggacagcataaagcacctgtccctgcagcccttccagaagggcttcatcatccagcctgacagcagcattgtggtcaagcccatctctggcgagtcggccatcgagctggcagacatccagcaaattctgaagatggcagcctcggctccccctcagatcagtcttccgcccttctccaaggcccctgccgccccactgcaggcgatcttcaagcacatgccccctctgaagccaaagcccctggtcacaccacggacggtggtggccacctccacgcccccgcctctcatcaacgcccagcaggcttccccgggctgtatcagccccagcctgccgccaccgcccctgaagctcctcaaaggctcagtggaggcggcctccaacgcccacctgctgcagtccaagtccgggacccagccccacgcggccacgcggctctccctgcagcagccgcgggcggagctgccgggccagcctgagatgaagacgcagctggagcaggacagcatcatcgaggccctgctgccgctgagcatggaggccaagatcaagcaggagatcacagagggggaactcaaggccttcatgacagcgcccggcggcaagaagacgcccgccatgcgcaaggtgctctacccctgccgcttctgcaaccaggtgtttgccttctcgggggtcttgcgtgcccacgtgcgctcccacctgggcatctcgccataccagtgcaacatctgcgactacatcgccgccgacaaggccgcgctcatccgccacctgcgcacgcacagtggggagcggccctacatttgcaagatctgccactaccccttcactgtcaaagccaactgcgagcggcacctgcgcaagaagcacctcaaggccacccgcaaggatatcgagaagaacatcgagtatgtgagtagcagcgcggccgagctggtggacgccttctgcgccccggacaccgtgtgccggctgtgcggcgaggacctcaagcactatcgtgccctgcgcatccacatgcgcacgcactgcggccgcggcctgggcgggggccacaagggccgcaagcccttcgagtgcaaggagtgcagcgccgcgttcgcggccaagcgcaactgcatccaccacatcctcaagcagcacctgcacgtgcccgagcaggacatcgagagctacgtgctggccgccgacggcctgggccccgcagaggcgccggccgctgaggcgtcggggcgcggggaggacagtggctgcgctgcccttggtgactgcaagcccctcactgccttcctggaaccccagaacggctttcttcacaggggccccacccagcctccacctccccatgtctcgatcaagttggagcccgccagtagctttgcggtggacttcaatgagcccctggacttctcgcagaagggcctggccctggtccaagtgaagcaggaaaacatctcctttctgagcccttcttccctggtcccctatgactgctccatggagcccatcgacctgtccatccccaagaacttcaggaaaggggacaaggatttggccactcccagcgaagccaagaagcctgaggaggaggcggggagcagcgagcagccctctccctgcccagcacccggcccttctcttcctgtaactttggggcccagcggaatcctggaaagccccatggcccctgctccggcggccaccccggaacccccagcacagcccctgcagggccctgttcagctggcggtcccaatctactcctcagccctggtcagcagccctccactcgtgggcagctcagccctcctgagtggcacagccttgctgcgtccactgcggcccaagcccccgctgcttttgccaaagccccccgtgacagaagagctgcccccgctggcctccattgcccagatcatctcatctgtatcctcggcccccaccctgctgaaaaccaaggtggcggacccagggcccgcaagcactggcagtaacaccacggcttcagacagcttaggaggttctgtccccaaagccgccaccaccgccacccccgctgccaccaccagcccaaaagagtctagtgagcctcccgctccagccagcagcccagaggctgcctctcccaccgagcagggcccagcgggcacgtcgaagaagaggggccggaaaagggggatgaggagccgaccccgcgccaacagcggcggggtggacctggactccagcggggagtttgccagcatcgagaagatgctggccaccacagacaccaacaagttcagtccgtttctgcagacagcggaggacaacactcaggatgaggtggccggagcccctgccgaccaccatgggcccagtgatgaagagcagggcagtcccccagaagacaagctgctgagggccaagcggaactcgtacaccaactgcctgcagaagatcacctgtccccactgtccccgggttttcccttgggccagctccctacagaggcacatgctcacacacactgacagtcagtcggatgcggagactgcagccgccgcgggcgaagtgctagacctcacctcacgggacagagagcagccgtcggagggcgccactgagctccgccaggtcgcaggggatgcgcctgtggagcaggccacggcggaaacggcctcgccggtgcaccgggaagagcacgggcgtggggagagccatgagccggaggaggagcatggcactgaggagagcactggggacgccgacggcgcggaagaggacgcgtcgagcaaccagagcctggacctggacttcgccaccaagctcatggacttcaagctggcggagggcgacggcgaggcaggcgccgggggcgcggcctcgcaggagcagaagctcgcctgcgacacctgtgggaagagcttcaagttcctgggcaccctgagccgccaccggaaggcgcacggccgccaggagcccaaggacgagaagggagatggcgccagcactgcagaggaggggccccagcccgcccctgaacaggaggagaagccccccgagaccccggcagaggtggtggagtcggccccgggtgccggggaggccccggcggaaaagctcgcggaggagacggagggcccctccgacggggagagcgcggccgagaaaaggtcctcagagaagagcgacgatgacaagaaaccaaagacagactcccccaaaagcgtggccagcaaggcagacaagaggaagaaggtctgcagcgtgtgcaacaagcggttctggtcgctgcaggacctgacccggcacatgcgctcccacacaggggaaaggccatacaaatgtcagacctgcgagcgaaccttcaccttgaagcacagcctggttcgccaccagcggatccaccagaaagccaggcatgccaaacaccacgggaaggacagcgacaaggaagagcggggtgaggaggacagcgagaatgagtccacccacagcggcaacaacgccgtctcagagaacgaggctgagctggctcccaatgccagcaaccacatggctgtcacccggagccggaaggagggcttggccagtgccaccaaggactgcagccacagggaggagaaggtcacggcagggtggccgtctgagcctggccagggtgaccttaacccagagagcccggcggccctggggcaggacctgctggagccgcgcagcaagaggcctgcccacccaatcctggccacagctgatggcgcctcccagctcgtggggatggagtgacagcctcagtccccctcagcacagacaaaagccagcagagcaaagcgtctatacttcatggggtttcctcagtgccctttggctgttgaggagtgagagagagagagagagagagagagagagagagagagagagacaagcaggagcgtggctgctcgctcagtgccatagccttaccgcagcctgcgcgggaggccacagcccgtgccgattccagtgccttaactacttaccggatccctccatattatcatgggtgttgtatttttccaaaatgacttcttaaacaaaacaaatattataatgaattgtctggagaggacctcttcatttgagcattagcgttattttgtattggtgtgtgtgagcttgttcttgtgaatctgtgatagcaccgtttgttctgtgagctggaaacagaaggaaaaaacatacccttgggtacccatagccaataactggaagaaaatgatgtgaatttcatgtaaatgaccagaggaaagatggataagatgataatttcttaaatagacattttccttttttctttgtgcttcatggtggagctgtcatctggtccttggtattacaggatgtggttgatgaaggtttccaatatggtttcaggccaaaaccagggaagattctagcttcagcctcatgtccatttccagtctgtcagcattagacatggtcactgttcaagtttcaagacatccattcttaactatagagaagagttactcccctggcgtcttaacctatggaaaacatgcacggataggatatatttgattgcctcctcttccctttcagtatatgtattattaatattattattattattattattattagttcatcagtttgctgttctctgcagtgagcagaatcaaatgggcaatatttgtcctgggagacctgtgccgcacccaggtccccgtgttaacgtgtgcctgcggttgtggttggcaccctcgggtggtagctcttctactgtaatgagacaagcctttcttctgtcactgcagaatttagaaggggccgtgagcagtcttcccaagcatggtccaggagcagctcagagagggtggagtgaggatgcatgcatccagggaacaggcatcaagaagccagggccgtgcctggagcactgcagagatgactttggagaaagcaaagcagtgacccagtgaccaggcacattactcgtgagcgaggtattcccagtcttcctgctaagcctaatccaagccttacccagctgtgctactgtcatttgcaaagcaaggaaatactactactggtaataaaactacacatgcaagatgtcagataagaaataggtttatatttaccttcctgcgatgtggggttggtgcttgaagataaatgtgctgtttctagtttcttaaatagcccacacccctggatgcaaaaaggcagggttatttttacccatgagcatcctgtgcaggcaatagacttccctcactgtctccgcctgcagggaggagaatgtaccccactgcacctgagctcctggtccctcagccaagacctcaggggtccccagccagcctgctgctggggacccctgtgcttgctgcagtgtatggagcctcttgccttcccctggggaggcacccctgtaccccagcttccttcccctggccttttctggccccagtgctcctcctttacatagacttgttcacacagaaacgtgcacgcccccttttctccgccacttcaccagtttctgaaatccaacctcccagacttcacaggaagatagatattcttgagataatgaaaagtgatatcttcgcatacgaaaggaaaaaaggttgaggtatatatgatttttaactgtattaggggtgtatgaaccagtttaaaaacgaggttttatttactgtagagatgaatgcaaatcagaaccaatgatcccttggcctacttagttaaaaccagttcatacatcccttagggtttttattattattattattattattacagttgttattgttgtttttgttgttattattatttggggtttcttgtgttttttctttgcgactctccacactaaacttgcaatattgtggggagaagctgtgactaaactctacgctgcggtgagatgtagcagtaatcagctcccagcgacgtgtgtagctggggctgccgctcgcaataatcactattgatttaaagctttacttagccttgatctgtaccctcgtagtcaataaggtcttgccacattttattagtgaggtggagaaacgtattatttgtttgttgtttttgcccttcccccaccccccaatattaaactgtgaaatttgtgatttgtttaaactctgggtgaatcatagcttagtttgcatgtccagctaatttgtttctatacattttgtttgattctctttctccttctctcagggcttttacaaaaaaatatatatatatggatcttctgaaaagttttttgaggtgcaagttttttctcttttttttttttttttttttttctcattgattaatggacatgatgctgagattcaatcactacatgaaacacctggctgtgaaaacaaaacaacccagagggctgtgt

SEQ ID NO: 12473 - protein, 1687 aa, Homo sapiens; identical to SEQ ID NO: 1221

SEQ ID NO: 12474 - DNA, 902 bp, Homo sapiens
tccatctcacagatgaggaaattgcagaactgagaggttccctaactgtctaagggtcaggccacttaccactgctggcaagtggtagaggcaggatttgcgatgtggttccagagcctactccttaactaccatgcaattccgcttgttcatctttgggtggttacccaccgggccttaaggtagtcttttcattttttcttgaatggagacagtctgtcagagttcgcaggaagtgtggtgtgctggtgacagttcacattccaagttaagcccccttaccacgagcttcattcgttggtggtttacgtgtggggggtgctggtgacagtgttggtcaatactagaggggcatggctaggcagcagctgcccagtcatttaaaactgaacaataaatagaacggggttgttaggggcggaacgaaggggcctagtgggaagtggtttctcagagggagatagttcagtcgcactagaagaatattttcttcagttaacctatgtgtaattttcaggcttatgagaagaaaggccctgttctcatcaccctcccttttgattcttctttggtctttttccatcatccatctgcctgccctgagatgctcatctgaggcctgattccatcaggtggtctgaagaaggtttctatgaagtctttatgagctggacttcagttttgttttgtttgtttgtttgtctgagacagaagtaagactccatctcaaaaaaaaaaaaaattgagtgcctactgtgtgcacatgtaccctgtgtgaccatgggccaggcacagtggttcatgcctgtaatcccagcactttgagaggctgaagcaggtggattgctcgagcccaggagttcgagaccagcctgggcaacatagtgagactccgtctctcc

SEQ ID NO: 12475 - protein, 40 aa, Homo sapiens
METVCQSSQEVWCAGDSSHSKLSPLTTSFIRWWFTCGGCW

SEQ ID NO: 12476 - DNA, 2721 bp, Homo sapiens
agttttatagcagaggcttcttagaagcttaaacccctgtcccaatgacgtcaagttcgcccgctggcttggaaggttcagacctatcttccatcaacaccatgatgtcggcggtcatgagtgtagggaaggtcacagagaatggcgggagcccccaggggatcaagtccccctcgaagcctccaggaccaaatcggattggcagaaggaaccaggaaacgaaagaggagaagtcttcctataactgccccctgtgtgagaagatttgcactacccagcaccagctgaccatgcacattcgccagcacaacacagacactggaggagccgaccactcatgcagcatctgcggaaagtcactgagctcggccagctccctcgatcgccacatgctggtgcactctggcgagaggccttacaagtgcactgtgtgtggccagtcatttaccaccaatgggaacatgcacagacatatgaagatccatgagaaggaccctaacagtgccacagccacagcccctccatctcctctgaaacgtaggcgattgtcctccaagaggaaactgagtcacgatgccgagtcagagagagaagacccagcaccagctaaaaagatggtagaagacgggcagtcaggtgacttggagaagaaagctgatgaagtctttcactgcccagtatgtttcaaggagtttgtttgcaagtatggactggagacccacatggagacccattcagataacccactaagatgtgacatttgttgtgtcacctttcgaacacatcgaggactgctgcgtcacaacgcgcttgtccacaaacaacttcccagggatgcaatgggcagacctttcatacagaacaacccttcaattcctgctggcttccacgacttaggattcacggacttctcctgtaggaagtttcctcgcatttctcaggcctggtgcgaaacaaacctgcggaggtgcatcagcgagcaacaccgttttgtctgcgacacctgtgacaaggcgttccccatgctctgctcactggctctgcacaagcagacccatgtggcggcagaccagggtcaagaaaagccgcaggccacgcccctgcctggtgacgccctggaccagaagggcttcctggccttgcttggcctgcagcacaccaaagacgtcaggcctgcccccgccgaggagcccctgccggatgacaaccaggcaattcagctccagacactcaagtgtcagctacctcaggaccccggctgcaccaacctgctgagcctgtcacctttcgaagctgcttccctaggcggttctctcacagttctccccgcgaccaaggacagcataaagcacctgtccctgcagcccttccagaagggcttcatcatccagcctgacagcagcattgtggtcaagcccatctctggcgagtcggccatcgagctggcagacatccagcaaattctgaagatggcagcctcggctccccctcagatcagtcttccgcccttctccaaggcccctgccgccccactgcaggcgatcttcaagcacatgccccctctgaagccaaagcccctggtcacaccacggacggtggtggccacctccacgcccccgcctctcatcaacgcccagcaggcttccccgggctgtatcagccccagcctgccgccaccgcccctgaagctcctcaaaggctcagtggaggcggcctccaacgcccacctgctgcagtccaagtccgggacccagccccacgcggccacgcggctctccctgcagcagccgcgggcggagctgccgggccagcctgagatgaagacgcagctggagcaggacagcatcatcgaggccctgctgccgctgagcatggaggccaagatcaagcaggagatcacagagggggaactcaaggccttcatgacagcgcccggcggcaagaagacgcccgccatgcgcaaggtgctctacccctgccgcttctgcaaccaggtgtttgccttctcgggggtcttgcgtgcccacgtgcgctcccacctgggcatctcgccataccagtgcaacatctgcgactacatcgccgccgacaaggccgcgctcatccgccacctgcgcacgcacagtggggagcggccctacatttgcaagatctgccactaccccttcactgtcaaagccaactgcgagcggcacctgcgcaagaagcacctcaaggccacccgcaaggatatcgagaagaacatcgagtatgtgagtagcagcgcggccgagctggtggacgccttctgcgccccggacaccgtgtgccggctgtgcggcgaggacctcaagcactatcgtgccctgcgcatccacatgcgcacgcactgcggccgcggcctgggcgggggccacaagggccgcaagcccttcgagtgcaaggagtgcagcgccgcgttcgcggccaagcgcaactgcatccaccacatcctcaagcagcacctgcacgtgcccgagcaggacatcgagagctacgtgctggccgccgacggcctgggccccgcagaggcgccggccgctgaggcgtcggggcgcggggaggacagtggctgcgctgcccttggtgactgcaagcccctcactgccttcctggaaccccagaacggctttcttcacaggggccccacccagcctccacctccccatgtctcgatcaagttggagcccgccagtagctttg

SEQ ID NO: 12477 - protein, 891 aa, Homo sapiens
MTSSSPAGLEGSDLSSINTMMSAVMSVGKVTENGGSPQGIKSPSKPPGPNRIGRRNQETKEEKSSYNCPLCEKICTTQHQLTMHIRQHNTDTGGADHSCSICGKSLSSASSLDRHMLVHSGERPYKCTVCGQSFTTNGNMHRHMKIHEKDPNSATATAPPSPLKRRRLSSKRKLSHDAESEREDPAPAKKMVEDGQSGDLEKKADEVFHCPVCFKEFVCKYGLETHMETHSDNPLRCDICCVTFRTHRGLLRHNALVHKQLPRDAMGRPFIQNNPSIPAGFHDLGFTDFSCRKFPRISQAWCETNLRRCISEQHRFVCDTCDKAFPMLCSLALHKQTHVAADQGQEKPQATPLPGDALDQKGFLALLGLQHTKDVRPAPAEEPLPDDNQAIQLQTLKCQLPQDPGCTNLLSLSPFEAASLGGSLTVLPATKDSIKHLSLQPFQKGFIIQPDSSIVVKPISGESAIELADIQQILKMAASAPPQISLPPFSKAPAAPLQAIFKHMPPLKPKPLVTPRTVVATSTPPPLINAQQASPGCISPSLPPPPLKLLKGSVEAASNAHLLQSKSGTQPHAATRLSLQQPRAELPGQPEMKTQLEQDSIIEALLPLSMEAKIKQEITEGELKAFMTAPGGKKTPAMRKVLYPCRFCNQVFAFSGVLRAHVRSHLGISPYQCNICDYIAADKAALIRHLRTHSGERPYICKICHYPFTVKANCERHLRKKHLKATRKDIEKNIEYVSSSAAELVDAFCAPDTVCRLCGEDLKHYRALRIHMRTHCGRGLGGGHKGRKPFECKECSAAFAAKRNCIHHILKQHLHVPEQDIESYVLAADGLGPAEAPAAEASGRGEDSGCAALGDCKPLTAFLEPQNGFLHRGPTQPPPPHVSIKLEPASS

SEQ ID NO: 12478 - DNA, 1957 bp, Homo sapiens
gtaccagccccaaaccctgccagcagtatgggggaggatgcatttctccacaccttgctgaaggatggggacttggcagagttcagtgatgttttagggttggaacattgattcctttctctctctcttttttcccttttctccttgtgcctctcttcctgtgggtgcctgagaaaatactcagcctgtatgactgtggcctgagtcgagaaggagtgctagctctgagaagaaaaggtttatttccactctcatgtgactatccatctatccatctctccatccatcagcccattggacaatatgtacccagttcctatatccagctagctactgtaccaggtgccaggcatttcgggaagaataagacagacaaggttgtcgtcctcatccttctgctctaccaggaacaagtgaagtgataggaagagcttttcctcaaatagctctgagttgtcccaagtccagcctccagatcagagaccgtggttagggccctggaggatgcccacagcacctcccatgtttgcatgctaactggaggctgcctcttcaggtgtgaggaggcaactgtgcaggtggggcagggctgcctttcatccccctcctttcttctccagggatctggtatgctgagtttgcttttgaaatggaggtcctggccagaggtagcctggtaaatacagttcttaatctaaaaaaacaaaactcagtggggagagagtatggggaagaaggaagcattctccttacctgtggactagacagggagtgctgagagacggagcctggggaaagtcccattggtgtgagcttagagttccaggagagattagccacagccggatgctgacaagggtgccagattgtttcattatggaatggttagttatcacctcagcctcccaaagtgctgggattacaggtatgagccaccatgcttgacatggttcattttaaaagattacatctgggtctgtagacctcctcccatataacttggattttgtggacctgtatgatggcctgcagcacagcactgccagcctcagagaaggctggggtgtcagttcatgagtcaccccagagtcaacacaagtcagccccaccagccgcacagtgtgcctgctgtctattgcaaggtgaatgcaagatgattttttaaacaaatttgtctccctgtggctggtcacttggaggcctttttttttttttaaaacatgtatttacatcctattgatgtatcaccatcctgttggtaactttaaaaattttgtgtatgtaaaattgcctatctactaatttgacaacaataccccggaggtggaactcatccccaacttttggcctggctgtgagacatccctccttgttatgtcttactttgttgctgttgcttttgtttctccccacacccatgcccccatgggggtccttggccagctctactccgactgcagttgtagaactgggcagagaaggtatgacaccccctcccccattatacctcagaaagaactagaagtatgataaatgagtacgactgggaatttgttttttccactatctctaggatgttcatgttttgtagaatccatatccttaattctttttgtgtgaaaatgtagagcatacctagttctcagacccaattccatagattagaaaaaagttttggccgggcacggtggctgatgcctgtaatcccagcacttcgggaagctgaggcgggtggatcacctgaggtcgggagtttaagaccagcctggccaacatggcaaaaccccgtctctactaaaaatacaaaaattagccaggtgtggtggcgcacacctgtagtcccacctacttgggaggttgaggcaggagaatcacttgaacccgggaggcggaggttgcagtgagccaagatcgtgccactgtactccagcctgggcaacagagtgagactccattt

SEQ ID NO: 12479 - protein, 38 aa, Homo sapiens
MVSYHLSLPKCWDYRYEPPCLTWFILKDYIWVCRPPPI

SEQ ID NO: 12480 - DNA, 2156 bp, Homo sapiens
ggaaaagggggatgaggagccgaccccgcgccaacagcggcggggtggacctggactccagcggggagtttgccagcatcgagaagatgctggccaccacagacaccaacaagttcagtccgtttctgcagacagcggaggacaacactcaggatgaggtggccggagcccctgccgaccaccatgggcccagtgatgaagagcagggcagtcccccagaagacaagctgctgagggccaagcggaactcgtacaccaactgcctgcagaagatcacctgtccccactgtccccgggttttcccttgggccagctccctacagaggcacatgctcacacacactggtcagaaacccttcccttgtcaaaaatgcgatgccttcttttctaccaaatctaactgtgaacgccaccagttgcgcaaacacggagttaccacctgttccctgagaagaaacgggcttatcccccagtcaaaagagagtgatgttggatcccatgatagcacagacagtcagtcggatgcggagactgcagccgccgcgggcgaagtgctagacctcacctcacgggacagagagcagccgtcggagggcgccactgagctccgccaggtcgcaggggatgcgcctgtggagcaggccacggcggaaacggcctcgccggtgcaccgggaagagcacgggcgtggggagagccatgagccggaggaggagcatggcactgaggagagcactggggacgccgacggcgcggaagaggacgcgtcgagcaaccagagcctggacctggacttcgccaccaagctcatggacttcaagctggcggagggcgacggcgaggcaggcgccgggggcgcggcctcgcaggagcagaagctcgcctgcgacacctgtgggaagagcttcaagttcctgggcaccctgagccgccaccggaaggcgcacggccgccaggagcccaaggacgagaagggagatggcgccagcactgcagaggaggggccccagcccgcccctgaacaggaggagaagccccccgagaccccggcagaggtggtggagtcggccccgggtgccggggaggccccggcggaaaagctcgcggaggagacggagggcccctccgacggggagagcgcggccgagaaaaggtcctcagagaagagcgacgatgacaagaaaccaaagacagactcccccaaaagcgtggccagcaaggcagacaagaggaagaaggtctgcagcgtgtgcaacaagcggttctggtcgctgcaggacctgacccggcacatgcgctcccacacaggggaaaggccatacaaatgtcagacctgcgagcgaaccttcaccttgaagcacagcctggttcgccaccagcggatccaccagaaagccaggcatgccaaacaccacgggaaggacagcgacaaggaagagcggggtgaggaggacagcgagaatgagtccacccacagcggcaacaacgccgtctcagagaacgaggctgagctggctcccaatgccagcaaccacatggctgtcacccggagccggaaggagggcttggccagtgccaccaaggactgcagccacagggaggagaaggtcacggcagggtggccgtctgagcctggccagggtgaccttaacccagagagcccggcggccctggggcaggacctgctggagccgcgcagcaagaggcctgcccacccaatcctggccacagctgatggcgcctcccagctcgtggggatggagtgacagcctcagtccccctcagcacagacaaaagccagcagagcaaagcgtctatacttcatggggtttcctcagtgccctttggctgttgaggagtgagagagagagagagagagagagagagagagagagagagagacaagcaggagcgtggctgctcgctcagtgccatagccttaccgcagcctgcgcgggaggccacagcccgtgccgattccagtgccttaactacttaccggatccctccatattatcatgggtgttgtatttttccaaaatgacttcttaaacaaaacaaatattataatgaattgtctggagaggacctcttcatttgagcattagcgttattttgtattggtgtgtgtgagcttgttcttgtgaatctgtgat

SEQ ID NO: 12481 - protein, 584 aa, Homo sapiens
MRSRPRANSGGVDLDSSGEFASIEKMLATTDTNKFSPFLQTAEDNTQDEVAGAPADHHGPSDEEQGSPPEDKLLRAKRNSYTNCLQKITCPHCPRVFPWASSLQRHMLTHTGQKPFPCQKCDAFFSTKSNCERHQLRKHGVTTCSLRRNGLIPQSKESDVGSHDSTDSQSDAETAAAAGEVLDLTSRDREQPSEGATELRQVAGDAPVEQATAETASPVHREEHGRGESHEPEEEHGTEESTGDADGAEEDASSNQSLDLDFATKLMDFKLAEGDGEAGAGGAASQEQKLACDTCGKSFKFLGTLSRHRKAHGRQEPKDEKGDGASTAEEGPQPAPEQEEKPPETPAEVVESAPGAGEAPAEKLAEETEGPSDGESAAEKRSSEKSDDDKKPKTDSPKSVASKADKRKKVCSVCNKRFWSLQDLTRHMRSHTGERPYKCQTCERTFTLKHSLVRHQRIHQKARHAKHHGKDSDKEERGEEDSENESTHSGNNAVSENEAELAPNASNHMAVTRSRKEGLASATKDCSHREEKVTAGWPSEPGQGDLNPESPAALGQDLLEPRSKRPAHPILATADGASQLVGME

SEQ ID NO: 12482 - DNA, 2165 bp, Homo sapiens
gtatatgtattattaatattattattattattattattattagttcatcagtttgctgttctctgcagtgagcagaatcaaatgggcaatatttgtcctgggagacctgtgccgcacccaggtccccgtgttaacgtgtgcctgcggttgtggttggcaccctcgggtggtagctcttctactgtaatgagacaagcctttcttctgtcactgcagaatttagaaggggccgtgagcagtcttcccaagcatggtccaggagcagctcagagagggtggagtgaggatgcatgcatccagggaacaggcatcaagaagccagggccgtgcctggagcactgcagagatgactttggagaaagcaaagcagtgacccagtgaccaggcacattactcgtgagcgaggtattcccagtcttcctgctaagcctaatccaagccttacccagctgtgctactgtcatttgcaaagcaaggaaatactactactggtaataaaactacacatgcaagatgtcagataagaaataggtttatatttaccttcctgcgatgtggggttggtgcttgaagataaatgtgctgtttctagtttcttaaatagcccacacccctggatgcaaaaaggcagggttatttttacccatgagcatcctgtgcaggcaatagacttccctcactgtctccgcctgcagggaggagaatgtaccccactgcacctgagctcctggtccctcagccaagacccctgtgcttgctgcagtgtatggagcctcttgccttcccctggggaggcacccctgtaccccagcttccttcccctggccttttctggccccagtgctcctcctttacatagacttgttcacacagaaacgtgcacgcccccttttctccgccacttcaccagtttctgaaatccaacctcccagacttcacaggaagatagatattcttgagataatgaaaagtgatatcttcgcatacgaaaggaaaaaaggttgaggtatatatgatttttaactgtattaggggtgtatgaaccagtttaaaaacgaggttttatttactgtagagatgaatgcaaatcagaaccaatgatcccttggcctacttagttaaaaccagttcatacatcccttagggtttttattattattattattattattacagttgttattgttgtttttgttgttattattatttggggtttcttgtgttttttctttgcgactctccacactaaacttgcaatattgtggggagaagctgtgactaaactctacgctgcggtgagatgtagcagtaatcagctcccagcgacgtgtgtagctggggctgccgctcgcaataatcactattgatttaaagctttacttagccttgatctgtaccctcgtagtcaataaggtcttgccacattttattagtgaggtggagaaacgtattatttgtttgttgtttttgcccttcccccaccccccaatattaaactgtgaaatttgtgatttgtttaaactctgggtgaatcatagcttagtttgcatgtccagctaatttgtttctatacattttgtttgattctctttctccttctctcagggcttttacaaaaaaatatatatatatggatcttctgaaaagttttttgaggtgcaagttttttctcttttttttttttttttttttttctcattgattaatggacatgatgctgagattcaatcactacatgaaacacctggctgtgaaaacaaaacaacccagagggctgtgttccaagcagcgctggggaagctacgtaacagtcggatgccagttttggaagattcaccatgcgttctgaccctctgttcgtctctttcctctcctctttcttcaagaaggaaattgatcctagtgatttcagcccatgcattaaacaggaaacaataataaatttgtagaattcatatttttctaaagggaacttaaaaactgctgctacatgttatgtacaaaactggtttatgccacatgaacagagaatcacaagtttggttttggtactttttgttcctctttgtattcagttgtatagaacttccaaattcagaatgagaagaaagctgttctgtatcaaaccatttaagcaataaatgttatattttaaaagctgcaga

SEQ ID NO: 12483 - protein, 99 aa, Homo sapiens
MQKGRVIFTHEHPVQAIDFPHCLRLQGGECTPLHLSSWSLSQDPCACCSVWSLLPSPGEAPLYPSFLPLAFSGPSAPPLHRLVHTETCTPPFLRHFTSF

SEQ ID NO: 12484 - DNA, 1739 bp, Homo sapiens
ctcgtgagcgaggtattcccagtcttcctgctaagcctaatccaagccttacccagctgtgctactgtcatttgcaaagcaaggaaatactactactggtaataaaactacacatgcaagatgtcagataagaaataggtttatatttaccttcctgcgatgtggggttggtgcttgaagataaatgtgctgtttctagtttcttaaatagcccacacccctggatgcaaaaaggcagggttatttttacccatgagcatcctgtgcaggcaatagacttccctcactgtctccgcctgcagggaggagaatgtaccccaccctgtgcttgctgcagtgtatggagcctcttgccttcccctggggaggcacccctgtaccccagcttccttcccctggccttttctggccccagtgctcctcctttacatagacttgttcacacagaaacgtgcacgcccccttttctccgccacttcaccagtttctgaaatccaacctcccagacttcacaggaagatagatattcttgagataatgaaaagtgatatcttcgcatacgaaaggaaaaaaggttgaggtatatatgatttttaactgtattaggggtgtatgaaccagtttaaaaacgaggttttatttactgtagagatgaatgcaaatcagaaccaatgatcccttggcctacttagttaaaaccagttcatacatcccttagggtttttattattattattattattattacagttgttattgttgtttttgttgttattattatttggggtttcttgtgttttttctttgcgactctccacactaaacttgcaatattgtggggagaagctgtgactaaactctacgctgcggtgagatgtagcagtaatcagctcccagcgacgtgtgtagctggggctgccgctcgcaataatcactattgatttaaagctttacttagccttgatctgtaccctcgtagtcaataaggtcttgccacattttattagtgaggtggagaaacgtattatttgtttgttgtttttgcccttcccccaccccccaatattaaactgtgaaatttgtgatttgtttaaactctgggtgaatcatagcttagtttgcatgtccagctaatttgtttctatacattttgtttgattctctttctccttctctcagggcttttacaaaaaaatatatatatatggatcttctgaaaagttttttgaggtgcaagttttttctcttttttttttttttttttttttctcattgattaatggacatgatgctgagattcaatcactacatgaaacacctggctgtgaaaacaaaacaacccagagggctgtgttccaagcagcgctggggaagctacgtaacagtcggatgccagttttggaagattcaccatgcgttctgaccctctgttcgtctctttcctctcctctttcttcaagaaggaaattgatcctagtgatttcagcccatgcattaaacaggaaacaataataaatttgtagaattcatatttttctaaagggaacttaaaaactgctgctacatgttatgtacaaaactggtttatgccacatgaacagagaatcacaagtttggttttggtactttttgttcctctttgtattcagttgtatagaacttccaaattcagaatgagaagaaagctgttctgtatcaaaccatttaagcaataaatgttatattttaaaagctgcaga

SEQ ID NO: 12485 - protein, 88 aa, Homo sapiens
MQKGRVIFTHEHPVQAIDFPHCLRLQGGECTPPCACCSVWSLLPSPGEAPLYPSFLPLAFSGPSAPPLHRLVHTETCTPPFLRHFTSF

SEQ ID NO: 12486 - DNA, 1097 bp, Homo sapiens
gatgagtaaatgttcctttgtgcaacaattcggtctttacttaacctgccctaatatttttcggcctgatgggaattagtgcagagaagccatgtcaccatagaaggcaactcctacttgtgtgtggactgagcaatcagagtctgtggcgataatattgctgaaaatgcactgcattcatttttctaaacatagattgagaacagttgaactcttaaatcctcagatgccaggggtctgctctagcatcaacgcaggaggagggagacgcactgatgacatcgggccgctcctgcagctcgggcgcctcgcagtctccaggtgcaaggccagcgcttccgccgtggctgcttcaggacatcccccagcacagccgttcctggagacccggccatcttttctgcatcgttttgcaatttgtgaaacttaggacagcagccgcctgttcaaccgggccctccgccggatggctctgggaagtcaccgctgggcatggctgtgtcactagggctttgtggctgatgaataacagctgtcgtgtgctgtttctgggtggagatgtcccaggaaaccagtcctactctgccagccagtaggatggggatgcaggtcccgccagcaaggactggctgaaccgtgcgacccatgcagtagggcccttgggtcagctgtccccacccactacactgatggtgaatgaggccagaagacagggggctctgcgtgaagcccaccagcccctgccacgtgatggttggaacgcgtaccttagagcttccagttccgtcttaggacattttcaaagatgagcgtcctcaggaggggcggtggagggggcatgtctggagggacctgaggcacggggagcgctcggtgcccaggccgagcagtgccacacgtgcgcacgagttatgcctgcaaacacgggttacgcctgtgagaccagtgggctccttccagccgggctgcctgaggccactgtctgtgtgttggtgcccattgtgggctccggggcgctcttcccttgtgctgacgtgagtggagttgaattgccctgaatcagattagactgaaataaactgaattgaaaggcctac

SEQ ID NO: 12487 - protein, 87 aa, Homo sapiens
MHCIHFSKHRLRTVELLNPQMPGVCSSINAGGGRRTDDIGPLLQLGRLAVSRCKASASAVAASGHPPAQPFLETRPSFLHRFAICET

SEQ ID NO: 12488 - DNA, 884 bp, Homo sapiens
aggaaacgggcacagaagagatcagtgggatctgatgaacgcaggaggagggagacgcactgatgacatcgggccgctcctgcagctcgggcgcctcgcagtctccaggtgcaaggccagcgcttccgccgtggctgcttcaggacatcccccagcacagccgttcctggagacccggccatcttttctgcatcgttttgcaatttgtgaaacttaggacagcagccgcctgttcaaccgggccctccgccggatggctctgggaagtcaccgctgggcatggctgtgtcactagggctttgtggctgatgaataacagctgtcgtgtgctgtttctgggtggagatgtcccaggaaaccagtcctactctgccagccagtaggatggggatgcaggtcccgccagcaaggactggctgaaccgtgcgacccatgcagtagggcccttgggtcagctgtccccacccactacactgatggtgaatgaggccagaagacagggggctctgcgtgaagcccaccagcccctgccacgtgatggttggaacgcgtaccttagagcttccagttccgtcttaggacattttcaaagatgagcgtcctcaggaggggcggtggagggggcatgtctggagggacctgaggcacggggagcgctcggtgcccaggccgagcagtgccacacgtgcgcacgagttatgcctgcaaacacgggttacgcctgtgagaccagtgggctccttccagccgggctgcctgaggccactgtctgtgtgttggtgcccattgtgggctccggggcgctcttcccttgtgctgacgtgagtggagttgaattgccctgaatcagattagactgaaataaactgaattgaaaggcctac

SEQ ID NO: 12489 - protein, 60 aa, Homo sapiens
MNAGGGRRTDDIGPLLQLGRLAVSRCKASASAVAASGHPPAQPFLETRPSFLHRFAICET

SEQ ID NO: 12490 - DNA, 500 bp, Homo sapiens
cttctccagctttctggcaataccaaggggcagacccgggaatgggttgttcagtcactgctgtaccgcccatgagcggcagagggcagcaaaacacactcatcggacgggcatcaagggagcctgaggataaccagagcttgaaaatgcaatcaacccatgaaaatgtttttaaagaccatgattctgttcatcaaggagacatttaaagttataagaatcatctgaagtatgaatgaatatcgtaaggatttcaccaaatctatacagttcattccatcgtcaacatctaaaacaatgctgaaacagagcaagctttccagtcttactttacgagcaaaatcaagatctacatactacaactttcacttacgtttctccatctaacccatcctctctttcaataactgtaactgtttgattgaagactgcatcttggaatacattgccctgtttaagaaaataaaataatcagaaaaatctaaatgcaataaaggaag

SEQ ID NO: 12491 - protein, 55 aa, Homo sapiens
MGCSVTAVPPMSGRGQQNTLIGRASREPEDNQSLKMQSTHENVFKDHDSVHQGDI

SEQ ID NO: 12492 - DNA, 2570 bp, Homo sapiens
ataaagcttcaccaagaaggttgcccaggaaacgggcacagaagagatcagtgggatctgatgagtaaatgttcctttgtgcaacaattcggtctttacttaacctgccctaatatttttcggcctgatgggaattagtgcagagaagccatgtcaccatagaaggcaactcctacttgtgtgtggactgagcaatcagagtctgtggcgataatattgctgaaaatgcactgcattcatttttctaaagtaacaaatttggtttttttttaaaccattaaaatctatgtgtgtgcgtgtgtatgtatgtgagcagttggtcttaccagaatcattgttgaactacctgaaacaagtctttagaatactaaatataatgctgttgtctcttcctttttgacattttctgattttttcccccaaaactcagttaatatttacccactatgattattgatgtcctgccttgaacagttttaaagaaaacaatttttggaatagctcaaatttcaattgatggcacaaatcagcattttgttgttgttactgtattacaattagtattctaaaggcagaagcagaagtagctgctttttagcaatagaattgtttcagtattttgctgctgtttaatgcgcatcttcagaaaacttcccattactcctaatcaatgaagaaagtgagttggatatttttaaagcagttaactaattttttcttacctaatcttttgggagttttgcttgttgatataacctttttagttaacctgaaagattccaaaaattgttcttaagtgcttgagactggaaccaaaattaaattgtacttcataaaatcctcttatagagttactcttgccctagattgtaaattaagtttggcattattgtcagactggatggagggtgaagtaaaatagtatgaacaattaagaggctctccccctcttgtctttaagccatattctcctacatgtattttataagaaaatgttaagtcaaattttagtggctctttaattcctgacctcttcattctccttttcagtataacctcccctatgctcatgcccacacagacaaaaaaacaaaacgaaatacacacagaaaaaagtctttccaaactgtttaagtatttaaacatctgagccaaagcagatagaagttattgtataattgttaatcactttgcaaataggggctatcaaattacctatattggcattgctggattataaactctatatctgtaatataaagtgtttgagtttttaattgggctgttatgatcagtagttgattttgagaaagctctatgagctctaagtaactgcatggttttttgtttaatgtaatataggagacccttcacattcccaaggaatatattccaaaacatttttgtgaatatctaagtttgtgaaactactagggcatgatacagtaaggtgtaattacagaatttacgaaatgtaaatggcctctacagagttttatggaatacctggtactaacgtaggcagctgcaaaaccacactgagttacagctgtcagccctcctcattcctaaataacttgccttacatatcagccctcccacttctgaagttcaaattagtgcctcggaaatgtagaatttattatttgtcatttttttttttttagcatagattgagaacagttgaactcttaaatcctcagatgccaggggtctgctctagcatcagtaagtatttagcagaaactaactccgtaatgaatggaattcaattccacacatggtttgttcaagcacacttaataagtagcctattttttaaatgtctttttaaaatgtaaatatttggatgaagtttttctttgttttgatatattcatttgctacaccaactatgttttcagaattcatcttttgaacaacttggtttcagaatatgtaaaatgactttaaggatcttgtgtatcaaacctatccccggatgtgtgagaataatgtgttcataaagcatggatctcgctttggttgtatagcttcctcatttacttcatggtcttacatagctggtgactttcagggctaatctgccctctaaagcattgtcccaggagaggaaaaggaaatgggacctcagaagtagaagcctcagggaaggagtaaagtagaaatcagaagaaaagaagcttcacttgatagtaataaggtttttaacttcaagtaccttcagaaaatgtgattttgataagaggaaagggcaaatttagaccttaaaaaatatggaagaactactgccttaaaagtgcatttgtggcacatcagcctagaactgtatcatggctgtgctggggagaagtaaatggtggtaatgtaacattgccacctttacttaatgatgtgttattttcgaggtacagtagatcaatatagtaataggcgagcctcatatatagcattcatcttgtacaatgatatccatacccttgatatgaaggaaaattgacttggtttgtgcatttgaatactgaaataattttttaaaactcagtgacacataccatctcttgccaaga

SEQ ID NO: 12493 - protein, 62 aa, Homo sapiens
MASTEFYGIPGTNVGSCKTTLSYSCQPSSFLNNLPYISALPLLKFKLVPRKCRIYYLSFFFF

SEQ ID NO: 12494 - DNA, 3702 bp, Homo sapiens
ggatgaagagtaacgccattaccgccggagccgccgagagccttagccgacggaaactggacactggaccggcagcgccatgagactcctcccccgcttgctgctgcttctcttactcgtgttccctgccactgtcttgttccgaggcggccccagaggcttgttagcagtggcacaagatcttacagaggatgaagaaacagtagaagattccataattgaggatgaagatgatgaagccgaggtagaagaagatgaacccacagatttggttagtattttccagcaaataacattgtgaagttcctggtaggctttaccaacaagggtacagaagattttattgttgaatccttagatgcctcattccgttatcctcaggactaccagttttatatccagaatttcacagctcttcctctgaacactgtagtgccaccccagagacaggcaacttttgagtactctttcattcctgcagagcccatgggcggacgaccatttggtttggtcatcaatctgaactacaaagatttgaacggcaatgtattccaagatgcagtcttcaatcaaacagttacagttattgaaagagaggatgggttagatggagaaacaatctttatgtatatgttccttgctggtcttgggcttctggttattgttggccttcatcaactcctagaatctagaaagcgtaagagacccatacagaaagtagaaatgggtacatcaagtcagaatgatgttgacatgagttggattcctcaggaaacattgaatcaaatcaataaagcttcaccaagaaggttgcccaggaaacgggcacagaagagatcagtgggatctgatgagtaaatgttcctttgtgcaacaattcggtctttacttaacctgccctaatatttttcggcctgatgggaattagtgcagagaagccatgtcaccatagaaggcaactcctacttgtgtgtggactgagcaatcagagtctgtggcgataatattgctgaaaatgcactgcattcatttttctaaagtaacaaatttggtttttttttaaaccattaaaatctatgtgtgtgcgtgtgtatgtatgtgagcagttggtcttaccagaatcattgttgaactacctgaaacaagtctttagaatactaaatataatgctgttgtctcttcctttttgacattttctgattttttcccccaaaactcagttaatatttacccactatgattattgatgtcctgccttgaacagttttaaagaaaacaatttttggaatagctcaaatttcaattgatggcacaaatcagcattttgttgttgttactgtattacaattagtattctaaaggcagaagcagaagtagctgctttttagcaatagaattgtttcagtattttgctgctgtttaatgcgcatcttcagaaaacttcccagtggcttcaaggaatttggggatctctctggcaacaaattgtgaaacatgaaatttctgctgactttaatatatgaaacctaatcctacccccttttttaacaaaaagaaactagtacatttgtgaaaattgtgttgtgttgtccattgttgctctagttctgacccagaggtagctctggagtgattttagacctactcactcagttgtgtgtaggtttttttgttttgttttgagagagaatttttctctccttaatagaagcatcctttttaaagagaagttgccttggtccacacactaagcagaaaaccaagttatcaggacagagatatttcccagttactcctaatcaatgaagaaagtgagttggatatttttaaagcagttaactaattttttcttacctaatcttttgggagttttgcttgttgatataacctttttagttaacctgaaagattccaaaaattgttcttaagtgcttgagactggaaccaaaattaaattgtacttcataaaatcctcttatagagttactcttgccctagattgtaaattaagtttggcattattgtcagactggatggagggtgaagtaaaatagtatgaacaattaagaggctctccccctcttgtctttaagccatattctcctacatgtattttataagaaaatgttaagtcaaattttagtggctctttaattcctgacctcttcattctccttttcagtataacctcccctatgctcatgcccacacagacaaaaaaacaaaacgaaatacacacagaaaaaagtctttccaaactgtttaagtatttaaacatctgagccaaagcagatagaagttattgtataattgttaatcactttgcaaataggggctatcaaattacctatattggcattgctggattataaactctatatctgtaatataaagtgtttgagtttttaattgggctgttatgatcagtagttgattttgagaaagctctatgagctctaagtaactgcatggttttttgtttaatgtaatataggagacccttcacattcccaaggaatatattccaaaacatttttgtgaatatctaagtttgtgaaactactagggcatgatacagtaaggtgtaattacagaatttacgaaatgtaaatggcctctacagagttttatggaatacctggtactaacgtaggcagctgcaaaaccacactgagttacagctgtcagccctcctcattcctaaataacttgccttacatatcagccctcccacttctgaagttcaaattagtgcctcggaaatgtagaatttattatttgtcatttttttttttttagcatagattgagaacagttgaactcttaaatcctcagatgccaggggtctgctctagcatcagtaagtatttagcagaaactaactccgtaatgaatggaattcaattccacacatggtttgttcaagcacacttaataagtagcctattttttaaatgtctttttaaaatgtaaatatttggatgaagtttttctttgttttgatatattcatttgctacaccaactatgttttcagaattcatcttttgaacaacttggtttcagaatatgtaaaatgactttaaggatcttgtgtatcaaacctatccccggatgtgtgagaataatgtgttcataaagcatggatctcgctttggttgtatagcttcctcatttacttcatggtcttacatagctggtgactttcagggctaatctgccctctaaagcattgtcccaggagaggaaaaggaaatgggacctcagaagtagaagcctcagggaaggagtaaagtagaaatcagaagaaaagaagcttcacttgatagtaataaggtttttaacttcaagtaccttcagaaaatgtgattttgataagaggaaagggcaaatttagaccttaaaaaatatggaagaactactgccttaaaagtgcatttgtggcacatcagcctagaactgtatcatggctgtgctggggagaagtaaatggtggtaatgtaacattgccacctttacttaatgatgtgttattttcgaggtacagtagatcaatatagtaataggcgagcctcatatatagcattcatcttgtacaatgatatccatacccttgatatgaaggaaaattgacttggtttgtgcatttgaatactgaaataattttttaaaactcagtgacacataccatctcttgccaaga

SEQ ID NO: 12495 - protein, 123 aa, Homo sapiens [sequence omitted]

SEQ ID NO: 12496 - DNA, 3594 bp, Homo sapiens
gctgcccggagcccggatgaagagtaacgccattaccgccggagccgccgagagccttagccgacggaaactggacactggaccggcagcgccatgagactcctcccccgcttgctgctgcttctcttactcgtgttccctgccactgtcttgttccgaggcggccccagaggcttgttagcagtggcacaagatcttacagaggatgaagaaacagtagaagattccataattgaggatgaagatgatgaagccgaggtagaagaagatgaacccacagatttggtagaagataaagaggaagaagatgtgtctggtgaacctgaagcttcaccgagtgcagatacaactatactgtttgtaaaaggagaagagcccatgggcggacgaccatttggtttggtcatcaatctgaactacaaagatttgaacggcaatgtattccaagatgcagtcttcaatcaaacagttacagttattgaaagagaggatgggttagatggagaaacaatctttatgtatatgttccttgctggtcttgggcttctggttattgttggccttcatcaactcctagaatctagaaagcgtaagagacccatacagaaagtagaaatgggtacatcaagtcagaatgatgttgacatgagttggattcctcaggaaacattgaatcaaatcaataaagcttcaccaagaaggttgcccaggaaacgggcacagaagagatcagtgggatctgatgagtaaatgttcctttgtgcaacaattcggtctttacttaacctgccctaatatttttcggcctgatgggaattagtgcagagaagccatgtcaccatagaaggcaactcctacttgtgtgtggactgagcaatcagagtctgtggcgataatattgctgaaaatgcactgcattcatttttctaaagtaacaaatttggtttttttttaaaccattaaaatctatgtgtgtgcgtgtgtatgtatgtgagcagttggtcttaccagaatcattgttgaactacctgaaacaagtctttagaatactaaatataatgctgttgtctcttcctttttgacattttctgattttttcccccaaaactcagttaatatttacccactatgattattgatgtcctgccttgaacagttttaaagaaaacaatttttggaatagctcaaatttcaattgatggcacaaatcagcattttgttgttgttactgtattacaattagtattctaaaggcagaagcagaagtagctgctttttagcaatagaattgtttcagtattttgctgctgtttaatgcgcatcttcagaaaacttcccagtggcttcaaggaatttggggatctctctggcaacaaattgtgaaacatgaaatttctgctgactttaatatatgaaacctaatcctacccccttttttaacaaaaagaaactagtacatttgtgaaaattgtgttgtgttgtccattgttgctctagttctgacccagaggtagctctggagtgattttagacctactcactcagttgtgtgtaggtttttttgttttgttttgagagagaatttttctctccttaatagaagcatcctttttaaagagaagttgccttggtccacacactaagcagaaaaccaagttatcaggacagagatatttcccagttactcctaatcaatgaagaaagtgagttggatatttttaaagcagttaactaattttttcttacctaatcttttgggagttttgcttgttgatataacctttttagttaacctgaaagattccaaaaattgttcttaagtgcttgagactggaaccaaaattaaattgtacttcataaaatcctcttatagagttactcttgccctagattgtaaattaagtttggcattattgtcagactggatggagggtgaagtaaaatagtatgaacaattaagaggctctccccctcttgtctttaagccatattctcctacatgtattttataagaaaatgttaagtcaaattttagtggctctttaattcctgacctcttcattctccttttcagtataacctcccctatgctcatgcccacacagacaaaaaaacaaaacgaaatacacacagaaaaaagtctttccaaactgtttaagtatttaaacatctgagccaaagcagatagaagttattgtataattgttaatcactttgcaaataggggctatcaaattacctatattggcattgctggattataaactctatatctgtaatataaagtgtttgagtttttaattgggctgttatgatcagtagttgattttgagaaagctctatgagctctaagtaactgcatggttttttgtttaatgtaatataggagacccttcacattcccaaggaatatattccaaaacatttttgtgaatatctaagtttgtgaaactactagggcatgatacagtaaggtgtaattacagaatttacgaaatgtaaatggcctctacagagttttatggaatacctggtactaacgtaggcagctgcaaaaccacactgagttacagctgtcagccctcctcattcctaaataacttgccttacatatcagccctcccacttctgaagttcaaattagtgcctcggaaatgtagaatttattatttgtcatttttttttttttagcatagattgagaacagttgaactcttaaatcctcagatgccaggggtctgctctagcatcagtaagtatttagcagaaactaactccgtaatgaatggaattcaattccacacatggtttgttcaagcacacttaataagtagcctattttttaaatgtctttttaaaatgtaaatatttggatgaagtttttctttgttttgatatattcatttgctacaccaactatgttttcagaattcatcttttgaacaacttggtttcagaatatgtaaaatgactttaaggatcttgtgtatcaaacctatccccggatgtgtgagaataatgtgttcataaagcatggatctcgctttggttgtatagcttcctcatttacttcatggtcttacatagctggtgactttcagggctaatctgccctctaaagcattgtcccaggagaggaaaaggaaatgggacctcagaagtagaagcctcagggaaggagtaaagtagaaatcagaagaaaagaagcttcacttgatagtaataaggtttttaacttcaagtaccttcagaaaatgtgattttgataagaggaaagggcaaatttagaccttaaaaaatatggaagaactactgccttaaaagtgcatttgtggcacatcagcctagaactgtatcatggctgtgctggggagaagtaaatggtggtaatgtaacattgccacctttacttaatgatgtgttattttcgaggtacagtagatcaatatagtaataggcgagcctcatatatagcattcatcttgtacaatgatatccatacccttgatatgaaggaaaattgacttggtttgtgcatttgaatactgaaataattttttaaaactcagtgacacataccatctcttgccaaga

SEQ ID NO: 12497 - protein, 218 aa, Homo sapiens
MRLLPRLLLLLLLVFPATVLFRGGPRGLLAVAQDLTEDEETVEDSIIEDEDDEAEVEEDEPTDLVEDKEEEDVSGEPEASPSADTTILFVKGEEPMGGRPFGLVINLNYKDLNGNVFQDAVFNQTVTVIEREDGLDGETIFMYMFLAGLGLLVIVGLHQLLESRKRKRPIQKVEMGTSSQNDVDMSWIPQETLNQINKASPRRLPRKRAQKRSVGSDE

SEQ ID NO: 12498 - DNA, 3820 bp, Homo sapiens
gctctccccacctctccgcgctgagcagccacgtcggcggcggtccctggtccagggaggggcgtggcaaaggcccgtgcgcggtacgtgtcccgcccctcgctgcccggagcccggatgaagagtaacgccattaccgccggagccgccgagagccttagccgacggaaactggacactggaccggcagcgccatgagactcctcccccgcttgctgctgcttctcttactcgtgttccctgccactgtcttgttccgaggcggccccagaggcttgttagcagtggcacaagatcttacagaggatgaagaaacagtagaagattccataattgaggatgaagatgatgaagccgaggtagaagaagatgaacccacagatttggtagaagataaagaggaagaagatgtgtctggtgaacctgaagcttcaccgagtgcagatacaactatactgtttgtaaaaggagaagattttccagcaaataacattgtgaagttcctggtaggctttaccaacaagggtacagaagattttattgttgaatccttagatgcctcattccgttatcctcaggactaccagttttatatccagaatttcacagctcttcctctgaacactgtagtgccaccccagagacaggcaacttttgagtactctttcattcctgcagagcccatgggcggacgaccatttggtttggtcatcaatctgaactacaaagatttgaacggcaatgtattccaagatgcagtcttcaatcaaacagttacagttattgaaagagaggatgggttagatggagaaaccgtaagagacccatacagaaagtagaaatgggtacatcaagtcagaatgatgttgacatgagttggattcctcaggaaacattgaatcaaatcaataaagcttcaccaagaaggttgcccaggaaacgggcacagaagagatcagtgggatctgatgagtaaatgttcctttgtgcaacaattcggtctttacttaacctgccctaatatttttcggcctgatgggaattagtgcagagaagccatgtcaccatagaaggcaactcctacttgtgtgtggactgagcaatcagagtctgtggcgataatattgctgaaaatgcactgcattcatttttctaaagtaacaaatttggtttttttttaaaccattaaaatctatgtgtgtgcgtgtgtatgtatgtgagcagttggtcttaccagaatcattgttgaactacctgaaacaagtctttagaatactaaatataatgctgttgtctcttcctttttgacattttctgattttttcccccaaaactcagttaatatttacccactatgattattgatgtcctgccttgaacagttttaaagaaaacaatttttggaatagctcaaatttcaattgatggcacaaatcagcattttgttgttgttactgtattacaattagtattctaaaggcagaagcagaagtagctgctttttagcaatagaattgtttcagtattttgctgctgtttaatgcgcatcttcagaaaacttcccagtggcttcaaggaatttggggatctctctggcaacaaattgtgaaacatgaaatttctgctgactttaatatatgaaacctaatcctacccccttttttaacaaaaagaaactagtacatttgtgaaaattgtgttgtgttgtccattgttgctctagttctgacccagaggtagctctggagtgattttagacctactcactcagttgtgtgtaggtttttttgttttgttttgagagagaatttttctctccttaatagaagcatcctttttaaagagaagttgccttggtccacacactaagcagaaaaccaagttatcaggacagagatatttcccagttactcctaatcaatgaagaaagtgagttggatatttttaaagcagttaactaattttttcttacctaatcttttgggagttttgcttgttgatataacctttttagttaacctgaaagattccaaaaattgttcttaagtgcttgagactggaaccaaaattaaattgtacttcataaaatcctcttatagagttactcttgccctagattgtaaattaagtttggcattattgtcagactggatggagggtgaagtaaaatagtatgaacaattaagaggctctccccctcttgtctttaagccatattctcctacatgtattttataagaaaatgttaagtcaaattttagtggctctttaattcctgacctcttcattctccttttcagtataacctcccctatgctcatgcccacacagacaaaaaaacaaaacgaaatacacacagaaaaaagtctttccaaactgtttaagtatttaaacatctgagccaaagcagatagaagttattgtataattgttaatcactttgcaaataggggctatcaaattacctatattggcattgctggattataaactctatatctgtaatataaagtgtttgagtttttaattgggctgttatgatcagtagttgattttgagaaagctctatgagctctaagtaactgcatggttttttgtttaatgtaatataggagacccttcacattcccaaggaatatattccaaaacatttttgtgaatatctaagtttgtgaaactactagggcatgatacagtaaggtgtaattacagaatttacgaaatgtaaatggcctctacagagttttatggaatacctggtactaacgtaggcagctgcaaaaccacactgagttacagctgtcagccctcctcattcctaaataacttgccttacatatcagccctcccacttctgaagttcaaattagtgcctcggaaatgtagaatttattatttgtcatttttttttttttagcatagattgagaacagttgaactcttaaatcctcagatgccaggggtctgctctagcatcagtaagtatttagcagaaactaactccgtaatgaatggaattcaattccacacatggtttgttcaagcacacttaataagtagcctattttttaaatgtctttttaaaatgtaaatatttggatgaagtttttctttgttttgatatattcatttgctacaccaactatgttttcagaattcatcttttgaacaacttggtttcagaatatgtaaaatgactttaaggatcttgtgtatcaaacctatccccggatgtgtgagaataatgtgttcataaagcatggatctcgctttggttgtatagcttcctcatttacttcatggtcttacatagctggtgactttcagggctaatctgccctctaaagcattgtcccaggagaggaaaaggaaatgggacctcagaagtagaagcctcagggaaggagtaaagtagaaatcagaagaaaagaagcttcacttgatagtaataaggtttttaacttcaagtaccttcagaaaatgtgattttgataagaggaaagggcaaatttagaccttaaaaaatatggaagaactactgccttaaaagtgcatttgtggcacatcagcctagaactgtatcatggctgtgctggggagaagtaaatggtggtaatgtaacattgccacctttacttaatgatgtgttattttcgaggtacagtagatcaatatagtaataggcgagcctcatatatagcattcatcttgtacaatgatatccatacccttgatatgaaggaaaattgacttggtttgtgcatttgaatactgaaataattttttaaaactcagtgacacataccatctcttgccaaga

SEQ ID NO: 12499 - protein, 214 aa, Homo sapiens
MRLLPRLLLLLLLVFPATVLFRGGPRGLLAVAQDLTEDEETVEDSIIEDEDDEAEVEEDEPTDLVEDKEEEDVSGEPEASPSADTTILFVKGEDFPANNIVKFLVGFTNKGTEDFIVESLDASFRYPQDYQFYIQNFTALPLNTVVPPQRQATFEYSFIPAEPMGGRPFGLVINLNYKDLNGNVFQDAVFNQTVTVIEREDGLDGETVRDPYRK

SEQ ID NO: 12500 - DNA, 3899 bp, Homo sapiens
gctctccccacctctccgcgctgagcagccacgtcggcggcggtccctggtccagggaggggcgtggcaaaggcccgtgcgcggtacgtgtcccgcccctcgctgcccggagcccggatgaagagtaacgccattaccgccggagccgccgagagccttagccgacggaaactggacactggaccggcagcgccatgagactcctcccccgcttgctgctgcttctcttactcgtgttccctgccactgtcttgttccgaggcggccccagaggcttgttagcagtggcacaagatcttacagaggatgaagaaacagtagaagattccataattgaggatgaagatgatgaagccgaggtagaagaagatgaacccacagatttggtagaagataaagaggaagaagatgtgtctggtgaacctgaagcttcaccgagtgcagatacaactatactgtttgtaaaaggagaagattttccagcaaataacattgtgaagttcctggtaggctttaccaacaagggtacagaagattttattgttgaatccttagatgcctcattccgttatcctcaggactaccagttttatatccagaatttcacagctcttcctctgaacactgtagtgccaccccagagacaggcaacttttgagtactctttcattcctgcagagcccatgggcggacgaccatttggtttggtcatcaatctgaactacaaagatttgaacggcaatgtattccaagatgcagtcttcaatcaaacagttacagttattgaaagagaggatgggttagatggagaaacaatctttatgtatatgttccttgctggtcttgggcttctggttattgttggccttcatcaactcctagaatctagaaagcgtaagagacccatacagaaagtagaaatgggtacatcaagtcagaatgatgttgacatgagttggattcctcaggaaacattgaatcaaatcaataaagcttcaccaagaaggttgcccaggaaacgggcacagaagagatcagtgggatctgatgagtaaatgttcctttgtgcaacaattcggtctttacttaacctgccctaatatttttcggcctgatgggaattagtgcagagaagccatgtcaccatagaaggcaactcctacttgtgtgtggactgagcaatcagagtctgtggcgataatattgctgaaaatgcactgcattcatttttctaaagtaacaaatttggtttttttttaaaccattaaaatctatgtgtgtgcgtgtgtatgtatgtgagcagttggtcttaccagaatcattgttgaactacctgaaacaagtctttagaatactaaatataatgctgttgtctcttcctttttgacattttctgattttttcccccaaaactcagttaatatttacccactatgattattgatgtcctgccttgaacagttttaaagaaaacaatttttggaatagctcaaatttcaattgatggcacaaatcagcattttgttgttgttactgtattacaattagtattctaaaggcagaagcagaagtagctgctttttagcaatagaattgtttcagtattttgctgctgtttaatgcgcatcttcagaaaacttcccagtggcttcaaggaatttggggatctctctggcaacaaattgtgaaacatgaaatttctgctgactttaatatatgaaacctaatcctacccccttttttaacaaaaagaaactagtacatttgtgaaaattgtgttgtgttgtccattgttgctctagttctgacccagaggtagctctggagtgattttagacctactcactcagttgtgtgtaggtttttttgttttgttttgagagagaatttttctctccttaatagaagcatcctttttaaagagaagttgccttggtccacacactaagcagaaaaccaagttatcaggacagagatatttcccagttactcctaatcaatgaagaaagtgagttggatatttttaaagcagttaactaattttttcttacctaatcttttgggagttttgcttgttgatataacctttttagttaacctgaaagattccaaaaattgttcttaagtgcttgagactggaaccaaaattaaattgtacttcataaaatcctcttatagagttactcttgccctagattgtaaattaagtttggcattattgtcagactggatggagggtgaagtaaaatagtatgaacaattaagaggctctccccctcttgtctttaagccatattctcctacatgtattttataagaaaatgttaagtcaaattttagtggctctttaattcctgacctcttcattctccttttcagtataacctcccctatgctcatgcccacacagacaaaaaaacaaaacgaaatacacacagaaaaaagtctttccaaactgtttaagtatttaaacatctgagccaaagcagatagaagttattgtataattgttaatcactttgcaaataggggctatcaaattacctatattggcattgctggattataaactctatatctgtaatataaagtgtttgagtttttaattgggctgttatgatcagtagttgattttgagaaagctctatgagctctaagtaactgcatggttttttgtttaatgtaatataggagacccttcacattcccaaggaatatattccaaaacatttttgtgaatatctaagtttgtgaaactactagggcatgatacagtaaggtgtaattacagaatttacgaaatgtaaatggcctctacagagttttatggaatacctggtactaacgtaggcagctgcaaaaccacactgagttacagctgtcagccctcctcattcctaaataacttgccttacatatcagccctcccacttctgaagttcaaattagtgcctcggaaatgtagaatttattatttgtcatttttttttttttagcatagattgagaacagttgaactcttaaatcctcagatgccaggggtctgctctagcatcagtaagtatttagcagaaactaactccgtaatgaatggaattcaattccacacatggtttgttcaagcacacttaataagtagcctattttttaaatgtctttttaaaatgtaaatatttggatgaagtttttctttgttttgatatattcatttgctacaccaactatgttttcagaattcatcttttgaacaacttggtttcagaatatgtaaaatgactttaaggatcttgtgtatcaaacctatccccggatgtgtgagaataatgtgttcataaagcatggatctcgctttggttgtatagcttcctcatttacttcatggtcttacatagctggtgactttcagggctaatctgccctctaaagcattgtcccaggagaggaaaaggaaatgggacctcagaagtagaagcctcagggaaggagtaaagtagaaatcagaagaaaagaagcttcacttgatagtaataaggtttttaacttcaagtaccttcagaaaatgtgattttgataagaggaaagggcaaatttagaccttaaaaaatatggaagaactactgccttaaaagtgcatttgtggcacatcagcctagaactgtatcatggctgtgctggggagaagtaaatggtggtaatgtaacattgccacctttacttaatgatgtgttattttcgaggtacagtagatcaatatagtaataggcgagcctcatatatagcattcatcttgtacaatgatatccatacccttgatatgaaggaaaattgacttggtttgtgcatttgaatactgaaataattttttaaaactcagtgacacataccatctcttgccaaga

SEQ ID NO: 12501 - protein, 286 aa, Homo sapiens
MRLLPRLLLLLLLVFPATVLFRGGPRGLLAVAQDLTEDEETVEDSIIEDEDDEAEVEEDEPTDLVEDKEEEDVSGEPEASPSADTTILFVKGEDFPANNIVKFLVGFTNKGTEDFIVESLDASFRYPQDYQFYIQNFTALPLNTVVPPQRQATFEYSFIPAEPMGGRPFGLVINLNYKDLNGNVFQDAVFNQTVTVIEREDGLDGETIFMYMFLAGLGLLVIVGLHQLLESRKRKRPIQKVEMGTSSQNDVDMSWIPQETLNQINKASPRRLPRKRAQKRSVGSDE

SEQ ID NO: 12502 - DNA, 2029 bp, Homo sapiens
ataaagcttcaccaagaaggttgcccaggaaacgggcacagaagagatcagtgggatctgatgagtaaatgttcctttgtgcaacaattcggtctttacttaacctgccctaatatttttcggcctgatgggaattagtgcagagaagccatgtcaccatagaaggcaactcctacttgtgtgtggactgagcaatcagagtctgtggcgataatattgctgaaaatgcactgcattcatttttctaaagtaacaaatttggtttttttttaaaccattaaaatctatgtgtgtgcgtgtgtatgtatgtgagcagttggtcttaccagaatcattgttgaactacctgaaacaagtctttagaatactaaatataatgctgttgtctcttcctttttgacattttctgattttttcccccaaaactcagttaatatttacccactatgattattgatgtcctgccttgaacagttttaaagaaaacaatttttggaatagctcaaatttcaattgatggcacaaatcagcattttgttgttgttactgtattacaattagtattctaaaggcagaagcagaagtagctgctttttagcaatagaattgtttcagtattttgctgctgtttaatgcgcatcttcagaaaacttcccattactcctaatcaatgaagaaagtgagttggatatttttaaagcagttaactaattttttcttacctaatcttttgggagttttgcttgttgatataacctttttagttaacctgaaagattccaaaaattgttcttaagtgcttgagactggaaccaaaattaaattgtacttcataaaatcctcttatagagttactcttgccctagattgtaaattaagtttggcattattgtcagactggatggagggtgaagtaaaatagtatgaacaattaagaggctctccccctcttgtctttaagccatattctcctacatgtattttataagaaaatgttaagtcaaattttagtggctctttaattcctgacctcttcattctccttttcagtataacctcccctatgctcatgcccacacagacaaaaaaacaaaacgaaatacacacagaaaaaagtctttccaaactgtttaagtatttaaacatctgagccaaagcagatagaagttattgtataattgttaatcactttgcaaataggggctatcaaattacctatattggcattgctggattataaactctatatctgtaatataaagtgtttgagtttttaattgggctgttatgatcagtagttgattttgagaaagctctatgagctctaagtaactgcatggttttttgtttaatgtaatataggagacccttcacattcccaaggaatatattccaaaacatttttgtgaatatctaagtttgtgaaactactagggcatgatacagtaaggtgtaattacagaatttacgaaatgtaaatggcctctacagagttttatggaatacctggtactaacgtaggcagctgcaaaaccacactgagttacagctgtcagccctcctcattcctaaataacttgccttacatatcagccctcccacttctgaagttcaaattagtgcctcggaaatgtagaatttattatttgtcatttttttttttttagcatagattgagaacagttgaactcttaaatcctcagatgccaggggtctgctctagcatcagtaagtatttagcagaaactaactccgtaatgaatggaattcaattccacacatggtttgttcaagcacacttaataagtagcctattttttaaatgtctttttaaaatgtaaatatttggatgaagtttttctttgttttgatatattcatttgctacaccaactatgttttcagaattcatcttttgaacaacttggtttcagaatatgtaaaatgactttaaggatcttgtgtatcaaacctatccccggatgtgtgagaataatgtgttcataaagcatggatctcgctttggttgt

SEQ ID NO: 12503 - protein, 62 aa, Homo sapiens; identical to SEQ ID NO: 12493

SEQ ID NO: 12504 - DNA, 3161 bp, Homo sapiens
ggatgaagagtaacgccattaccgccggagccgccgagagccttagccgacggaaactggacactggaccggcagcgccatgagactcctcccccgcttgctgctgcttctcttactcgtgttccctgccactgtcttgttccgaggcggccccagaggcttgttagcagtggcacaagatcttacagaggatgaagaaacagtagaagattccataattgaggatgaagatgatgaagccgaggtagaagaagatgaacccacagatttggttagtattttccagcaaataacattgtgaagttcctggtaggctttaccaacaagggtacagaagattttattgttgaatccttagatgcctcattccgttatcctcaggactaccagttttatatccagaatttcacagctcttcctctgaacactgtagtgccaccccagagacaggcaacttttgagtactctttcattcctgcagagcccatgggcggacgaccatttggtttggtcatcaatctgaactacaaagatttgaacggcaatgtattccaagatgcagtcttcaatcaaacagttacagttattgaaagagaggatgggttagatggagaaacaatctttatgtatatgttccttgctggtcttgggcttctggttattgttggccttcatcaactcctagaatctagaaagcgtaagagacccatacagaaagtagaaatgggtacatcaagtcagaatgatgttgacatgagttggattcctcaggaaacattgaatcaaatcaataaagcttcaccaagaaggttgcccaggaaacgggcacagaagagatcagtgggatctgatgagtaaatgttcctttgtgcaacaattcggtctttacttaacctgccctaatatttttcggcctgatgggaattagtgcagagaagccatgtcaccatagaaggcaactcctacttgtgtgtggactgagcaatcagagtctgtggcgataatattgctgaaaatgcactgcattcatttttctaaagtaacaaatttggtttttttttaaaccattaaaatctatgtgtgtgcgtgtgtatgtatgtgagcagttggtcttaccagaatcattgttgaactacctgaaacaagtctttagaatactaaatataatgctgttgtctcttcctttttgacattttctgattttttcccccaaaactcagttaatatttacccactatgattattgatgtcctgccttgaacagttttaaagaaaacaatttttggaatagctcaaatttcaattgatggcacaaatcagcattttgttgttgttactgtattacaattagtattctaaaggcagaagcagaagtagctgctttttagcaatagaattgtttcagtattttgctgctgtttaatgcgcatcttcagaaaacttcccagtggcttcaaggaatttggggatctctctggcaacaaattgtgaaacatgaaatttctgctgactttaatatatgaaacctaatcctacccccttttttaacaaaaagaaactagtacatttgtgaaaattgtgttgtgttgtccattgttgctctagttctgacccagaggtagctctggagtgattttagacctactcactcagttgtgtgtaggtttttttgttttgttttgagagagaatttttctctccttaatagaagcatcctttttaaagagaagttgccttggtccacacactaagcagaaaaccaagttatcaggacagagatatttcccagttactcctaatcaatgaagaaagtgagttggatatttttaaagcagttaactaattttttcttacctaatcttttgggagttttgcttgttgatataacctttttagttaacctgaaagattccaaaaattgttcttaagtgcttgagactggaaccaaaattaaattgtacttcataaaatcctcttatagagttactcttgccctagattgtaaattaagtttggcattattgtcagactggatggagggtgaagtaaaatagtatgaacaattaagaggctctccccctcttgtctttaagccatattctcctacatgtattttataagaaaatgttaagtcaaattttagtggctctttaattcctgacctcttcattctccttttcagtataacctcccctatgctcatgcccacacagacaaaaaaacaaaacgaaatacacacagaaaaaagtctttccaaactgtttaagtatttaaacatctgagccaaagcagatagaagttattgtataattgttaatcactttgcaaataggggctatcaaattacctatattggcattgctggattataaactctatatctgtaatataaagtgtttgagtttttaattgggctgttatgatcagtagttgattttgagaaagctctatgagctctaagtaactgcatggttttttgtttaatgtaatataggagacccttcacattcccaaggaatatattccaaaacatttttgtgaatatctaagtttgtgaaactactagggcatgatacagtaaggtgtaattacagaatttacgaaatgtaaatggcctctacagagttttatggaatacctggtactaacgtaggcagctgcaaaaccacactgagttacagctgtcagccctcctcattcctaaataacttgccttacatatcagccctcccacttctgaagttcaaattagtgcctcggaaatgtagaatttattatttgtcatttttttttttttagcatagattgagaacagttgaactcttaaatcctcagatgccaggggtctgctctagcatcagtaagtatttagcagaaactaactccgtaatgaatggaattcaattccacacatggtttgttcaagcacacttaataagtagcctattttttaaatgtctttttaaaatgtaaatatttggatgaagtttttctttgttttgatatattcatttgctacaccaactatgttttcagaattcatcttttgaacaacttggtttcagaatatgtaaaatgactttaaggatcttgtgtatcaaacctatccccggatgtgtgagaataatgtgttcataaagcatggatctcgctttggttgt

SEQ ID NO: 12505 - protein, 123 aa, Homo sapiens [sequence omitted]

SEQ ID NO: 12506 - DNA, 3053 bp, Homo sapiens
gctgcccggagcccggatgaagagtaacgccattaccgccggagccgccgagagccttagccgacggaaactggacactggaccggcagcgccatgagactcctcccccgcttgctgctgcttctcttactcgtgttccctgccactgtcttgttccgaggcggccccagaggcttgttagcagtggcacaagatcttacagaggatgaagaaacagtagaagattccataattgaggatgaagatgatgaagccgaggtagaagaagatgaacccacagatttggtagaagataaagaggaagaagatgtgtctggtgaacctgaagcttcaccgagtgcagatacaactatactgtttgtaaaaggagaagagcccatgggcggacgaccatttggtttggtcatcaatctgaactacaaagatttgaacggcaatgtattccaagatgcagtcttcaatcaaacagttacagttattgaaagagaggatgggttagatggagaaacaatctttatgtatatgttccttgctggtcttgggcttctggttattgttggccttcatcaactcctagaatctagaaagcgtaagagacccatacagaaagtagaaatgggtacatcaagtcagaatgatgttgacatgagttggattcctcaggaaacattgaatcaaatcaataaagcttcaccaagaaggttgcccaggaaacgggcacagaagagatcagtgggatctgatgagtaaatgttcctttgtgcaacaattcggtctttacttaacctgccctaatatttttcggcctgatgggaattagtgcagagaagccatgtcaccatagaaggcaactcctacttgtgtgtggactgagcaatcagagtctgtggcgataatattgctgaaaatgcactgcattcatttttctaaagtaacaaatttggtttttttttaaaccattaaaatctatgtgtgtgcgtgtgtatgtatgtgagcagttggtcttaccagaatcattgttgaactacctgaaacaagtctttagaatactaaatataatgctgttgtctcttcctttttgacattttctgattttttcccccaaaactcagttaatatttacccactatgattattgatgtcctgccttgaacagttttaaagaaaacaatttttggaatagctcaaatttcaattgatggcacaaatcagcattttgttgttgttactgtattacaattagtattctaaaggcagaagcagaagtagctgctttttagcaatagaattgtttcagtattttgctgctgtttaatgcgcatcttcagaaaacttcccagtggcttcaaggaatttggggatctctctggcaacaaattgtgaaacatgaaatttctgctgactttaatatatgaaacctaatcctacccccttttttaacaaaaagaaactagtacatttgtgaaaattgtgttgtgttgtccattgttgctctagttctgacccagaggtagctctggagtgattttagacctactcactcagttgtgtgtaggtttttttgttttgttttgagagagaatttttctctccttaatagaagcatcctttttaaagagaagttgccttggtccacacactaagcagaaaaccaagttatcaggacagagatatttcccagttactcctaatcaatgaagaaagtgagttggatatttttaaagcagttaactaattttttcttacctaatcttttgggagttttgcttgttgatataacctttttagttaacctgaaagattccaaaaattgttcttaagtgcttgagactggaaccaaaattaaattgtacttcataaaatcctcttatagagttactcttgccctagattgtaaattaagtttggcattattgtcagactggatggagggtgaagtaaaatagtatgaacaattaagaggctctccccctcttgtctttaagccatattctcctacatgtattttataagaaaatgttaagtcaaattttagtggctctttaattcctgacctcttcattctccttttcagtataacctcccctatgctcatgcccacacagacaaaaaaacaaaacgaaatacacacagaaaaaagtctttccaaactgtttaagtatttaaacatctgagccaaagcagatagaagttattgtataattgttaatcactttgcaaataggggctatcaaattacctatattggcattgctggattataaactctatatctgtaatataaagtgtttgagtttttaattgggctgttatgatcagtagttgattttgagaaagctctatgagctctaagtaactgcatggttttttgtttaatgtaatataggagacccttcacattcccaaggaatatattccaaaacatttttgtgaatatctaagtttgtgaaactactagggcatgatacagtaaggtgtaattacagaatttacgaaatgtaaatggcctctacagagttttatggaatacctggtactaacgtaggcagctgcaaaaccacactgagttacagctgtcagccctcctcattcctaaataacttgccttacatatcagccctcccacttctgaagttcaaattagtgcctcggaaatgtagaatttattatttgtcatttttttttttttagcatagattgagaacagttgaactcttaaatcctcagatgccaggggtctgctctagcatcagtaagtatttagcagaaactaactccgtaatgaatggaattcaattccacacatggtttgttcaagcacacttaataagtagcctattttttaaatgtctttttaaaatgtaaatatttggatgaagtttttctttgttttgatatattcatttgctacaccaactatgttttcagaattcatcttttgaacaacttggtttcagaatatgtaaaatgactttaaggatcttgtgtatcaaacctatccccggatgtgtgagaataatgtgttcataaagcatggatctcgctttggttgt

SEQ ID NO: 12507 - protein, 218 aa, Homo sapiens; identical to SEQ ID NO: 12497

SEQ ID NO: 12508 - DNA, 3279 bp, Homo sapiens
gctctccccacctctccgcgctgagcagccacgtcggcggcggtccctggtccagggaggggcgtggcaaaggcccgtgcgcggtacgtgtcccgcccctcgctgcccggagcccggatgaagagtaacgccattaccgccggagccgccgagagccttagccgacggaaactggacactggaccggcagcgccatgagactcctcccccgcttgctgctgcttctcttactcgtgttccctgccactgtcttgttccgaggcggccccagaggcttgttagcagtggcacaagatcttacagaggatgaagaaacagtagaagattccataattgaggatgaagatgatgaagccgaggtagaagaagatgaacccacagatttggtagaagataaagaggaagaagatgtgtctggtgaacctgaagcttcaccgagtgcagatacaactatactgtttgtaaaaggagaagattttccagcaaataacattgtgaagttcctggtaggctttaccaacaagggtacagaagattttattgttgaatccttagatgcctcattccgttatcctcaggactaccagttttatatccagaatttcacagctcttcctctgaacactgtagtgccaccccagagacaggcaacttttgagtactctttcattcctgcagagcccatgggcggacgaccatttggtttggtcatcaatctgaactacaaagatttgaacggcaatgtattccaagatgcagtcttcaatcaaacagttacagttattgaaagagaggatgggttagatggagaaaccgtaagagacccatacagaaagtagaaatgggtacatcaagtcagaatgatgttgacatgagttggattcctcaggaaacattgaatcaaatcaataaagcttcaccaagaaggttgcccaggaaacgggcacagaagagatcagtgggatctgatgagtaaatgttcctttgtgcaacaattcggtctttacttaacctgccctaatatttttcggcctgatgggaattagtgcagagaagccatgtcaccatagaaggcaactcctacttgtgtgtggactgagcaatcagagtctgtggcgataatattgctgaaaatgcactgcattcatttttctaaagtaacaaatttggtttttttttaaaccattaaaatctatgtgtgtgcgtgtgtatgtatgtgagcagttggtcttaccagaatcattgttgaactacctgaaacaagtctttagaatactaaatataatgctgttgtctcttcctttttgacattttctgattttttcccccaaaactcagttaatatttacccactatgattattgatgtcctgccttgaacagttttaaagaaaacaatttttggaatagctcaaatttcaattgatggcacaaatcagcattttgttgttgttactgtattacaattagtattctaaaggcagaagcagaagtagctgctttttagcaatagaattgtttcagtattttgctgctgtttaatgcgcatcttcagaaaacttcccagtggcttcaaggaatttggggatctctctggcaacaaattgtgaaacatgaaatttctgctgactttaatatatgaaacctaatcctacccccttttttaacaaaaagaaactagtacatttgtgaaaattgtgttgtgttgtccattgttgctctagttctgacccagaggtagctctggagtgattttagacctactcactcagttgtgtgtaggtttttttgttttgttttgagagagaatttttctctccttaatagaagcatcctttttaaagagaagttgccttggtccacacactaagcagaaaaccaagttatcaggacagagatatttcccagttactcctaatcaatgaagaaagtgagttggatatttttaaagcagttaactaattttttcttacctaatcttttgggagttttgcttgttgatataacctttttagttaacctgaaagattccaaaaattgttcttaagtgcttgagactggaaccaaaattaaattgtacttcataaaatcctcttatagagttactcttgccctagattgtaaattaagtttggcattattgtcagactggatggagggtgaagtaaaatagtatgaacaattaagaggctctccccctcttgtctttaagccatattctcctacatgtattttataagaaaatgttaagtcaaattttagtggctctttaattcctgacctcttcattctccttttcagtataacctcccctatgctcatgcccacacagacaaaaaaacaaaacgaaatacacacagaaaaaagtctttccaaactgtttaagtatttaaacatctgagccaaagcagatagaagttattgtataattgttaatcactttgcaaataggggctatcaaattacctatattggcattgctggattataaactctatatctgtaatataaagtgtttgagtttttaattgggctgttatgatcagtagttgattttgagaaagctctatgagctctaagtaactgcatggttttttgtttaatgtaatataggagacccttcacattcccaaggaatatattccaaaacatttttgtgaatatctaagtttgtgaaactactagggcatgatacagtaaggtgtaattacagaatttacgaaatgtaaatggcctctacagagttttatggaatacctggtactaacgtaggcagctgcaaaaccacactgagttacagctgtcagccctcctcattcctaaataacttgccttacatatcagccctcccacttctgaagttcaaattagtgcctcggaaatgtagaatttattatttgtcatttttttttttttagcatagattgagaacagttgaactcttaaatcctcagatgccaggggtctgctctagcatcagtaagtatttagcagaaactaactccgtaatgaatggaattcaattccacacatggtttgttcaagcacacttaataagtagcctattttttaaatgtctttttaaaatgtaaatatttggatgaagtttttctttgttttgatatattcatttgctacaccaactatgttttcagaattcatcttttgaacaacttggtttcagaatatgtaaaatgactttaaggatcttgtgtatcaaacctatccccggatgtgtgagaataatgtgttcataaagcatggatctcgctttggttgt

SEQ ID NO: 12509 - protein, 214 aa, Homo sapiens; identical to SEQ ID NO: 12499

SEQ ID NO: 12510 - DNA, 3358 bp, Homo sapiens
gctctccccacctctccgcgctgagcagccacgtcggcggcggtccctggtccagggaggggcgtggcaaaggcccgtgcgcggtacgtgtcccgcccctcgctgcccggagcccggatgaagagtaacgccattaccgccggagccgccgagagccttagccgacggaaactggacactggaccggcagcgccatgagactcctcccccgcttgctgctgcttctcttactcgtgttccctgccactgtcttgttccgaggcggccccagaggcttgttagcagtggcacaagatcttacagaggatgaagaaacagtagaagattccataattgaggatgaagatgatgaagccgaggtagaagaagatgaacccacagatttggtagaagataaagaggaagaagatgtgtctggtgaacctgaagcttcaccgagtgcagatacaactatactgtttgtaaaaggagaagattttccagcaaataacattgtgaagttcctggtaggctttaccaacaagggtacagaagattttattgttgaatccttagatgcctcattccgttatcctcaggactaccagttttatatccagaatttcacagctcttcctctgaacactgtagtgccaccccagagacaggcaacttttgagtactctttcattcctgcagagcccatgggcggacgaccatttggtttggtcatcaatctgaactacaaagatttgaacggcaatgtattccaagatgcagtcttcaatcaaacagttacagttattgaaagagaggatgggttagatggagaaacaatctttatgtatatgttccttgctggtcttgggcttctggttattgttggccttcatcaactcctagaatctagaaagcgtaagagacccatacagaaagtagaaatgggtacatcaagtcagaatgatgttgacatgagttggattcctcaggaaacattgaatcaaatcaataaagcttcaccaagaaggttgcccaggaaacgggcacagaagagatcagtgggatctgatgagtaaatgttcctttgtgcaacaattcggtctttacttaacctgccctaatatttttcggcctgatgggaattagtgcagagaagccatgtcaccatagaaggcaactcctacttgtgtgtggactgagcaatcagagtctgtggcgataatattgctgaaaatgcactgcattcatttttctaaagtaacaaatttggtttttttttaaaccattaaaatctatgtgtgtgcgtgtgtatgtatgtgagcagttggtcttaccagaatcattgttgaactacctgaaacaagtctttagaatactaaatataatgctgttgtctcttcctttttgacattttctgattttttcccccaaaactcagttaatatttacccactatgattattgatgtcctgccttgaacagttttaaagaaaacaatttttggaatagctcaaatttcaattgatggcacaaatcagcattttgttgttgttactgtattacaattagtattctaaaggcagaagcagaagtagctgctttttagcaatagaattgtttcagtattttgctgctgtttaatgcgcatcttcagaaaacttcccagtggcttcaaggaatttggggatctctctggcaacaaattgtgaaacatgaaatttctgctgactttaatatatgaaacctaatcctacccccttttttaacaaaaagaaactagtacatttgtgaaaattgtgttgtgttgtccattgttgctctagttctgacccagaggtagctctggagtgattttagacctactcactcagttgtgtgtaggtttttttgttttgttttgagagagaatttttctctccttaatagaagcatcctttttaaagagaagttgccttggtccacacactaagcagaaaaccaagttatcaggacagagatatttcccagttactcctaatcaatgaagaaagtgagttggatatttttaaagcagttaactaattttttcttacctaatcttttgggagttttgcttgttgatataacctttttagttaacctgaaagattccaaaaattgttcttaagtgcttgagactggaaccaaaattaaattgtacttcataaaatcctcttatagagttactcttgccctagattgtaaattaagtttggcattattgtcagactggatggagggtgaagtaaaatagtatgaacaattaagaggctctccccctcttgtctttaagccatattctcctacatgtattttataagaaaatgttaagtcaaattttagtggctctttaattcctgacctcttcattctccttttcagtataacctcccctatgctcatgcccacacagacaaaaaaacaaaacgaaatacacacagaaaaaagtctttccaaactgtttaagtatttaaacatctgagccaaagcagatagaagttattgtataattgttaatcactttgcaaataggggctatcaaattacctatattggcattgctggattataaactctatatctgtaatataaagtgtttgagtttttaattgggctgttatgatcagtagttgattttgagaaagctctatgagctctaagtaactgcatggttttttgtttaatgtaatataggagacccttcacattcccaaggaatatattccaaaacatttttgtgaatatctaagtttgtgaaactactagggcatgatacagtaaggtgtaattacagaatttacgaaatgtaaatggcctctacagagttttatggaatacctggtactaacgtaggcagctgcaaaaccacactgagttacagctgtcagccctcctcattcctaaataacttgccttacatatcagccctcccacttctgaagttcaaattagtgcctcggaaatgtagaatttattatttgtcatttttttttttttagcatagattgagaacagttgaactcttaaatcctcagatgccaggggtctgctctagcatcagtaagtatttagcagaaactaactccgtaatgaatggaattcaattccacacatggtttgttcaagcacacttaataagtagcctattttttaaatgtctttttaaaatgtaaatatttggatgaagtttttctttgttttgatatattcatttgctacaccaactatgttttcagaattcatcttttgaacaacttggtttcagaatatgtaaaatgactttaaggatcttgtgtatcaaacctatccccggatgtgtgagaataatgtgttcataaagcatggatctcgctttggttgt

SEQ ID NO: 12511 - protein, 286 aa, Homo sapiens; identical to SEQ ID NO: 12501

SEQ ID NO: 12512 - DNA, 2277 bp, Homo sapiens
gctgcccggagcccggatgaagagtaacgccattaccgccggagccgccgagagccttagccgacggaaactggacactggaccggcagcgccatgagactcctcccccgcttgctgctgcttctcttactcgtgttccctgccactgtcttgttccgaggcggccccagaggcttgttagcagtggcacaagatcttacagaggatgaagaaacagtagaagattccataattgaggatgaagatgatgaagccgaggtagaagaagatgaacccacagatttggtagaagataaagaggaagaagatgtgtctggtgaacctgaagcttcaccgagtgcagatacaactatactgtttgtaaaaggagaagagcccatgggcggacgaccatttggtttggtcatcaatctgaactacaaagatttgaacggcaatgtattccaagatgcagtcttcaatcaaacagttacagttattgaaagagaggatgggttagatggagaaacaatctttatgtatatgttccttgctggtcttgggcttctggttattgttggccttcatcaactcctagaatctagaaagcgtaagagacccatacagaaagtagaaatgggtacatcaagtcagaatgatgttgacatgagttggattcctcaggaaacattgaatcaaatcaataaagcttcaccaagaaggttgcccaggaaacgggcacagaagagatcagtgggatctgatgagtaaatgttcctttgtgcaacaattcggtctttacttaacctgccctaatatttttcggcctgatgggaattagtgcagagaagccatgtcaccatagaaggcaactcctacttgtgtgtggactgagcaatcagagtctgtggcgataatattgctgaaaatgcactgcattcatttttctaaagtaacaaatttggtttttttttaaaccattaaaatctatgtgtgtgcgtgtgtatgtatgtgagcagttggtcttaccagaatcattgttgaactacctgaaacaagtctttagaatactaaatataatgctgttgtctcttcctttttgacattttctgattttttcccccaaaactcagttaatatttacccactatgattattgatgtcctgccttgaacagttttaaagaaaacaatttttggaatagctcaaatttcaattgatggcacaaatcagcattttgttgttgttactgtattacaattagtattctaaaggcagaagcagaagtagctgctttttagcaatagaattgtttcagtattttgctgctgtttaatgcgcatcttcagaaaacttcccagtggcttcaaggaatttggggatctctctggcaacaaattgtgaaacatgaaatttctgctgactttaatatatgaaacctaatcctacccccttttttaacaaaaagaaactagtacatttgtgaaaattgtgttgtgttgtccattgttgctctagttctgacccagaggtagctctggagtgattttagacctactcactcagttgtgtgtaggtttttttgttttgttttgagagagaatttttctctccttaatagaagcatcctttttaaagagaagttgccttggtccacacactaagcagaaaaccaagttatcaggacagagatatttcccagttactcctaatcaatgaagaaagtgagttggatatttttaaagcagttaactaattttttcttacctaatcttttgggagttttgcttgttgatataacctttttagttaacctgaaagattccaaaaattgttcttaagtgcttgagactggaaccaaaattaaattgtacttcataaaatcctcttatagagttactcttgccctagattgtaaattaagtttggcattattgtcagactggatggagggtgaagtaaaatagtatgaacaattaagaggctctccccctcttgtctttaagccatattctcctacatgtattttataagaaaatgttaagtcaaattttagtggctctttaattcctgacctcttcattctccttttcagtataacctcccctatgctcatgcccacacagacaaaaaaacaaaacgaaatacacacagaaaaaagtctttccaaactgtttaagtatttaaacatctgagccaaagcagatagaagttattgtataattgttaatcactttgcaaataggggctatcaaattacctatattggcattgctggattataaactctatatctgt

SEQ ID NO: 12513 - protein, 218 aa, Homo sapiens; identical to SEQ ID NO: 12497

SEQ ID NO: 12514 - DNA, 2503 bp, Homo sapiens
gctctccccacctctccgcgctgagcagccacgtcggcggcggtccctggtccagggaggggcgtggcaaaggcccgtgcgcggtacgtgtcccgcccctcgctgcccggagcccggatgaagagtaacgccattaccgccggagccgccgagagccttagccgacggaaactggacactggaccggcagcgccatgagactcctcccccgcttgctgctgcttctcttactcgtgttccctgccactgtcttgttccgaggcggccccagaggcttgttagcagtggcacaagatcttacagaggatgaagaaacagtagaagattccataattgaggatgaagatgatgaagccgaggtagaagaagatgaacccacagatttggtagaagataaagaggaagaagatgtgtctggtgaacctgaagcttcaccgagtgcagatacaactatactgtttgtaaaaggagaagattttccagcaaataacattgtgaagttcctggtaggctttaccaacaagggtacagaagattttattgttgaatccttagatgcctcattccgttatcctcaggactaccagttttatatccagaatttcacagctcttcctctgaacactgtagtgccaccccagagacaggcaacttttgagtactctttcattcctgcagagcccatgggcggacgaccatttggtttggtcatcaatctgaactacaaagatttgaacggcaatgtattccaagatgcagtcttcaatcaaacagttacagttattgaaagagaggatgggttagatggagaaaccgtaagagacccatacagaaagtagaaatgggtacatcaagtcagaatgatgttgacatgagttggattcctcaggaaacattgaatcaaatcaataaagcttcaccaagaaggttgcccaggaaacgggcacagaagagatcagtgggatctgatgagtaaatgttcctttgtgcaacaattcggtctttacttaacctgccctaatatttttcggcctgatgggaattagtgcagagaagccatgtcaccatagaaggcaactcctacttgtgtgtggactgagcaatcagagtctgtggcgataatattgctgaaaatgcactgcattcatttttctaaagtaacaaatttggtttttttttaaaccattaaaatctatgtgtgtgcgtgtgtatgtatgtgagcagttggtcttaccagaatcattgttgaactacctgaaacaagtctttagaatactaaatataatgctgttgtctcttcctttttgacattttctgattttttcccccaaaactcagttaatatttacccactatgattattgatgtcctgccttgaacagttttaaagaaaacaatttttggaatagctcaaatttcaattgatggcacaaatcagcattttgttgttgttactgtattacaattagtattctaaaggcagaagcagaagtagctgctttttagcaatagaattgtttcagtattttgctgctgtttaatgcgcatcttcagaaaacttcccagtggcttcaaggaatttggggatctctctggcaacaaattgtgaaacatgaaatttctgctgactttaatatatgaaacctaatcctacccccttttttaacaaaaagaaactagtacatttgtgaaaattgtgttgtgttgtccattgttgctctagttctgacccagaggtagctctggagtgattttagacctactcactcagttgtgtgtaggtttttttgttttgttttgagagagaatttttctctccttaatagaagcatcctttttaaagagaagttgccttggtccacacactaagcagaaaaccaagttatcaggacagagatatttcccagttactcctaatcaatgaagaaagtgagttggatatttttaaagcagttaactaattttttcttacctaatcttttgggagttttgcttgttgatataacctttttagttaacctgaaagattccaaaaattgttcttaagtgcttgagactggaaccaaaattaaattgtacttcataaaatcctcttatagagttactcttgccctagattgtaaattaagtttggcattattgtcagactggatggagggtgaagtaaaatagtatgaacaattaagaggctctccccctcttgtctttaagccatattctcctacatgtattttataagaaaatgttaagtcaaattttagtggctctttaattcctgacctcttcattctccttttcagtataacctcccctatgctcatgcccacacagacaaaaaaacaaaacgaaatacacacagaaaaaagtctttccaaactgtttaagtatttaaacatctgagccaaagcagatagaagttattgtataattgttaatcactttgcaaataggggctatcaaattacctatattggcattgctggattataaactctatatctgt

SEQ ID NO: 12515 - protein, 214 aa, Homo sapiens; identical to SEQ ID NO: 12499

SEQ ID NO: 12516 - DNA, 2582 bp, Homo sapiens
gctctccccacctctccgcgctgagcagccacgtcggcggcggtccctggtccagggaggggcgtggcaaaggcccgtgcgcggtacgtgtcccgcccctcgctgcccggagcccggatgaagagtaacgccattaccgccggagccgccgagagccttagccgacggaaactggacactggaccggcagcgccatgagactcctcccccgcttgctgctgcttctcttactcgtgttccctgccactgtcttgttccgaggcggccccagaggcttgttagcagtggcacaagatcttacagaggatgaagaaacagtagaagattccataattgaggatgaagatgatgaagccgaggtagaagaagatgaacccacagatttggtagaagataaagaggaagaagatgtgtctggtgaacctgaagcttcaccgagtgcagatacaactatactgtttgtaaaaggagaagattttccagcaaataacattgtgaagttcctggtaggctttaccaacaagggtacagaagattttattgttgaatccttagatgcctcattccgttatcctcaggactaccagttttatatccagaatttcacagctcttcctctgaacactgtagtgccaccccagagacaggcaacttttgagtactctttcattcctgcagagcccatgggcggacgaccatttggtttggtcatcaatctgaactacaaagatttgaacggcaatgtattccaagatgcagtcttcaatcaaacagttacagttattgaaagagaggatgggttagatggagaaacaatctttatgtatatgttccttgctggtcttgggcttctggttattgttggccttcatcaactcctagaatctagaaagcgtaagagacccatacagaaagtagaaatgggtacatcaagtcagaatgatgttgacatgagttggattcctcaggaaacattgaatcaaatcaataaagcttcaccaagaaggttgcccaggaaacgggcacagaagagatcagtgggatctgatgagtaaatgttcctttgtgcaacaattcggtctttacttaacctgccctaatatttttcggcctgatgggaattagtgcagagaagccatgtcaccatagaaggcaactcctacttgtgtgtggactgagcaatcagagtctgtggcgataatattgctgaaaatgcactgcattcatttttctaaagtaacaaatttggtttttttttaaaccattaaaatctatgtgtgtgcgtgtgtatgtatgtgagcagttggtcttaccagaatcattgttgaactacctgaaacaagtctttagaatactaaatataatgctgttgtctcttcctttttgacattttctgattttttcccccaaaactcagttaatatttacccactatgattattgatgtcctgccttgaacagttttaaagaaaacaatttttggaatagctcaaatttcaattgatggcacaaatcagcattttgttgttgttactgtattacaattagtattctaaaggcagaagcagaagtagctgctttttagcaatagaattgtttcagtattttgctgctgtttaatgcgcatcttcagaaaacttcccagtggcttcaaggaatttggggatctctctggcaacaaattgtgaaacatgaaatttctgctgactttaatatatgaaacctaatcctacccccttttttaacaaaaagaaactagtacatttgtgaaaattgtgttgtgttgtccattgttgctctagttctgacccagaggtagctctggagtgattttagacctactcactcagttgtgtgtaggtttttttgttttgttttgagagagaatttttctctccttaatagaagcatcctttttaaagagaagttgccttggtccacacactaagcagaaaaccaagttatcaggacagagatatttcccagttactcctaatcaatgaagaaagtgagttggatatttttaaagcagttaactaattttttcttacctaatcttttgggagttttgcttgttgatataacctttttagttaacctgaaagattccaaaaattgttcttaagtgcttgagactggaaccaaaattaaattgtacttcataaaatcctcttatagagttactcttgccctagattgtaaattaagtttggcattattgtcagactggatggagggtgaagtaaaatagtatgaacaattaagaggctctccccctcttgtctttaagccatattctcctacatgtattttataagaaaatgttaagtcaaattttagtggctctttaattcctgacctcttcattctccttttcagtataacctcccctatgctcatgcccacacagacaaaaaaacaaaacgaaatacacacagaaaaaagtctttccaaactgtttaagtatttaaacatctgagccaaagcagatagaagttattgtataattgttaatcactttgcaaataggggctatcaaattacctatattggcattgctggattataaactctatatctgt

SEQ ID NO: 12517 - protein, 286 aa, Homo sapiens; identical to SEQ ID NO: 12501

SEQ ID NO: 12518 - DNA, 559 bp, Homo sapiens
caagtcatcctcccacctcagcttcctgagtagtcgaactacaggtgcacgccaccacacccagctaatttttcgtaagagacccatacagaaagtagaaatgggtacatcaagtcagaatgatgttgacatgagttggattcctcaggaaacattgaatcaaatcaataaagcttcaccaagaaggttgcccaggaaacgggcacagaagagatcagtgggatctgatgagtaaatgttcctttgtgcaacaattcggtctttacttaacctgccctaatatttttcggcctgatgggaattagtgcagagaagccatgtcaccatagaaggcaactcctacttgtgtgtggactgagcaatcagagtctgtggcgataatattgctgaaaatgcactgcattcatttttctaaagtaacaaatttggtttttttttaaaccattaaaatctatgtgtgtgcgtgtgtatgtatgtgagcagttggtcttaccagaatcattgttgaactacctgaaacaagtctttagaatactaaatataatgctgttgtctcttc

SEQ ID NO: 12519 - protein, 44 aa, Homo sapiens
MGTSSQNDVDMSWIPQETLNQINKASPRRLPRKRAQKRSVGSDE

SEQ ID NO: 12520 - DNA, 1074 bp, Homo sapiens
gctgcccggagcccggatgaagagtaacgccattaccgccggagccgccgagagccttagccgacggaaactggacactggaccggcagcgccatgagactcctcccccgcttgctgctgcttctcttactcgtgttccctgccactgtcttgttccgaggcggccccagaggcttgttagcagtggcacaagatcttacagaggatgaagaaacagtagaagattccataattgaggatgaagatgatgaagccgaggtagaagaagatgaacccacagatttggtagaagataaagaggaagaagatgtgtctggtgaacctgaagcttcaccgagtgcagatacaactatactgtttgtaaaaggagaagagcccatgggcggacgaccatttggtttggtcatcaatctgaactacaaagatttgaacggcaatgtattccaagatgcagtcttcaatcaaacagttacagttattgaaagagaggatgggttagatggagaaacaatctttatgtatatgttccttgctggtcttgggcttctggttattgttggccttcatcaactcctagaatctagaaagcgtaagagacccatacagaaagtagaaatgggtacatcaagtcagaatgatgttgacatgagttggattcctcaggaaacattgaatcaaatcaataaagcttcaccaagaaggttgcccaggaaacgggcacagaagagatcagtgggatctgatgagtaaatgttcctttgtgcaacaattcggtctttacttaacctgccctaatatttttcggcctgatgggaattagtgcagagaagccatgtcaccatagaaggcaactcctacttgtgtgtggactgagcaatcagagtctgtggcgataatattgctgaaaatgcactgcattcatttttctaaagtaacaaatttggtttttttttaaaccattaaaatctatgtgtgtgcgtgtgtatgtatgtgagcagttggtcttaccagaatcattgttgaactacctgaaacaagtctttagaatactaaatataatgctgttgtctcttc

SEQ ID NO: 12521 - protein, 218 aa, Homo sapiens; identical to SEQ ID NO: 12497

SEQ ID NO: 12522 - DNA, 1300 bp, Homo sapiens
gctctccccacctctccgcgctgagcagccacgtcggcggcggtccctggtccagggaggggcgtggcaaaggcccgtgcgcggtacgtgtcccgcccctcgctgcccggagcccggatgaagagtaacgccattaccgccggagccgccgagagccttagccgacggaaactggacactggaccggcagcgccatgagactcctcccccgcttgctgctgcttctcttactcgtgttccctgccactgtcttgttccgaggcggccccagaggcttgttagcagtggcacaagatcttacagaggatgaagaaacagtagaagattccataattgaggatgaagatgatgaagccgaggtagaagaagatgaacccacagatttggtagaagataaagaggaagaagatgtgtctggtgaacctgaagcttcaccgagtgcagatacaactatactgtttgtaaaaggagaagattttccagcaaataacattgtgaagttcctggtaggctttaccaacaagggtacagaagattttattgttgaatccttagatgcctcattccgttatcctcaggactaccagttttatatccagaatttcacagctcttcctctgaacactgtagtgccaccccagagacaggcaacttttgagtactctttcattcctgcagagcccatgggcggacgaccatttggtttggtcatcaatctgaactacaaagatttgaacggcaatgtattccaagatgcagtcttcaatcaaacagttacagttattgaaagagaggatgggttagatggagaaaccgtaagagacccatacagaaagtagaaatgggtacatcaagtcagaatgatgttgacatgagttggattcctcaggaaacattgaatcaaatcaataaagcttcaccaagaaggttgcccaggaaacgggcacagaagagatcagtgggatctgatgagtaaatgttcctttgtgcaacaattcggtctttacttaacctgccctaatatttttcggcctgatgggaattagtgcagagaagccatgtcaccatagaaggcaactcctacttgtgtgtggactgagcaatcagagtctgtggcgataatattgctgaaaatgcactgcattcatttttctaaagtaacaaatttggtttttttttaaaccattaaaatctatgtgtgtgcgtgtgtatgtatgtgagcagttggtcttaccagaatcattgttgaactacctgaaacaagtctttagaatactaaatataatgctgttgtctcttc

SEQ ID NO: 12523 - protein, 214 aa, Homo sapiens; identical to SEQ ID NO: 12499

SEQ ID NO: 12524 - DNA, 1379 bp, Homo sapiens
gctctccccacctctccgcgctgagcagccacgtcggcggcggtccctggtccagggaggggcgtggcaaaggcccgtgcgcggtacgtgtcccgcccctcgctgcccggagcccggatgaagagtaacgccattaccgccggagccgccgagagccttagccgacggaaactggacactggaccggcagcgccatgagactcctcccccgcttgctgctgcttctcttactcgtgttccctgccactgtcttgttccgaggcggccccagaggcttgttagcagtggcacaagatcttacagaggatgaagaaacagtagaagattccataattgaggatgaagatgatgaagccgaggtagaagaagatgaacccacagatttggtagaagataaagaggaagaagatgtgtctggtgaacctgaagcttcaccgagtgcagatacaactatactgtttgtaaaaggagaagattttccagcaaataacattgtgaagttcctggtaggctttaccaacaagggtacagaagattttattgttgaatccttagatgcctcattccgttatcctcaggactaccagttttatatccagaatttcacagctcttcctctgaacactgtagtgccaccccagagacaggcaacttttgagtactctttcattcctgcagagcccatgggcggacgaccatttggtttggtcatcaatctgaactacaaagatttgaacggcaatgtattccaagatgcagtcttcaatcaaacagttacagttattgaaagagaggatgggttagatggagaaacaatctttatgtatatgttccttgctggtcttgggcttctggttattgttggccttcatcaactcctagaatctagaaagcgtaagagacccatacagaaagtagaaatgggtacatcaagtcagaatgatgttgacatgagttggattcctcaggaaacattgaatcaaatcaataaagcttcaccaagaaggttgcccaggaaacgggcacagaagagatcagtgggatctgatgagtaaatgttcctttgtgcaacaattcggtctttacttaacctgccctaatatttttcggcctgatgggaattagtgcagagaagccatgtcaccatagaaggcaactcctacttgtgtgtggactgagcaatcagagtctgtggcgataatattgctgaaaatgcactgcattcatttttctaaagtaacaaatttggtttttttttaaaccattaaaatctatgtgtgtgcgtgtgtatgtatgtgagcagttggtcttaccagaatcattgttgaactacctgaaacaagtctttagaatactaaatataatgctgttgtctcttc

SEQ ID NO: 12525 - protein, 286 aa, Homo sapiens; identical to SEQ ID NO: 12501

SEQ ID NO: 12526 - DNA, 993 bp, Homo sapiens
gctgcccggagcccggatgaagagtaacgccattaccgccggagccgccgagagccttagccgacggaaactggacactggaccggcagcgccatgagactcctcccccgcttgctgctgcttctcttactcgtgttccctgccactgtcttgttccgaggcggccccagaggcttgttagcagtggcacaagatcttacagaggatgaagaaacagtagaagattccataattgaggatgaagatgatgaagccgaggtagaagaagatgaacccacagatttggtagaagataaagaggaagaagatgtgtctggtgaacctgaagcttcaccgagtgcagatacaactatactgtttgtaaaaggagaagagcccatgggcggacgaccatttggtttggtcatcaatctgaactacaaagatttgaacggcaatgtattccaagatgcagtcttcaatcaaacagttacagttattgaaagagaggatgggttagatggagaaacaatctttatgtatatgttccttgctggtcttgggcttctggttattgttggccttcatcaactcctagaatctagaaagcgtaagagacccatacagaaagtagaaatgggtacatcaagtcagaatgatgttgacatgagttggattcctcaggaaacattgaatcaaatcaataaagcttcaccaagaaggttgcccaggaaacgggcacagaagagatcagtgggatctgatgagtaaatgttcctttgtgcaacaattcggtctttacttaacctgccctaatatttttcggcctgatgggaattagtgcagagaagccatgtcaccatagaaggcaactcctacttgtgtgtggactgagcaatcagagtctgtggcgataatattgctgaaaatgcactgcattcatttttctaaagtaacaaatttggtttttttttaaaccattaaaatctatgtgtgtgcgtgtgtatgtatgtg

SEQ ID NO: 12527 - protein, 218 aa, Homo sapiens; identical to SEQ ID NO: 12497

SEQ ID NO: 12528 - DNA, 1219 bp, Homo sapiens
gctctccccacctctccgcgctgagcagccacgtcggcggcggtccctggtccagggaggggcgtggcaaaggcccgtgcgcggtacgtgtcccgcccctcgctgcccggagcccggatgaagagtaacgccattaccgccggagccgccgagagccttagccgacggaaactggacactggaccggcagcgccatgagactcctcccccgcttgctgctgcttctcttactcgtgttccctgccactgtcttgttccgaggcggccccagaggcttgttagcagtggcacaagatcttacagaggatgaagaaacagtagaagattccataattgaggatgaagatgatgaagccgaggtagaagaagatgaacccacagatttggtagaagataaagaggaagaagatgtgtctggtgaacctgaagcttcaccgagtgcagatacaactatactgtttgtaaaaggagaagattttccagcaaataacattgtgaagttcctggtaggctttaccaacaagggtacagaagattttattgttgaatccttagatgcctcattccgttatcctcaggactaccagttttatatccagaatttcacagctcttcctctgaacactgtagtgccaccccagagacaggcaacttttgagtactctttcattcctgcagagcccatgggcggacgaccatttggtttggtcatcaatctgaactacaaagatttgaacggcaatgtattccaagatgcagtcttcaatcaaacagttacagttattgaaagagaggatgggttagatggagaaaccgtaagagacccatacagaaagtagaaatgggtacatcaagtcagaatgatgttgacatgagttggattcctcaggaaacattgaatcaaatcaataaagcttcaccaagaaggttgcccaggaaacgggcacagaagagatcagtgggatctgatgagtaaatgttcctttgtgcaacaattcggtctttacttaacctgccctaatatttttcggcctgatgggaattagtgcagagaagccatgtcaccatagaaggcaactcctacttgtgtgtggactgagcaatcagagtctgtggcgataatattgctgaaaatgcactgcattcatttttctaaagtaacaaatttggtttttttttaaaccattaaaatctatgtgtgtgcgtgtgtatgtatgtg

SEQ ID NO: 12529 - protein, 214 aa, Homo sapiens; identical to SEQ ID NO: 12499

SEQ ID NO: 12530 - DNA, 1298 bp, Homo sapiens
gctctccccacctctccgcgctgagcagccacgtcggcggcggtccctggtccagggaggggcgtggcaaaggcccgtgcgcggtacgtgtcccgcccctcgctgcccggagcccggatgaagagtaacgccattaccgccggagccgccgagagccttagccgacggaaactggacactggaccggcagcgccatgagactcctcccccgcttgctgctgcttctcttactcgtgttccctgccactgtcttgttccgaggcggccccagaggcttgttagcagtggcacaagatcttacagaggatgaagaaacagtagaagattccataattgaggatgaagatgatgaagccgaggtagaagaagatgaacccacagatttggtagaagataaagaggaagaagatgtgtctggtgaacctgaagcttcaccgagtgcagatacaactatactgtttgtaaaaggagaagattttccagcaaataacattgtgaagttcctggtaggctttaccaacaagggtacagaagattttattgttgaatccttagatgcctcattccgttatcctcaggactaccagttttatatccagaatttcacagctcttcctctgaacactgtagtgccaccccagagacaggcaacttttgagtactctttcattcctgcagagcccatgggcggacgaccatttggtttggtcatcaatctgaactacaaagatttgaacggcaatgtattccaagatgcagtcttcaatcaaacagttacagttattgaaagagaggatgggttagatggagaaacaatctttatgtatatgttccttgctggtcttgggcttctggttattgttggccttcatcaactcctagaatctagaaagcgtaagagacccatacagaaagtagaaatgggtacatcaagtcagaatgatgttgacatgagttggattcctcaggaaacattgaatcaaatcaataaagcttcaccaagaaggttgcccaggaaacgggcacagaagagatcagtgggatctgatgagtaaatgttcctttgtgcaacaattcggtctttacttaacctgccctaatatttttcggcctgatgggaattagtgcagagaagccatgtcaccatagaaggcaactcctacttgtgtgtggactgagcaatcagagtctgtggcgataatattgctgaaaatgcactgcattcatttttctaaagtaacaaatttggtttttttttaaaccattaaaatctatgtgtgtgcgtgtgtatgtatgtg

SEQ ID NO: 12531 - protein, 286 aa, Homo sapiens; identical to SEQ ID NO: 12501

SEQ ID NO: 12532 - DNA, 829 bp, Homo sapiens
gctgcccggagcccggatgaagagtaacgccattaccgccggagccgccgagagccttagccgacggaaactggacactggaccggcagcgccatgagactcctcccccgcttgctgctgcttctcttactcgtgttccctgccactgtcttgttccgaggcggccccagaggcttgttagcagtggcacaagatcttacagaggatgaagaaacagtagaagattccataattgaggatgaagatgatgaagccgaggtagaagaagatgaacccacagatttggtagaagataaagaggaagaagatgtgtctggtgaacctgaagcttcaccgagtgcagatacaactatactgtttgtaaaaggagaagattttccagcaaataacattgtgaagttcctggtaggctttaccaacaagggtacagaagattttattgttgaatccttagatgcctcattccgttatcctcaggactaccagttttatatccagaatttcacagctcttcctctgaacactgtagtgccaccccagagacaggcaacttttgagtactctttcattcctgcagagcccatgggcggacgaccatttggtttggtcatcaatctgaactacaaagatttgaacgtaagatcctctaaaccttctttttgtttaagttagagatggatgggggcggtgacgttgtttaatagaatatatctgttcattcagttgcctgttttgtggttgaacctgtgatagccaccagggaagcaaagataaattgcacgtttcttcttcaagtctaatccagtgggggaggcatatgaaaacaggc

SEQ ID NO: 12533 - protein, 192 aa, Homo sapiens
MRLLPRLLLLLLLVFPATVLFRGGPRGLLAVAQDLTEDEETVEDSIIEDEDDEAEVEEDEPTDLVEDKEEEDVSGEPEASPSADTTILFVKGEDFPANNIVKFLVGFTNKGTEDFIVESLDASFRYPQDYQFYIQNFTALPLNTVVPPQRQATFEYSFIPAEPMGGRPFGLVINLNYKDLNVRSSKPSFCLS

SEQ ID NO: 12534 - DNA, 3000 bp, Homo sapiens
ttgcgagtttgtgagagtccttggtggaggaggttggaaagcgttctccctcccacaaaacccggtgcagagggagggagagccaggtccgtagcgtgggtccaagaaactatggatcctggaagtgagcacacttttgtgtcttaaaaagtttggtgtctcgttttgaggtgaaaaatgaatgagataagtgctttttaaaaagaagtcttctattgttcaacagttatgaacaaggactatcaaaaattttggtcatcaccttcagatcctgtacattttgaagtggatacttctcatgaaaaagtagaaagcatgtcagaatcggataccatgaatgtcagcaatctttctcaaggtgtaatgctttcacattctccaatctgtatggaaaccaccggcaccacttgtgacttgcctcagaacgaaataaagaattttgaaagggaaaatgagtatgaatccacactttgtgaagatgcttatggcacactagacaatttgttaaatgataacaacattgaaaattactcaacgaatgcactaattcagccagttgacaccatcagcatatcttccttgagacaatttgaaaccgtttgcaaatttcactgggtagaagcatttgatgatgaaatgacagagaagccagaatttcaaagtcaagtgtataattatgcaaaagacaacaatataaagcaagactcatttaaggaagaaaatccaatggaaactagtgtttctgcaaatacagaccaacttggtaacgagtattttagacagcctcctcctagaagcccgcctctaatccactgcagtggagagatgctgaaatttacagaaaagtcactggctaaaagtattgccaaggaatctgccctcaaccctagccaacctccaagcttcttatactgcagttccttcaaaagaaatacagaattatggggagattcctgagatgtcagtcagttatgaaaaggaagtcacagcagagggtgtggagaggccagaaattgtctcaacttggtcttcggcaggcatttcctggaggagtgaagcatgtcgggagaactgtgagatgcctgactgggagcaaagtgctgaaagcttacaacctgttcaagaggacatggctttaaatgaagtcttgcagaaattaaaacatactaacagaaagcaggaagtgcgaatccaagaactccagtgtagtaacctgtatttagagaagagggttaaagaactacagatgaagattaccaaacagcaagtgttcattgatgtcatcaataagctaaaggagaatgttgaagaattaattgaagacaaatacaaaataatcctagagaagaatgatactaaaaagacattgcagaatttggaagaggttttagctaacacgcaaaaacatcttcaggaatccaggaatgacaaggaaatgttacagcttcaatttaagaagatcaaggctaattatgtgtgtttacaggaaaggtacatgactgaaatgcaacaaaaaaataaatctgtaagtcagtatttagagatggacaaaaccttaagcaagaaagaagaagaggtagagagactacaacaactcaaaaaagaactggaaaaggccacagcttctgctttggacttgttgaaacgggaaaaagaggcccaagaacaagagttcttgtctttacaggaggaattccagaaacttgaaaaggaaaacctggaagaaagacagaaactgaaatctagacttgagaaattgctcactcaagttagaaatttgcaatttatgtctgaaaatgaaagaacgaagaatataaaacttcagcagcaaatcaacgaagtaaaaaatgagaatgcaaaacttaaacagcaggttgcaaggagtgaagagcaaaattatgtccctaaatttgagacagctcagttaaaggatcaattagaggaagtcttgaagtcagatattaccaaggatacaaaaacgacacattctaatctgctcccggattgctcaccttgtgaagagaggctgaatcctgcagatataaaaagagcttctcagctggcctccaaaatgcacagtcttctggctctgatggtgggacttctcacatgccaggacatcatcaattctgatgctgaacatttcaaagagagtgagaaggttagtgatataatgctgcaaaaactgaagagcctccatcttaaaaagaaaactttagataaagagctactgaaacataaagatagaatcacaacctttagagagttaattgctaaggaaaaagcatttcaagatcatgctattaaggtattccaaggagtatgaaatgattgaaagtgagaacaaatatatttaatctcaggtcatagactgtgattcagatgaagccaagagtatcagagatgtacctacccttctgggagccaaactggataagtaccacagtctaaatgaggagcttgatttcttgatcacaaaactgggacatctcctagagtcaaaagaaaaccactgcaacagactcattgaagaaaatgacaagtatcaaagacatttaggcaacttaataaagaaggttacatcatatgaagaaatcattgaatgtgctgaccaaaggcttgcaatatcccactcccagattgcacatttggaagagagaaataaacatttagaggatttaattagaaagcccagagaaaaagccagaaaaccaagatcaaaaagcttagaaaatcatccgaagtccatgaccatgatgccagctctttttaaagaaaatagaaatgatttagattaaacaagcctgaagattaaacagtaatcatttttgtcaaccactccaggaagagtcattactacatatgctagccaaatcaatccatgcagatgatatattaaaatctgtataaagggtaaagtcttacattccaaagatgtgattacttttcttctaatttcttcctgtgaataatcaaatatattctatttaacataaacag

SEQ ID NO: 12535 - protein, 455 aa, Homo sapiens
MSVSYEKEVTAEGVERPEIVSTWSSAGISWRSEACRENCEMPDWEQSAESLQPVQEDMALNEVLQKLKHTNRKQEVRIQELQCSNLYLEKRVKELQMKITKQQVFIDVINKLKENVEELIEDKYKIILEKNDTKKTLQNLEEVLANTQKHLQESRNDKEMLQLQFKKIKANYVCLQERYMTEMQQKNKSVSQYLEMDKTLSKKEEEVERLQQLKKELEKATASALDLLKREKEAQEQEFLSLQEEFQKLEKENLEERQKLKSRLEKLLTQVRNLQFMSENERTKNIKLQQQINEVKNENAKLKQQVARSEEQNYVPKFETAQLKDQLEEVLKSDITKDTKTTHSNLLPDCSPCEERLNPADIKRASQLASKMHSLLALMVGLLTCQDIINSDAEHFKESEKVSDIMLQKLKSLHLKKKTLDKELLKHKDRITTFRELIAKEKAFQDHAIKVFQGV

SEQ ID NO: 12536 - DNA, 2844 bp, Homo sapiens
tggatgttctgtgctctcaggaaggcgtgttgagtagccggcacggcgaggcccgtgctggccgtttcttcccggagttttcgtttctgtaccccactttgtgtttactgcggcaggaggcgccagctagcccacaggctgttcggcctagggggtcgtaccttcctaacttcaccactctctgggaagacaccgcacccacagtagggtcgctcgggcctcgcgggctgcacctgtctctgcggagttcccccggcgcgggcggacgtcacacaggggcgttccagcactccgggagcccgattgcgagtttgtgagagtccttggtggaggaggttggaaagcgttctccctcccacaaaacccggtgcagagggagggagagccaggtccgtagcgtgggtccaagaaactatggatcctggaagtgagcacacttttgtgtcttaaaaagtttggtgtctcgttttgaggtgaaaaatgaatgagataagtgctttttaaaaagaacgaaataaagaattttgaaagggaaaatgagtatgaatccacactttgtgaagatgcttatggcacactagacaatttgttaaatgataacaacattgaaaattactcaacgaatgcactaattcagccagttgacaccatcagcatatcttccttgagacaatttgaaaccgtttgcaaatttcactgggtagaagcatttgatgatgaaatgacagagaagccagaatttcaaagtcaagtgtataattatgcaaaagacaacaatataaagcaagactcatttaaggaagaaaatccaatggaaactagtgtttctgcaaatacagaccaacttggtaacgagtattttagacagcctcctcctagaagcccgcctctaatccactgcagtggagagatgctgaaatttacagaaaagtcactggctaaaagtattgccaaggaatctgccctcaaccctagccaacctccaagcttcttatactgcagttccttcaaaagaaatacagaattatggggagattcctgagatgtcagtcagttatgaaaaggaagtcacagcagagggtgtggagaggccagaaattgtctcaacttggtcttcggcaggcatttcctggaggagtgaagcatgtcgggagaactgtgagatgcctgactgggagcaaagtgctgaaagcttacaacctgttcaagaggacatggctttaaatgaagtcttgcagaaattaaaacatactaacagaaagcaggaagtgcgaatccaagaactccagtgtagtaacctgtatttagagaagagggttaaagaactacagatgaagattaccaaacagcaagtgttcattgatgtcatcaataagctaaaggagaatgttgaagaattaattgaagacaaatacaaaataatcctagagaagaatgatactaaaaagacattgcagaatttggaagaggttttagctaacacgcaaaaacatcttcaggaatccaggaatgacaaggaaatgttacagcttcaatttaagaagatcaaggctaattatgtgtgtttacaggaaaggtacatgactgaaatgcaacaaaaaaataaatctgtaagtcagtatttagagatggacaaaaccttaagcaagaaagaagaagaggtagagagactacaacaactcaaaaaagaactggaaaaggccacagcttctgctttggacttgttgaaacgggaaaaagaggcccaagaacaagagttcttgtctttacaggaggaattccagaaacttgaaaaggaaaacctggaagaaagacagaaactgaaatctagacttgagaaattgctcactcaagttagaaatttgcaatttatgtctgaaaatgaaagaacgaagaatataaaacttcagcagcaaatcaacgaagtaaaaaatgagaatgcaaaacttaaacagcaggttgcaaggagtgaagagcaaaattatgtccctaaatttgagacagctcagttaaaggatcaattagaggaagtcttgaagtcagatattaccaaggatacaaaaacgacacattctaatctgctcccggattgctcaccttgtgaagagaggctgaatcctgcagatataaaaagagcttctcagctggcctccaaaatgcacagtcttctggctctgatggtgggacttctcacatgccaggacatcatcaattctgatgctgaacatttcaaagagagtgagaaggttagtgatataatgctgcaaaaactgaagagcctccatcttaaaaagaaaactttagataaagaggtcatagactgtgattcagatgaagccaagagtatcagagatgtacctacccttctgggagccaaactggataagtaccacagtctaaatgaggagcttgatttcttggttacatcatatgaagaaatcattgaatgtgctgaccaaaggcttgcaatatcccactcccagattgcacatttggaagagagaaataaacatttagaggatttaattagaaagcccagagaaaaagccagaaaaccaagatcaaaaagcttagaaaatcatccgaagtccatgaccatgatgccagctctttttaaagaaaatagaaatgatttagattaaacaagcctgaagattaaacagtaatcatttttgtcaaccactccaggaagagtcattactacatatgctagccaaatcaatccatgcagatgatatattaaaatctgtataaagggtaaagtcttacattccaaagatgtgattacttttcttctaatttcttcctgtgaataatcaaatatattctatttaacataaacag

SEQ ID NO: 12537 - protein, 532 aa, Homo sapiens
MSVSYEKEVTAEGVERPEIVSTWSSAGISWRSEACRENCEMPDWEQSAESLQPVQEDMALNEVLQKLKHTNRKQEVRIQELQCSNLYLEKRVKELQMKITKQQVFIDVINKLKENVEELIEDKYKIILEKNDTKKTLQNLEEVLANTQKHLQESRNDKEMLQLQFKKIKANYVCLQERYMTEMQQKNKSVSQYLEMDKTLSKKEEEVERLQQLKKELEKATASALDLLKREKEAQEQEFLSLQEEFQKLEKENLEERQKLKSRLEKLLTQVRNLQFMSENERTKNIKLQQQINEVKNENAKLKQQVARSEEQNYVPKFETAQLKDQLEEVLKSDITKDTKTTHSNLLPDCSPCEERLNPADIKRASQLASKMHSLLALMVGLLTCQDIINSDAEHFKESEKVSDIMLQKLKSLHLKKKTLDKEVIDCDSDEAKSIRDVPTLLGAKLDKYHSLNEELDFLVTSYEEIIECADQRLAISHSQIAHLEERNKHLEDLIRKPREKARKPRSKSLENHPKSMTMMPALFKENRNDLD

SEQ ID NO: 12538 - DNA, 2855 bp, Homo sapiens
gagtttgtgagagtccttggtggaggaggttggaaagcgttctccctcccacaaaacccggtgcagagggagggagagccaggtccgtagcgtgggtccaagaaactatggatcctggaagtgagcacacttttgtgtcttaaaaagtttggtgtctcgttttgaggtgaaaaatgaatgagataagtgctttttaaaaagaagtcttctattgttcaacagttatgaacaaggactatcaaaaattttggtcatcaccttcagatcctgtacattttgaagtggatacttctcatgaaaaagtagaaagcatgtcagaatcggataccatgaatgtcagcaatctttctcaaggtgtaatgctttcacattctccaatctgtatggaaaccaccggcaccacttgtgacttgcctcagaacgaaataaagaattttgaaagggaaaatgagtatgaatccacactttgtgaagatgcttatggcacactagacaatttgttaaatgataacaacattgaaaattactcaacgaatgcactaattcagccagttgacaccatcagcatatcttccttgagacaatttgaaaccgtttgcaaatttcactgggtagaagcatttgatgatgaaatgacagagaagccagaatttcaaagtcaagtgtataattatgcaaaagacaacaatataaagcaagactcatttaaggaagaaaatccaatggaaactagtgtttctgcaaatacagaccaacttggtaacgagtattttagacagcctcctcctagaagcccgcctctaatccactgcagtggagagatgctgaaatttacagaaaagtcactggctaaaagtattgccaaggaatctgccctcaaccctagccaacctccaagcttcttatactgcagttccttcaaaagaaatacagaattatggggagattcctgagatgtcagtcagttatgaaaaggaagtcacagcagagggtgtggagaggccagaaattgtctcaacttggtcttcggcaggcatttcctggaggagtgaagcatgtcgggagaactgtgagatgcctgactgggagcaaagtgctgaaagcttacaacctgttcaagaggacatggctttaaatgaagtcttgcagaaattaaaacatactaacagaaagcaggaagtgcgaatccaagaactccagtgtagtaacctgtatttagagaagagggttaaagaactacagatgaagattaccaaacagcaagtgttcattgatgtcatcaataagctaaaggagaatgttgaagaattaattgaagacaaatacaaaataatcctagagaagaatgatactaaaaagacattgcagaatttggaagaggttttagctaacacgcaaaaacatcttcaggaatccaggaatgacaaggaaatgttacagcttcaatttaagaagatcaaggctaattatgtgtgtttacaggaaaggtacatgactgaaatgcaacaaaaaaataaatctgtaagtcagtatttagagatggacaaaaccttaagcaagaaagaagaagaggtagagagactacaacaactcaaaaaagaactggaaaaggccacagcttctgctttggacttgttgaaacgggaaaaagaggcccaagaacaagagttcttgtctttacaggaggaattccagaaacttgaaaaggaaaacctggaagaaagacagaaactgaaatctagacttgagaaattgctcactcaagttagaaatttgcaatttatgtctgaaaatgaaagaacgaagaatataaaacttcagcagcaaatcaacgaagtaaaaaatgagaatgcaaaacttaaacagcaggttgcaaggagtgaagagcaaaattatgtccctaaatttgagacagctcagttaaaggatcaattagaggaagtcttgaagtcagatattaccaaggatacaaaaacgacacattctaatctgctcccggattgctcaccttgtgaagagaggctgaatcctgcagatataaaaagagcttctcagctggcctccaaaatgcacagtcttctggctctgatggtgggacttctcacatgccaggacatcatcaattctgatgctgaacatttcaaagagagtgagaaggttagtgatataatgctgcaaaaactgaagagcctccatcttaaaaagaaaactttagataaagagctactgaaacataaagatagaatcacaacctttagagagttaattgctaaggaaaaagcatttcaagatcatgctattaaggtcatagactgtgattcagatgaagccaagagtatcagagatgtacctacccttctgggagccaaactggataagtaccacagtctaaatgaggagcttgatttcttgatcacaaaactgggacatctcctagagtcaaaagaaaaccactgcaacagactcattgaagaaaatgacaagtatcaaagacatttaggcaacttaataaagaaggttacatcatatgaagaaatcattgaatgtgctgaccaaaggcttgcaatatcccactcccagattgcacatttggaagagagaaataaacatttagaggatttaattagaaagcccagagaaaaagccagaaaaccaagatcaaaaagcttagaaaatcatccgaagtccatgaccatgatgccagctctttttaaagaaaatagaaatgatttagattaaacaagcctgaagattaaacagtaatcatttttgtcaaccactccaggaagagtcattactacatatgctagccaaatcaatccatgcagatgatatattaaaatctgtataaaggg

SEQ ID NO: 12539 - protein, 594 aa, Homo sapiens
MSVSYEKEVTAEGVERPEIVSTWSSAGISWRSEACRENCEMPDWEQSAESLQPVQEDMALNEVLQKLKHTNRKQEVRIQELQCSNLYLEKRVKELQMKITKQQVFIDVINKLKENVEELIEDKYKIILEKNDTKKTLQNLEEVLANTQKHLQESRNDKEMLQLQFKKIKANYVCLQERYMTEMQQKNKSVSQYLEMDKTLSKKEEEVERLQQLKKELEKATASALDLLKREKEAQEQEFLSLQEEFQKLEKENLEERQKLKSRLEKLLTQVRNLQFMSENERTKNIKLQQQINEVKNENAKLKQQVARSEEQNYVPKFETAQLKDQLEEVLKSDITKDTKTTHSNLLPDCSPCEERLNPADIKRASQLASKMHSLLALMVGLLTCQDIINSDAEHFKESEKVSDIMLQKLKSLHLKKKTLDKELLKHKDRITTFRELIAKEKAFQDHAIKVIDCDSDEAKSIRDVPTLLGAKLDKYHSLNEELDFLITKLGHLLESKENHCNRLIEENDKYQRHLGNLIKKVTSYEEIIECADQRLAISHSQIAHLEERNKHLEDLIRKPREKARKPRSKSLENHPKSMTMMPALFKENRNDLD

SEQ ID NO: 12540 - DNA, 2549 bp, Homo sapiens
gattgcgagtttgtgagagtccttggtggaggaggttggaaagcgttctccctcccacaaaacccggtgcagagggagggagagccaggtccgtagcgtgggtccaagaaactatggatcctggaagtgagcacacttttgtgtcttaaaaagtttggtgtctcgttttgaggtgaaaaatgaatgagataagtgctttttaaaaagaagtcttctattgttcaacagttatgaacaaggactatcaaaaattttggtcatcaccttcagatcctgtacattttgaagtggatacttctcatgaaaaagtagaaagcatgtcagaatcggataccatgaatgtcagcaatctttctcaaggtgtaatgctttcacattctccaatctgtatggaaaccaccggcaccacttgtgacttgcctcagaacgaaataaagaattttgaaagggaaaatgagtatgaatccacactttgtgaagatgcttatggcacactagacaatttgttaaatgataacaacattgaaaattactcaacgaatgcactaattcagccagttgacaccatcagcatatcttccttgagacaatttgaaaccgtttgcaaatttcactgggtagaagcatttgatgatgaaatgacagagaagccagaatttcaaagtcaagtgtataattatgcaaaagacaacaatataaagcaagactcatttaaggaagaaaatccaatggaaactagtgtttctgcaaatacagaccaacttggtaacgagtattttagacagcctcctcctagaagcccgcctctaatccactgcagtggagagatgctgaaatttacagaaaagtcactggctaaaagtattgccaaggaatctgccctcaaccctagccaacctccaagcttcttatactgcagttccttcaaaagaaatacagaattatggggagattcctgagatgtcagtcagttatgaaaaggaagtcacagcagagggtgtggagaggccagaaattgtctcaacttggtcttcggcaggcatttcctggaggagtgaagcatgtcgggagaactgtgagatgcctgactgggagcaaagtgctgaaagcttacaacctgttcaagaggacatggctttaaatgaagtcttgcagaaattaaaacatactaacagaaagcaggaagtgcgaatccaagaactccagtgtagtaacctgtatttagagaagagggttaaagaactacagatgaagattaccaaacagcaagtgttcattgatgtcatcaataagctaaaggagaatgttgaagaattaattgaagacaaatacaaaataatcctagagaagaatgatactaaaaagacattgcagaatttggaagaggttttagctaacacgcaaaaacatcttcaggaatccaggaatgacaaggaaatgttacagcttcaatttaagaagatcaaggctaattatgtgtgtttacaggaaaggtacatgactgaaatgcaacaaaaaaataaatctgtaagtcagtatttagagatggacaaaaccttaagcaagaaagaagaagaggtagagagactacaacaactcaaaaaagaactggaaaaggccacagcttctgctttggacttgttgaaacgggaaaaagaggcccaagaacaagagttcttgtctttacaggaggaattccagaaacttgaaaaggaaaacctggaagaaagacagaaactgaaatctagacttgagaaattgctcactcaagttagaaatttgcaatttatgtctgaaaatgaaagaacgaagaatataaaacttcagcagcaaatcaacgaagtaaaaaatgagaatgcaaaacttaaacagcaggttgcaaggagtgaagagcaaaattatgtccctaaatttgagacagctcagttaaaggatcaattagaggaagtcttgaagtcagatattaccaaggatacaaaaacgacacattctaatctgctcccggattgctcaccttgtgaagagaggctgaatcctgcagatataaaaagagcttctcagctggcctccaaaatgcacagtcttctggctctgatggtgggacttctcacatgccaggacatcatcaattctgatgctgaacatttcaaagagagtgagaaggttagtgatataatgctgcaaaaactgaagagcctccatcttaaaaagaaaactttagataaagagctactgaaacataaagatagaatcacaacctttagagagttaattgctaaggaaaaagcatttcaagatcatgctattaaggtcatagactgtgattcagatgaagccaagagtatcagagatgtacctacccttctgggagccaaactggataagtaccacagtctaaatgaggagcttgatttcttggtggcgcggtggctcatgcctgtaatccaagcactttgggaggctgaggcgggtggatcatgagatcaggagttcaagaccaccctggccaagatggtgaaaccccgtctctactaaaaatacaaaaaatt

SEQ ID NO: 12541 - protein, 506 aa, Homo sapiens
MSVSYEKEVTAEGVERPEIVSTWSSAGISWRSEACRENCEMPDWEQSAESLQPVQEDMALNEVLQKLKHTNRKQEVRIQELQCSNLYLEKRVKELQMKITKQQVFIDVINKLKENVEELIEDKYKIILEKNDTKKTLQNLEEVLANTQKHLQESRNDKEMLQLQFKKIKANYVCLQERYMTEMQQKNKSVSQYLEMDKTLSKKEEEVERLQQLKKELEKATASALDLLKREKEAQEQEFLSLQEEFQKLEKENLEERQKLKSRLEKLLTQVRNLQFMSENERTKNIKLQQQINEVKNENAKLKQQVARSEEQNYVPKFETAQLKDQLEEVLKSDITKDTKTTHSNLLPDCSPCEERLNPADIKRASQLASKMHSLLALMVGLLTCQDIINSDAEHFKESEKVSDIMLQKLKSLHLKKKTLDKELLKHKDRITTFRELIAKEKAFQDHAIKVIDCDSDEAKSIRDVPTLLGAKLDKYHSLNEELDFLVARWLMPVIQALWEAEAGGS

SEQ ID NO: 12542 - DNA, 682 bp, Homo sapiens
ttgtgagagtccttggtggaggaggttggaaagcgttctccctcccacaaaacccggtgcagagggagggagagccaggtccgtagcgtgggtccaagaaactatggatcctggaagtgagcacacttttgtgtcttaaaaagtttggtgtctcgttttgaggtgaaaaatgaatgagataagtgctttttaaaaagaagtcttctattgttcaacagttatgaacaaggactatcaaaaattttggtcatcaccttcagatcctgtacattttgaagtggatacttctcatgaaaaagtagaaagcatgtcagaatcggataccatgaatgtcagcaatctttctcaaggtgtaatgctttcacattctccaatctgtatggaaaccaccggcaccacttgtgacttgcctcagaacgaaataaagaattttgaaagggaaaatgagtatgaatccacactttgtgaagatgcttatggcacactagacaatttgttaaatgactgcagttccttcaaaagaaatacagaattatggggagattcctgagatgtcagtcagttatgaaaaggaagtcacagcagagggtgtggagaggccagaaattgtctcaacttggtcttcggcaggcatttcctggaggagtgaagcatgtcgggagaactgtgagatgcctgactg

SEQ ID NO: 12543 - protein, 109 aa, Homo sapiens [sequence omitted]

SEQ ID NO: 12544 - DNA, 1807 bp, Homo sapiens
gacttccgggcgaggcggtgaggggcttccggttggggtggcagggtggtggatctgtcggtcccgttttcccgtcgcacgtggtggccactgttggcttctgaatggtttgcaaggcggatatccacgccaaggcctttggatcggccgtgggtacatccgtctgagccgttcctttccatcgcagagcggcggcctccggcggcgctctccagtcatggactaccggcggcttctcatgagccgggtggtccccgggcaattcgacgacgcggactcctctgacagtgaaaacagagacttgaagacagtcaaagagaaggatgacattctgtttgaagaccttcaagacaatgtgaatgagaatggtgaaggtgaaatagaagatgaggaggaggagggttatgacgatgatgatgatgactgggactgggatgaaggagttggaaaactcgccaagggttatgtctggaatggaggaagcaacccacaggcaaatcgacagacctccgacagcagttcagccaaaatgtctactccagcagacaaggtcttacggaaatttgagaataaaattaatttagataagctaaatgttactgattccgtcataaataaagtcaccgaaaagtctagacaaaaggaagcagatatgtatcgcatcaaagataaggcagacagagcaactgtagaacaggtgttggatcccagaacaagaatgattttattcaagatgttgactagaggaatcataacagagataaatggctgcattagcacaggaaaagaagctaatgtataccatgctagcacagcaaatggagagagcagagcaatcaaaatttataaaacttctattttggtgttcaaagatcgggataaatatgtaagtggagaattcagatttcgtcatggctattgtaaaggaaaccctaggaaaatggtgaaaacttgggcagaaaaagaaatgaggaacttaatcaggctaaacacagcagagataccatgtccagaaccaataatgctaagaagtcatgttcttgtcatgagtttcatcggtaaagatgacatgcctgcaccactcttgaaaaatgtccagttatcagaatccaaggctcgggagttgtacctgcaggtcattcagtacatgagaagaatgtatcaggatgccagacttgtccatgcagatctcagtgaatttaacatgctgtaccacggtggaggcgtgtatatcattgacgtgtctcagtccgtggagcacgaccacccacatgccttggagttcttgagaaaggattgcgccaacgtcaatgatttctttatgaggcacagtgttgctgtcatgactgtgcgggagctctttgaatttgtcacagatccatccattacacatgagaacatggatgcttatctctcaaaggccatggaaatagcatctcaaaggaccaaggaagaacggtctagccaagatcatgtggatgaagaggtgtttaagcgagcatatattcctagaaccttgaatgaagtgaaaaattatgagagggatatggacataattatgaaattgaaggaagaggacatggccatgaatgcccaacaagataatattctataccagactgttacaggattgaagaaagatttgtcaggagttcagaaggtccctgcactcctagaaaatcaagtggaggaaaggacttgttctgattcagaagatattggaagctctgagtgctctgacacagactctgaagagcagggagaccatgcccgccccaagaaacacaccacggaccctgacattgat

SEQ ID NO: 12545 - protein, 529 aa, Homo sapiens
MDYRRLLMSRVVPGQFDDADSSDSENRDLKTVKEKDDILFEDLQDNVNENGEGEIEDEEEEGYDDDDDDWDWDEGVGKLAKGYVWNGGSNPQANRQTSDSSSAKMSTPADKVLRKFENKINLDKLNVTDSVINKVTEKSRQKEADMYRIKDKADRATVEQVLDPRTRMILFKMLTRGIITEINGCISTGKEANVYHASTANGESRAIKIYKTSILVFKDRDKYVSGEFRFRHGYCKGNPRKMVKTWAEKEMRNLIRLNTAEIPCPEPIMLRSHVLVMSFIGKDDMPAPLLKNVQLSESKARELYLQVIQYMRRMYQDARLVHADLSEFNMLYHGGGVYIIDVSQSVEHDHPHALEFLRKDCANVNDFFMRHSVAVMTVRELFEFVTDPSITHENMDAYLSKAMEIASQRTKEERSSQDHVDEEVFKRAYIPRTLNEVKNYERDMDIIMKLKEEDMAMNAQQDNILYQTVTGLKKDLSGVQKVPALLENQVEERTCSDSEDIGSSECSDTDSEEQGDHARPKKHTTDPDI

SEQ ID NO: 12546 - DNA, 2522 bp, Homo sapiens
gacttccgggcgaggcggtgaggggcttccggttggggtggcagggtggtggatctgtcggtcccgttttcccgtcgcacgtggtggccactgttggcttctgaatggtttgcaaggcggatatccacgccaaggcctttggatcggccgtgggtacatccgtctgagccgttcctttccatcgcagagcggcggcctccggcggcgctctccagtcatggactaccggcggcttctcatgagccgggtggtccccgggcaattcgacgacgcggactcctctgacagtgaaaacagagacttgaagacagtcaaagagaaggatgacattctgtttgaagaccttcaagacaatgtgaatgagaatggtgaaggtgaaatagaagatgaggaggaggagggttatgacgatgatgatgatgactgggactgggatgaaggagttggaaaactcgccaagggttatgtctggaatggaggaagcaacccacaggcaaatcgacagacctccgacagcagttcagccaaaatgtctactccagcagacaaggtcttacggaaatttgagaataaaattaatttagataagctaaatgttactgattccgtcataaataaagtcaccgaaaagtctagacaaaaggaagcagatatgtatcgcatcaaagataaggcagacagagcaactgtagaacaggtgttggatcccagaacaagaatgattttattcaagatgttgactagaggaatcataacagagataaatggctgcattagcacaggaaaagaagctaatgtataccatgctagcacagcaaatggagagagcagagcaatcaaaatttataaaacttctattttggtgttcaaagatcgggataaatatgtaagtggagaattcagatttcgtcatggctattgtaaaggaaaccctaggaaaatggtgaaaacttgggcagaaaaagaaatgaggaacttaatcaggctaaacacagcagagataccatgtccagaaccaataatgctaagaagtcatgttcttgtcatgagtttcatcggtaaagatgacatgcctgcaccactcttgaaaaatgtccagttatcagaatccaaggctcgggagttgtacctgcaggtcattcagtacatgagaagaatgtatcaggatgccagacttgtccatgcagatctcagtgaatttaacatgctgtaccacggtggaggcgtgtatatcattgacgtgtctcagtccgtggagcacgaccacccacatgccttggagttcttgagaaaggattgcgccaacgtcaatgatttctttatgaggcacagtgttgctgtcatgactgtgcgggagctctttgaatttgtcacagatccatccattacacatgagaacatggatgcttatctctcaaaggccatggaaatagcatctcaaaggaccaaggaagaacggtctagccaagatcatgtggatgaagaggtgtttaagcgagcatatattcctagaaccttgaatgaagtgaaaaattatgagagggatatggacataattatgaaattgaaggaagaggacatggccatgaatgcccaacaagataatattctataccagactgttacaggattgaagaaagatttgtcaggagttcagaaggtccctgcactcctagaaaatcaagtggaggaaaggacttgttctgattcagaagatattggaagctctgagtgctctgacacagactctgaagagcagggagaccatgcccgccccaagaaacacaccacggaccctgacattgataaaaaagaaagaaaaaagatggtcaaggaagcccagagagagaaaagaaaaaacaaaattcctaaacatgtgaaaaaaagaaaggagaagacagccaagacgaaaaaaggcaaatagaatgagaaccatattatgtacagtcattttcctcagttccttttctcgcctgaactcttaagctgcatctggaagatggcttattggttttaaccagattgtcatcgtggcactgtctgtgaagacggattcaaatgttttcatgtaactatgtaaaaagctctaagctctagagtctagatccagtcactgactctgtctggtgttgacagaggatttatttaagctattattttaataaagaactttgtacatttttatttttatatttttttctcttacaaatatgtttttggaagcatgataaatgtttaaatgtagtcaacatctgtaactcttacatgagtgtccagaggcactcatgggaaaattggttttgctttctttgtacacaccagagacccatctgaggtcatctgattataaggccatgtttatataaagggaatttcacccacagttcagctggctgttgattttcactgcaactctgcctttgtgtgtattggcgatcatttgtaatgctcttacacttcgtctttaatgttctttttggagttaggacctctcagttcataaagttttttacaattcaatc

SEQ ID NO: 12547 - protein, 568 aa, Homo sapiens; identical to SEQ ID NO: 1233

SEQ ID NO: 12548 - DNA, 1833 bp, Homo sapiens
gctaatgtataccatgctagcacagcaaatggagagagcagagcaatcaaaatttataaaacttctattttggtgttcaaagatcgggataaatatgtaagtggagaattcaggtaagttcagatttttccctccagttggtttaatttctatttcctaaaacattaaaataataatggaatgattgaaataataaacatttttcttattcaagatttcgtcatggctattgtaaaggaaaccctaggaaaatggtgaaaacttgggcagaaaaagaaatgaggaacttaatcaggctaaacacagcagagataccatgtccagaaccaataatgctaagaagtcatgttcttgtcatgagtttcatcggtaaagatgacatgcctgcaccactcttgaaaaatgtccagttatcagaatccaaggctcgggagttgtacctgcaggtcattcagtacatgagaagaatgtatcaggatgccagacttgtccatgcagatctcagtgaatttaacatgctgtaccacggtggaggcgtgtatatcattgacgtgtctcagtccgtggagcacgaccacccacatgccttggagttcttgagaaaggattgcgccaacgtcaatgatttctttatgaggcacagtgttgctgtcatgactgtgcgggagctctttgaatttgtcacagatccatccattacacatgagaacatggatgcttatctctcaaaggccatggaaatagcatctcaaaggaccaaggaagaacggtctagccaagatcatgtggatgaagaggtgtttaagcgagcatatattcctagaaccttgaatgaagtgaaaaattatgagagggatatggacataattatgaaattgaaggaagaggacatggccatgaatgcccaacaagataatattctataccagactgttacaggattgaagaaagatttgtcaggagttcagaaggtccctgcactcctagaaaatcaagtggaggaaaggacttgttctgattcagaagatattggaagctctgagtgctctgacacagactctgaagagcagggagaccatgcccgccccaagaaacacaccacggaccctgacattgataaaaaagaaagaaaaaagatggtcaaggaagcccagagagagaaaagaaaaaacaaaattcctaaacatgtgaaaaaaagaaaggagaagacagccaagacgaaaaaaggcaaatagaatgagaaccatattatgtacagtcattttcctcagttccttttctcgcctgaactcttaagctgcatctggaagatggcttattggttttaaccagattgtcatcgtggcactgtctgtgaagacggattcaaatgttttcatgtaactatgtaaaaagctctaagctctagagtctagatccagtcactgactctgtctggtgttgacagaggatttatttaagctattattttaataaagaactttgtacatttttatttttatatttttttctcttacaaatatgtttttggaagcatgataaatgtttaaatgtagtcaacatctgtaactcttacatgagtgtccagaggcactcatgggaaaattggttttgctttctttgtacacaccagagacccatctgaggtcatctgattataaggccatgtttatataaagggaatttcacccacagttcagctggctgttgattttcactgcaactctgcctttgtgtgtattggcgatcatttgtaatgctcttacacttcgtctttaatgttctttttggagttaggacctctcagttcataaagttttttacaattcaatc

SEQ ID NO: 12549 - protein, 327 aa, Homo sapiens; identical to SEQ ID NO: 1235

SEQ ID NO: 12550 - DNA, 651 bp, Homo sapiens
ccagtttattttagagaaacatggacaatactattgccctcatcccaaaatatatacagagcccttatcatgtgcatggcataatgaaaagcaacaatattctattttaaggaattaggtgcctcttatagtctaaaggtcagatctagaaatactgttctctatttgggcttccaaatttccctctggtctgaagaacagatctctcccttgagaagttcagcttctcaaacaatgtcaggcacataataggactcaggaaagatcatcaatatcaccttttttccattttctccaacttcgagaattgggagcccaggcatggtggctcatttctataatcccagcactttgggaggtcaaggtgggaggattccttgagctcaggagtttgaggccagcctgggcaacatggtgagactccatctctgcagaaaatgaagatgctaaaaccagaagaggccagactctggggaagcaggagagaaagcagccaaatctggtgagtatcctcaaccgagtaccctcgattatctcagcattgccttctggtacataacttggaagagggtggtggtgttgccatagggatgtataatcaagataagtcaatcgaagattttgcacacagttccttccaaatggctctaa

SEQ ID NO: 12551 - protein, 67 aa, Homo sapiens
EVQLLKQCQAHNRTQERSSISPFFHFLQLRELGAQAWWLISIIPALWEVKVGGFLELRSLRPAWATW

SEQ ID NO: 12552 - DNA, 703 bp, Homo sapiens
ttccagtccagggatcaccggtggagacccattagtctatgccatcctagtcccacccgcctgacacctcatgctcaccagaaggacaccttgggctgaccagagaggagggtttctgtgtgagaagcgatttgtgaatgcatctcataaatgccctgctctcagctgctgaacattctcctgctgaaaggcagggagctaattagcacagccacctcgacagcgtctgttccagtcacccctgcatgcatgctagaacacctttgaacaatggatgacagtctgcagagagcacagagctcccggagaacataaaaatgcaatggaacagaatgaagggatgcaagtcacaatcgtctcaactgcaagttggccaaagtaaacattgccccaaagtgctcccaaagcttgctggcacataaacatgaatgaatgaacaatgtagaattcactcaagaaatttcaaggagagagaggaggagatttacatcacacagcaaacaacctaataaatctgttaaacgccatgcatgtgaataggcgttttcctctttttgaccctttctttccacatagaactcagtgctccttcctcgtcctccgttacagtatttatcgccttccttcttccacgccggggagcagtcgaggcttgtgttcttcagcggacttgccaaatcatcccctccagcatgctgctctc

SEQ ID NO: 12553 - protein, 34 aa, Homo sapiens
MQWNRMKGCKSQSSQLQVGQSKHCPKVLPKLAGT

SEQ ID NO: 12554 - DNA, 748 bp, Homo sapiens
gaaccatgagaaagctttaaatggggatgtaaaatatgatctgtggaagggagagagcagcatgctggaggggatgatttggcaagtccgctgaagaacacaagcctcgactgctccccggcgtggaagaaggaaggcgataaatactgtaacggaggacgaggaaggagcactgagttctatgtggaaagaaagggtcaaaaagaggaaaacgcctattcacatgcatggcgtttaacagatttattaggttgtttgctgtgtgatgtaaatctcctcctctctctccttgaaatttcttgagtgaattctacattgttcattcattcatgtttatgtgccagcaagctttgggagcactgtaaaaataaaaaaggttagaccactgttagacatctgggaaacatctatgttagagaaggactatatattaatttatctcatttatgggaggcaaatactatgattattgaaggtacatctctttctttatggatggagtacatcttatttttctaaaatttgtatttgaacctatttatttctaattgtcaaaaatgtgaagtgagaaacttaaaaactttttagtttctcttgtcccaccattttatgtacttccaggttgtcaaataatttggaattttagacttagataattctctaatgtatattatagatcttctatttcaataattagcttatattttaattaaattgtataactgcattaaaatatacttaactatgt

SEQ ID NO: 12555 - protein, 87 aa, Homo sapiens
SVEGREQHAGGDDLASPLKNTSLDCSPAWKKEGDKYCNGGRGRSTEFYVERKGQKEENAYSHAWRLTDLLGCLLCDVNLLLSLLEIS

SEQ ID NO: 12556 - DNA, 1064 bp, Homo sapiens
ggtcattcagacagaactgtccactaagaagaaatggaatctatggttctgcaggtcagaatggtctgtaccagagatgaagtcatcggtctacagatgaattgagtgaaagcaatcacccagagccaggcaaggtgtcagagctccaacatcaaaaggtggttgactggtgggttggtaagaagaatttaccactgaccgtataggactggaaaaggaaaggtttattaggtagaaagaacgctgtcgaagagtgcagctgcagcggagcacctcagcaagagaggactgagtgcaacacagtggatccttcctcaggggtatttatggaccttaaagccggagctgaagatgatctgtggaagggagagagcagcatgctggaggggatgatttggcaagtccgctgaagaacacaagcctcgactgctccccggcgtggaagaaggaaggcgataaatactgtaacggaggacgaggaaggagcactgagttctatgtggaaagaaagggtcaaaaagaggaaaacgcctattcacatgcatggcgtttaacagatttattaggttgtttgctgtgtgatgtaaatctcctcctctctctccttgaaatttcttgagtgaattctacattgttcattcattcatgtttatgtgccagcaagctttgggagcactgtaaaaataaaaaaggttagaccactgttagacatctgggaaacatctatgttagagaaggactatatattaatttatctcatttatgggaggcaaatactatgattattgaaggtacatctctttctttatggatggagtacatcttatttttctaaaatttgtatttgaacctatttatttctaattgtcaaaaatgtgaagtgagaaacttaaaaactttttagtttctcttgtcccaccattttatgtacttccaggttgtcaaataatttggaattttagacttagataattctctaatgtatattatagatcttctatttcaataattagcttatattttaattaaattgtataactgcattaaaatatacttaactatgt

SEQ ID NO: 12557 - protein, 87 aa, Homo sapiens; identical to SEQ ID NO: 12555

SEQ ID NO: 12558 - DNA, 1621 bp, Homo sapiens
tattttttttagaactctaatatgaaaatctggttgatttcaataattaagcctagaaagaaatgaatatgtaagcatatatgaaaggattaatattactaggtgttattttgtacataaaatgaggcatagacttataaaacattagaatcaaataacatttctggaaatttaggccatattgaaattataatgtttcttttaaaatgtttgttctgcaaacctaattgagccatagagttaaaacccttaatcttccattttcagtttcatagtacttttttctgctttatttttatctgctctaggtattgtattcgtattcaattggttttgtatacattttactgggattgacatgcactagtggattaggccctgcagtaacattttgtgcaaaggtaaacactaatcacatttaaaaaaaaaaatcttctgttaaataattttctctaaatttctcatttcccttgttcaaaagaggctatcatagatataatgatacctcctttaacataacatgccaatcggaaattaatttcagaaatgaaatgactgatatttaaatttattttatccttgctgtaccctatgagttgatttttaagctgttcataatgtaggaaagttgaggatctttaatttcaacatttttttttcattaaatcaaaataagaatctttgcttgactgcattgtcaaacaacttattgctcaagaagttgattaacatctgtagttttattttatttgtaatacctcggagtttgttttacatttttctaacaggcttttttattttttgcagaatccagttcggacctatggttatgcgttccttttttccctcactggatattttggaatctcctttgttctggctttgattaaaatttttggtgcacttattgctgtaacagtgacaacaggaagaaaagcaatgaccattgtactttcgtttatattctttgctaaaccattcacgtttcagtatgtatggtctggtttgttagttgtccttggtatatttcttaatgtttacagcaaaaatatggataaaataagactaccatcactgtatgatttgataaacaaatcagtggaagcaagaaagtcaaggacgctggcacagactgtatagacagtgattgtcctatttaaaatagaattttaagggaacaatcatcaattaattaactttccaaagggactgataaaaaccaaaggatctggaggcattgctatcccatttgtggacagatttcatatgaagttgttttgcggtgtcagccttttcttcagagcatttgtttgactgacttccaaagcaatcaagagagccacgtctagcagactttacaataaaatgtcaatatgaaggactgtaattcctagcagtttattgagaatttcactggaaatggaccatgtgttgcaagactaattggctataattatatcctatcaaagaaatcgatacgtaatagcagattgttttatattcattccattttgatggtgttatttaaattgattctctgttataagagtaaactgatgagttgaagtctggagagaataacattcattataaataaaattattctgtgatcttttttcaa

SEQ ID NO: 12559 - protein, 66 aa, Homo sapiens [sequence omitted]

SEQ ID NO: 12560 - DNA, 2099 bp, Homo sapiens
gagagtgctttccggggaggcgaccgccgcggtggaaagtgcaggagtgggcgaggaggaggaggaagaggaggtgatggcgacggaccaggggagggggagatgctccgtctagctcagacgccacgcaggctgccgtcacccttccgggtgacataccggccttggggtacgcgtgccttcggggcctttcctgtgtttgggacccagatctcctctcctccagaaaaccttgacactgcccatcttcctcatccagaaggagcgttcgaggaatggatgaggtcgggatggaagaaacgggtgattcccttttttgaaagagcggaaaccggccgggcggtttccagggaggagcatctgttcctcctcgcccgtttttcgccctcgggctggcgagaactccctcaggtcccaatccgtggactcgcaggggtgaggtgacctcaaggggtcttttacgctgttctcggggtctctggagaactgtcagtcacctggatacctctagactgtatttacagttaactgtttcctcgttccgtgtttattaaataggggcactccaaggacttgacacagcaagcaaaagacatacagaacataacagtccaggaaaccaacaaaaataactctgaaagcattgaatgcagcaaaataacaatggatctcaagttcaacaattccaggaaatatatttctatcactgtgccatccaaaacccaaacaatgtcaccacacatcaagtcagttgacgacgttgtggtacttggcatgaatctcagcaagtttaacaaacttactcagtttttcatatgtgttgctggagtttttgtattttacctaatttatgggtatttacaggaattaatattttcagtggagggttttaagtcctgtggctggtaccttaccttagtgcagtttgccttttactccatatttggcctaatagaacttcagcttattcaggacaaaaggaggaggaaagcgttataatgttgcagatgtgtctgctgccatatgtatgagccttggcctgatatggtttaccctcgctgacagcacaactgcaccaaatttcaacctgacgggtgtggtgcttatttccctggcactatgtgcagatgccgtcattggaaatgttcaagagaaagctatgaaacttcataatgcttctaattctgaaatggtattgtattcgtattcaattggttttgtatacattttactgggattgacatgcactagtggattaggccctgcagtaacattttgtgcaaagaatccagttcggacctatggttatgcgttccttttttccctcactggatattttggaatctcctttgttctggctttgattaaaatttttggtgcacttattgctgtaacagtgacaacaggaagaaaagcaatgaccattgtactttcgtttatattctttgctaaaccattcacgtttcagtatgtatggtctggtttgttagttgtccttggtatatttcttaatgtttacagcaaaaatatggataaaataagactaccatcactgtatgatttgataaacaaatcagtggaagcaagaaagtcaaggacgctggcacagactgtatagacagtgattgtcctatttaaaatagaattttaagggaacaatcatcaattaattaactttccaaagggactgataaaaaccaaaggatctggaggcattgctatcccatttgtggacagatttcatatgaagttgttttgcggtgtcagccttttcttcagagcatttgtttgactgacttccaaagcaatcaagagagccacgtctagcagactttacaataaaatgtcaatatgaaggactgtaattcctagcagtttattgagaatttcactggaaatggaccatgtgttgcaagactaattggctataattatatcctatcaaagaaatcgatacgtaatagcagattgttttatattcattccattttgatggtgttatttaaattgattctctgttataagagtaaactgatgagttgaagtctggagagaataacattcattataaataaaattattctgtgatcttttttcaa

SEQ ID NO: 12561 - protein, 196 aa, Homo sapiens
MSLGLIWFTLADSTTAPNFNLTGVVLISLALCADAVIGNVQEKAMKLHNASNSEMVLYSYSIGFVYILLGLTCTSGLGPAVTFCAKNPVRTYGYAFLFSLTGYFGISFVLALIKIFGALIAVTVTTGRKAMTIVLSFIFFAKPFTFQYVWSGLLVVLGIFLNVYSKNMDKIRLPSLYDLINKSVEARKSRTLAQTV

SEQ ID NO: 12562 - DNA, 6156 bp, Homo sapiens
aggcggaagtggcctgcgggcgccggagttgagagtgctttccggggaggcgaccgccgcggtggaaagtgcaggagtgggcgaggaggaggaggaagaggaggtgatggcgacggaccaggggagggggagatgctccgtctagctcagacgccacgcaggctgccgtcacccttccgggtgacataccggccttggggccatgattgattccggagcgcagttaatcaaggcataatggcatggtaagattcttttatttgtaacgttgagtgtggcaaagtatagttaaaatcacgttttttcaggttaatgacaccgtaatgacttttttttcatattctacctttttttggtgtgggacttttgtccttcaggtcggaaaactcaaaaataaactgaaataattgtgacttcaataggtcattgtaactcaacattatcactaattttaatttttaaatatacattgtatgccggaaatgctacctttttattccattttagcagttgaagttgaatatctgtgttgaatttaggaagaggcctcaggcaattatacacacctgtgatttttaaaatatatatatatatattttagtttcactgattactgtgagcttcaaaagcaaagcacaatgttgatcatttagtctgaaaactaattttaattccatgcttcatttttgctccttgcatcacaaggagtttggcccatttttttttttagatgatggttagtatcagtcattaatgtttgaagtggaagggatatggcagacattccccaatgatcacagttattaggtatcagaggtctttatcagtcacactttctcaccagtgatgttcttattaataaaacagcattctaaatgcaaggctttggtgggcaagttttatgagactgatgcctcaggcagaggaaacaaatttattttcatgttcatttcaaatgttttgtggggagtttcagtagcaatgtcggtattttggcatacatgtagaaaagacagtgctagagagatttcattctgcacatatggcctagatctgcagcacataaagttgccaagaagtgtattagaagtggtaaagtgttggaaaggagctgaataacgttgattaaataaatggtgcttgctaaactgtggtagagtccttcatttaatcttacatttttgttatgtgccagaacatcataggaagatatctcttgccttaaggatttcataggcttttaggagaaacaagtataaaaacgaaaaagctataccattatcatttaggaatttgaaaaatatgtataatatgattgagtccaggacatcaactcgtttttaacttcgaggccttattcatggatgcagcatgatcagacttcacgttgagccatgtgacagatgggtcagaaagggaagaattgattataaacagtctcgtaatctaggcaagagaaaatggctgcctgatggagtagggtccgaaacagatattagatatagttatagaggtagagttaacaggaatcttggcaaaatatagaatgtgaggaaaaggaaagattcttaagatgactcccagatttttagcttgtgtttcatactaggtactgttaagtgagattgggaatataggaacaaacagtagatttgttttgaggggaaaataatcagctttggccattttaaatatgaagtgccagcagagcttatgagtagaggtatcaaagaagcatttagacgtagagctctggatctcaggagagaaggcagcgttggaaattcaggtctgtatttccagctgcacatcaaaggggtgagtcagcttgagcacaccatatcaccctagcaatatttctaaaaagttgaaggatgacagctaacacacttatggactgtcatatgccaggcaattttacatttatttcatatagtcctaaccaaaatcctgtgataggcacatttttaactcctcccacttttgaaggtgcagaacctaaagctcagaaaagttaaacgatttgcccaaggctcctcagctaataagtagtaaagccagatcttgaactcatatctgtcaaaattccaaagcatggggaaagcattatgctatactgctttcttatactattacctataattgtattgagtcattacaatatgcttggcagtttactaaattacaaacatctcagaagaaggtgactttgggaaagcgtgaccttctggagaaatgttttgatgccaataaaagcaggaaagaaagatattttctagaagttttatttattctgtatgtatgtgtaaatatgtaagcattatttgtaaattttccccactctttttctataagattttcagttttgctcataaagtttgccagtaccaccatccatttcaaaaatcgtatccaagcagaaggtgagtgattgcaagctgaagtttgagggtatcaagaggaaggatcagtttatttggttcatctgaatatcaggtcagagtatatgccaggtaccaaggacacagagacaaataagatttgaatcttgcctttcaagttctcttttctaataactggggggattagtgatggtgtcacaaaggaggggatattaaagctgaacttccaaacctgaccttgagaaagaagacctcaggctgaaaggacatcatgaacagaaggcagcggtgttttaaagtccctggtgtatttcaggaatgaaacatgggtggtttagggctttattgagagtggagggagagcaaacttagaaacctatgtaaggccgggtttatttgaatggtgcactatatccatgctcacacatagaaaagagtaaattgttaaggttttcgtctcttctacattcaagcacaggtttgaccaaatatttaggagagataatttaaagcatggttttaaaagaaagtcacatctcaaagataccctgcaagattacataaaaagtcttacaaatgacagtgattgaaacataatgtgggaagcaagaacaaaggaaagtgaagaataaacaagaggaacacagtaaacttcatgaaacaacttttctatttagaaataaggcaggtgccctataaaatgttgtggtggctgcatatttttagttacaagtggtattcagatccttgacccctcctttaattcctaaggatgacctggttaacctctgtaaattagcaaactagaagtgatcatgaagaggcgactctaattttggccattttaagccatcttgtaacagtttaaaaaaacattaccaaaggaaaactcactgtcaaaattattcttatttctcttcgtgccgcagagtttaaatttttgttcccactggaattaaaaacagatgagtcgtttctaagaaaataactttttcttttacataggtttattctatactttgtcataattcttcagtctttcctcagtctttacatggagttcattttttcagtttatataaatccaaagagaaattgatggcttcataattttttttagactgacaaaaaatgacatgttttctccagccttttacatcccagaagaatgtaaattaaaatgatttgttccagaggaagaaaacattttttaacctaagagatgctactgctgaagcatattgtgctttctgtagtctctgataaatctagctttttaaggaccttaggtttggggtttctttgttttgtttttttcatttattttctagagacagggtctggctctgtcgcccaggctggagtgcaggggtgcaatcatagattactgcagcctcaaactcctggactcaagtgatcatcctgcctcagcctcccaagtagctaggactacaggcatgcaccaccatgtccagctaatttttttattttattttattttattttatttggtagagagagggtcttgctatgttgcccaggctggtcttgaactcctggtctcaagcaacctctctgcttcagcctcccaaaatgttgggattacaggcatgagccaccacacctggccttcatttttttagtttattttttaaatgtcattagcaaatatatcttagaattgtcttagtatttaaaggagaattacttattttttactcctctacaagtgaagattgactttaatgttgagaatgttatgcatcaactatatatagacacaaagacatgtttagttctttgatgaaataactagcttttgttgctgtggaaataagtatggtttatattcagtttaatgatgtactaatctttatcagctgtagacaaattgtttaaagattgtaggcatattgtttttggtgatttggaacctagaatacaggaattaatatactaatatccagagagaagcagacatttgtataactttaaagtatgatttggaatattatttggaggattaaactttatcatgtaaatgttttaattgcttatttccttctctaggacttgacacagcaagcaaaagacatacagaacataacagtccaggaaaccaacaaaaataactctgaaagcattgaatgcagcaaaataacaatggatctcaagttcaacaattccaggaaatatatttctatcactgtgccatccaaaacccaaacaatgtcaccacacatcaagtcagttgacgacgttgtggtacttggcatgaatctcagcaagtttaacaaacttactcagtttttcatatgtgttgctggagtttttgtattttacctaatttatgggtatttacaggaattaatattttcagtggagggttttaagtcctgtggctggtaccttaccttagtgcagtttgccttttactccatatttggcctaatagaacttcagcttattcaggacaaaaggaggagaataccaggaaaaacctacatgataatagcttttctaactgtgggtactatggggttatcaaacacttccttgggctacctgaattaccctacccaagtcatcttcaagtgctgcaaattgattcctgttatgctaggaggagtttttattcaaggaaagcgttataatgttgcagatgtgtctgctgccatatgtatgagccttggcctgatatggtttaccctcgctgacagcacaactgcaccaaatttcaacctgacgggtgtggtgcttatttccctggcactatgtgcagatgccgtcattggaaatgttcaagagaaagctatgaaacttcataatgcttctaattctgaaatggtattgtattcgtattcaattggttttgtatacattttactgggattgacatgcactagtggattaggccctgcagtaacattttgtgcaaagaatccagttcggacctatggttatgcgttccttttttccctcactggatattttggaatctcctttgttctggctttgattaaaatttttggtgcacttattgctgtaacagtgacaacaggaagaaaagcaatgaccattgtactttcgtttatattctttgctaaaccattcacgtttcagtatgtatggtctggtttgttagttgtccttggtatatttcttaatgtttacagcaaaaatatggataaaataagactaccatcactgtatgatttgataaacaaatcagtggaagcaagaaagtcaaggacgctggcacagactgtatagacagtgattgtcctatttaaaatagaattttaagggaacaatcatcaattaattaactttccaaagggactgataaaaaccaaaggatctggaggcattgctatcccatttgtggacagatttcatatgaagttgttttgcggtgtcagccttttcttcagagcatttgtttgactgacttccaaagcaatcaagagagccacgtctagcagactttacaataaaatgtcaatatgaaggactgtaattcctagcagtttattgagaatttcactggaaatggaccatgtgttgcaagactaattggctataattatatcctatcaaagaaatcgatacgtaatagcagattgttttatattcattccattttgatggtgttatttaaattgattctctgttataagagtaaactgatgagttgaagtctggagagaataacattcattataaataaaattattctgtgatcttttttcaa

SEQ ID NO: 12563 - protein, 369 aa, Homo sapiens
MDLKFNNSRKYISITVPSKTQTMSPHIKSVDDVVVLGMNLSKFNKLTQFFICVAGVFVFYLIYGYLQELIFSVEGFKSCGWYLTLVQFAFYSIFGLIELQLIQDKRRRIPGKTYMIIAFLTVGTMGLSNTSLGYLNYPTQVIFKCCKLIPVMLGGVFIQGKRYNVADVSAAICMSLGLIWFTLADSTTAPNFNLTGVVLISLALCADAVIGNVQEKAMKLHNASNSEMVLYSYSIGFVYILLGLTCTSGLGPAVTFCAKNPVRTYGYAFLFSLTGYFGISFVLALIKIFGALIAVTVTTGRKAMTIVLSFIFFAKPFTFQYVWSGLLVVLGIFLNVYSKNMDKIRLPSLYDLINKSVEARKSRTLAQTV

SEQ ID NO: 12564 - DNA, 2205 bp, Homo sapiens
agggacacataggcggaagtggcctgcgggcgccggagttgagagtgctttccggggaggcgaccgccgcggtggaaagtgcaggagtgggcgaggaggaggaggaagaggaggtgatggcgacggaccaggggagggggagatgctccgtctagctcagacgccacgcaggctgccgtcacccttccgggtgacataccggccttggggtacgcgtgccttcggggcctttcctgtgtttgggacccagatctcctctcctccagaaaaccttgacactgcccatcttcctcatccagaaggagcgttcgaggaatggatgaggtcgggatggaagaaacgggtgattcccttttttgaaagagcggaaaccggccgggcggtttccagggaggagcatctgttcctcctcgcccgtttttcgccctcgggctggcgagaactccctcaggtcccaatccgtggactcgcaggggccatgattgattccggagcgcagttaatcaaggcataatggcatggacttgacacagcaagcaaaagacatacagaacataacagtccaggaaaccaacaaaaataactctgaaagcattgaatgcagcaaaataacaatggatctcaagttcaacaattccaggaaatatatttctatcactgtgccatccaaaacccaaacaatgtcaccacacatcaagtcagttgacgacgttgtggtacttggcatgaatctcagcaagtttaacaaacttactcagtttttcatatgtgttgctggagtttttgtattttacctaatttatgggtatttacaggaattaatattttcagtggagggttttaagtcctgtggctggtaccttaccttagtgcagtttgccttttactccatatttggcctaatagaacttcagcttattcaggacaaaaggaggagaataccaggaaaaacctacatgataatagcttttctaactgtgggtactatggggttatcaaacacttccttgggctacctgaattaccctacccaagtcatcttcaagtgctgcaaattgattcctgttatgctaggaggagtttttattcaaggaaagcgttataatgttgcagatgtgtctgctgccatatgtatgagccttggcctgatatggtttaccctcgctgacagcacaactgcaccaaatttcaacctgacgggtgtggtgcttatttccctggcactatgtgcagatgccgtcattggaaatgttcaagagaaagctatgaaacttcataatgcttctaattctgaaatggtattgtattcgtattcaattggttttgtatacattttactgggattgacatgcactagtggattaggccctgcagtaacattttgtgcaaagaatccagttcggacctatggttatgcgttccttttttccctcactggatattttggaatctcctttgttctggctttgattaaaatttttggtgcacttattgctgtaacagtgacaacaggaagaaaagcaatgaccattgtactttcgtttatattctttgctaaaccattcacgtttcagtatgtatggtctggtttgttagttgtccttggtatatttcttaatgtttacagcaaaaatatggataaaataagactaccatcactgtatgatttgataaacaaatcagtggaagcaagaaagtcaaggacgctggcacagactgtatagacagtgattgtcctatttaaaatagaattttaagggaacaatcatcaattaattaactttccaaagggactgataaaaaccaaaggatctggaggcattgctatcccatttgtggacagatttcatatgaagttgttttgcggtgtcagccttttcttcagagcatttgtttgactgacttccaaagcaatcaagagagccacgtctagcagactttacaataaaatgtcaatatgaaggactgtaattcctagcagtttattgagaatttcactggaaatggaccatgtgttgcaagactaattggctataattatatcctatcaaagaaatcgatacgtaatagcagattgttttatattcattccattttgatggtgttatttaaattgattctctgttataagagtaaactgatgagttgaagtctggagagaataacattcattataaataaaattattctgtgatcttttttcaa

SEQ ID NO: 12565 - protein, 401 aa, Homo sapiens; identical to SEQ ID NO: 1237

SEQ ID NO: 12566 - DNA, 7357 bp, Homo sapiens
gcacgcgcgcagggacacataggcggaagtggcctgcgggcgccggagttgagagtgctttccggggaggcgaccgccgcggtggaaagtgcaggagtgggcgaggaggaggaggaagaggaggtgatggcgacggaccaggggagggggagatgctccgtctagctcagacgccacgcaggctgccgtcacccttccgggtgacataccggccttggggacttgacacagcaagcaaaagacatacagaacataacagtccaggaaaccaacaaaaataactctgaaagcattgaatgcagcaaaataacaatggatctcaagttcaacaattccaggaaatatatttctatcactgtgccatccaaaacccaaacaatgtcaccacacatcaagtcagttgacgacgttgtggtacttggcatgaatctcagcaagtttaacaaacttactcagtttttcatatgtgttgctggagtttttgtattttacctaatttatgggtatttacaggaattaatattttcagtggagggttttaagtcctgtggctggtaccttaccttagtgcagtttgccttttactccatatttggcctaatagaacttcagcttattcaggacaaaaggaggaggtatgtggtttgtttttattttttgatatttctatattagttgaatttttttggcatactgaatatgcatgaaatttatacttctattaacaaaacatgtgataggcacgaactcttagtgtaactaacttaatactaaatacattttattcatttatacactgaaaaaaataaagtcttaaatgcagtattacaaaataaaaaaatattagctttaggctcaacttagtgttatatgttcttacaacatgataaaaaacacaatgtacatacttgatttgtataaattctgctgaaataggtgcagttactgatttgtagtacaactaacatcacagtggtgaaatgaaatatcagtacaggttgagcatcctaatccaaaaatcctaaatccagaaatgctccaaaattagaaaagttttgagtgccaatgtgacacaagtggaaacttccaaacataagtacttaacacaaattttgttttgtgcacaaaatgatataaaatgtgcaccatgaccagctctgggacagctgggatgcagggcaccaagttcttaagctgcacacagcatagtgaccttgggtgcagcccacaaaacctttctttcctcctaggcttcctggcctgtgatgggagtggctgccatgaagacccatgacatgctctagagacattttccccattgtcttggggattaacattcagatccttgttaggcaaatttctgcacccagcttgaatttctcctcaaaaaatgggtttttcttttctactgcatcgtcaggttgcaaattttctgaaccgttttcctctgtttccgttttaaaatggaatgctttcaacagcacccaattaccttttgaaggctttgctgcttagaaatttcttccaccagatacactaaatcatctcaaagttccatagatctctagggcaggggcaaaatgccaccagtctctttgctaaaacataacaagagtcacctttgctctagttcccaacaagttcctcatgtccatctgagaccacctcagtctgaaccttattgttcatatcactatcagcttttttgccaaagccattcaacaagtctctaggtggttccaaactgtcctacattttcctgtcttcttctgagccctccaaactcttccagcctctgcctgatacccagttccaaagttgcttccacatttttgggtctcatttcagcaacatctcactcctggtaccaatttactgttattagtccgttttcatgctgctgataaagacatacccgagactgggaagaaaaagaagtttaattgaacttacagttccacatggcttgggaggcctcagaatcatggcaggagtcaaaagtcacttcttacatggtggtggcaagagaaaatgaggaagatgcaaaagcggaaacccctgataaaaccatcagatcttgtgagacttattcactaccatgagaacaatatgggggaaaccacccccatgattcaaattacctcccactgggtccctcccacaacagatgaaaattatgggagtacaattccagatgagatttgagtggtgacacagcgccaaaccatatcaaaaatgttctataaaattaccttcaggttatgtgtataatgtatatatgaaacataaataaatctcatattaagacctgtgtcccattccccaagataccttactatgcagatgcaaatattccaaaacctgaaaaaaatcgaaatttgaaacactctggtcgccagcattttggatgagggataccaagtctgtatctattgttattctgcttttttagaatgtgaagttatattttgtgggatatgccccagctaacattgccatatgatgtccgatagctgaggttgcgttcttaagcattagagaaacaaatctcattccttttcatcaagaccaaatgtgcttgtttgacaatatcatttcaggtagcaaccatctagatttgagaaatatcttgatatatctttaatggcatctagaacaatatgcaataaaacttagtctctgattataaacagaaagtggttaggaatttgaatataaaatgttcttggttaatgtaagaagcgtgctccttctgtcgtaccctaatgtgtgtatatatcgtgtatctattgggcagtttaaatgtaataacgactgtaatactgacataccttgatacaaatgtttaatcctttagtgaagatttcaaaaattgtgcagctttttttttaatcataaaatggtgttgaagtttgtatcaaggtaactacagttttacatatttaaatctatattacaggtttcttcatgggtctaattttgcctctcaacctgtctttattgccaataaattattgtagcaattattgtaaaaatatttgaaccttagaatatcatcttcattatttttatgttctatcatgattctccatgatagaatcatggaggcaagctgatgaaatccaacttcctcattttaccaatgagaaaacaaagacctagaggagtactgggaatagccataggtgatagaataggtaattaaatatatctgtcaagactaatatataaggaagcttgatgatgatttactacttattacaaactactgggccttctaaggtaagattgcttctaaggtaaaagacactaatactatctttgtaggtgaaaaatgatacaatgatgatgcatgttctgttacatttcagaaagaaacacctccctatcagctaccccgatgagaggggagggggcctcaagccatgtttatcccaacttttaaatcacgtgaccataacatattttaaaataaaataatttgtacttgatttaaatataagtgaaataatttgggagaataatttatgtatttataataaatgtaattatgaattgaaacctttctgaatttatttctgcaaatacacccatatctgaatttatttaatggtactgctactcgttagacctttaattagctaaactctttgctgttgttatttttttcttcttcccacatttatgtgaataccgacatactggaataagtacatcaatactcgttgagaatttggagttagaaacatgggtttgggtcttggcacttgggtcttattacatctgtcaagacctcagagaagtttctataatactctaaattttatcttgaggctcatatgtggtaatgcgtgctaaagtacatcataaactgtaatatcctaaatatactgcttattatttttcatcaaagaataccttgtaacattattattaattagtataagtttctaattaaggagagtgctcagatttgtcttgaagaggtttttaaagttaaaattttctccccggccaggtgcagtggctcacgcctgtaatcctagcactttgggaggccgaggcaggttgatcacctgaggttaggagttcgagaccagcctggccaacatggtgaaaccccgtctctactaaaaatataaaattagctggacatggtggcgggcacttgtaatcctagctactcaggaggtcaggaggctgaggcaggagaatggtttgaacctgggaggcggaggttgcagtgagccaagatggcgccactgcactccagcctgggcaacaagagcgagactccgtctcaaaaaaaaaattttctccccatttctaaggaagcaagcaattgatgtattaaataaaatagaaatagtgagtatcctggaggcaagctgatcaaatctaatttcttcattataccaatgagaaaacaaagacctagaggactgctcagaattttttgagctccttttggagctacttttggatttagttcccctgtcaggctggttttctttctacctgtactgtgctacttttctactcattccttgtaattcttctgacttgaatttttattttctgccaatgatttgccatttatctttgagaaaatctgaccaccttgacttgtatcattttacctggcgaagtggtgctccaccatcactgatgatatcccaatgagggtcaaaccccatggatggcatgaacgcatttacactgatgcatatgggcatgccaagttgtttccacgtggattttcatggttaactactatattagtagttaagtagaaaaaaacccctcagaatcgaatgtaaatgatgcattttaattgactttttccagtaaattattttaccttatatctaaccatatataagatgagaaattttgttgccttgatttcaatgtgaacacaaattctaaaatggaaattacatctaactctccagcattatcagtatgaatagtgcctgattgtgtctgtgttcgtcataccagtagacaagattattagtttagaccattaaatatctagtcaaagtgagcatatgctcacagtaatggctcaaaattctgaagatgctaaattaagaatctcctttaggaactttagatagagccaaagttaaaagacttgaaatcatgagagagtcagatacctcatcttaaaagttgattattataacatagaatatagagagatgatctataagatattataataaaaattacatctagggttttaaatcacatgaacttttcctagagaaaatcttgggttattttagcagaatggatagatgtatttttcctaatgctagatggaaacattaggaaacagaacaacaattcaagagttaaaaattagttttaaaatgttaaggtaccttttaccattatggaggccaacattagctgggcatggtggcgcacacctgtagtcccagctactcaggaggctgaggcaaaagaatttcttgaacccgtgaggcagaggttgcacttagctgagatcatgccactgcactccagcctaggcaacagagcgagaccttatctcaagcaaacaacaacaaaagaagctctttttctctaacttaagatggttaagatggtttttatttgtggctagaactgctgttaaaaaaaaaaaaaaaaccttttgtcaacatttataccttcagtaaaaatctaaactcttttttacataattgagtggcctcgtttatgattgactaaataaaggtaaattgttatttttataaacttttttatacaagagcattacagtttttaaatagtgatattttttactgatatttccagaaatagtaaccagaaattagaaaagtaattagacatttacacaatgtgaacacattatcttttagtagtatgaattgggtcccaaaatgaaggttttaaaaattgtcttttacagaataccaggaaaaacctacatgataatagcttttctaactgtgggtactatggggttatcaaacacttccttgggctacctgaattaccctacccaagtcatcttcaagtgctgcaaattgattcctgttatgctaggaggagtttttattcaaggaaagcgttataatgttgcagatgtgtctgctgccatatgtatgagccttggcctgatatggtttaccctcgctgacagcacaactgcaccaaatttcaacctgacgggtgtggtgcttatttccctggcactatgtgcagatgccgtcattggaaatgttcaagagaaagctatgaaacttcataatgcttctaattctgaaatgaatattactaccagtagttattctggggtgtttatattcccaaataaactaaaaatcccattggtattgtgattggtatggcattgaattataaattaatttagggagaatggcatcttgattatttcagtccaagaataaggtattgtattcgtattcaattggttttgtatacattttactgggattgacatgcactagtggattaggccctgcagtaacattttgtgcaaagaatccagttcggacctatggttatgcgttccttttttccctcactggatattttggaatctcctttgttctggctttgattaaaatttttggtgcacttattgctgtaacagtgacaacaggaagaaaagcaatgaccattgtactttcgtttatattctttgctaaaccattcacgtttcagtatgtatggtctggtttgttagttgtccttggtatatttcttaatgtttacagcaaaaatatggataaaataagactaccatcactgtatgatttgataaacaaatcagtggaagcaagaaagtcaaggacgctggcacagactgtatagacagtgattgtcctatttaaaatagaattttaagggaacaatcatcaattaattaactttccaaagggactgataaaaaccaaaggatctggaggcattgctatcccatttgtggacagatttcatatgaagttgttttgcggtgtcagccttttcttcagagcatttgtttgactgacttccaaagcaatcaagagagccacgtctagcagactttacaataaaatgtcaatatgaaggactgtaattcctagcagtttattgagaatttcactggaaatggaccatgtgttgcaagactaattggctataattatatcctatcaaagaaatcgatacgtaatagcagattgttttatattcattccattttgatggtgttatttaaattgattctctgttataagagtaaactgatgagttgaagtctggagagaataacattcattataaataaaattattctgtgatcttttttcaa

SEQ ID NO: 12567 - protein, 153 aa, Homo sapiens
MKVLKIVFYRIPGKTYMIIAFLTVGTMGLSNTSLGYLNYPTQVIFKCCKLIPVMLGGVFIQGKRYNVADVSAAICMSLGLIWFTLADSTTAPNFNLTGVVLISLALCADAVIGNVQEKAMKLHNASNSEMNITTSSYSGVFIFPNKLKIPLVL

SEQ ID NO: 12568 - DNA, 2206 bp, Homo sapiens
gcacgcgcgcagggacacataggcggaagtggcctgcgggcgccggagttgagagtgctttccggggaggcgaccgccgcggtggaaagtgcaggagtgggcgaggaggaggaggaagaggaggtgatggcgacggaccaggggagggggagatgctccgtctagctcagacgccacgcaggctgccgtcacccttccgggtgacataccggccttggggtacgcgtgccttcggggcctttcctgtgtttgggacccagatctcctctcctccagaaaaccttgacactgcccatcttcctcatccagaaggagcgttcgaggaatggatgaggccatgattgattccggagcgcagttaatcaaggcataatggcatggacttgacacagcaagcaaaagacatacagaacataacagtccaggaaaccaacaaaaataactctgaaagcattgaatgcagcaaaataacaatggatctcaagttcaacaattccaggaaatatatttctatcactgtgccatccaaaacccaaacaatgtcaccacacatcaagtcagttgacgacgttgtggtacttggcatgaatctcagcaagtttaacaaacttactcagtttttcatatgtgttgctggagtttttgtattttacctaatttatgggtatttacaggaattaatattttcagtggagggttttaagtcctgtggctggtaccttaccttagtgcagtttgccttttactccatatttggcctaatagaacttcagcttattcaggacaaaaggaggagaataccaggaaaaacctacatgataatagcttttctaactgtgggtactatggggttatcaaacacttccttgggctacctgaattaccctacccaagtcatcttcaagtgctgcaaattgattcctgttatgctaggaggagtttttattcaaggaaagcgttataatgttgcagatgtgtctgctgccatatgtatgagccttggcctgatatggtttaccctcgctgacagcacaactgcaccaaatttcaacctgacgggtgtggtgcttatttccctggcactatgtgcagatgccgtcattggaaatgttcaagagaaagctatgaaacttcataatgcttctaattctgaaatgaatattactaccagtagttattctggggtgtttatattcccaaataaactaaaaatcccattggtattgtgattggtatggcattgaattataaattaatttagggagaatggcatcttgattatttcagtccaagaataaggtattgtattcgtattcaattggttttgtatacattttactgggattgacatgcactagtggattaggccctgcagtaacattttgtgcaaagaatccagttcggacctatggttatgcgttccttttttccctcactggatattttggaatctcctttgttctggctttgattaaaatttttggtgcacttattgctgtaacagtgacaacaggaagaaaagcaatgaccattgtactttcgtttatattctttgctaaaccattcacgtttcagtatgtatggtctggtttgttagttgtccttggtatatttcttaatgtttacagcaaaaatatggataaaataagactaccatcactgtatgatttgataaacaaatcagtggaagcaagaaagtcaaggacgctggcacagactgtatagacagtgattgtcctatttaaaatagaattttaagggaacaatcatcaattaattaactttccaaagggactgataaaaaccaaaggatctggaggcattgctatcccatttgtggacagatttcatatgaagttgttttgcggtgtcagccttttcttcagagcatttgtttgactgacttccaaagcaatcaagagagccacgtctagcagactttacaataaaatgtcaatatgaaggactgtaattcctagcagtttattgagaatttcactggaaatggaccatgtgttgcaagactaattggctataattatatcctatcaaagaaatcgatacgtaatagcagattgttttatattcattccattttgatggtgttatttaaattgattctctgttataagagtaaactgatgagttgaagtctggagagaataacattcattataaataaaattattctgtgatcttttttcaa

SEQ ID NO: 12569 - protein, 283 aa, Homo sapiens
MDLTQQAKDIQNITVQETNKNNSESIECSKITMDLKFNNSRKYISITVPSKTQTMSPHIKSVDDVVVLGMNLSKFNKLTQFFICVAGVFVFYLIYGYLQELIFSVEGFKSCGWYLTLVQFAFYSIFGLIELQLIQDKRRRIPGKTYMIIAFLTVGTMGLSNTSLGYLNYPTQVIFKCCKLIPVMLGGVFIQGKRYNVADVSAAICMSLGLIWFTLADSTTAPNFNLTGVVLISLALCADAVIGNVQEKAMKLHNASNSEMNITTSSYSGVFIFPNKLKIPLVL

SEQ ID NO: 12570 - DNA, 840 bp, Homo sapiens
agtgctttccggggaggcgaccgccgcggtggaaagtgcaggagtgggcgaggaggaggaggaagaggaggtgatggcgacggaccaggggagggggagatgctccgtctagctcagacgccacgcaggctgccgtcacccttccgggtgacataccggccttggggacttgacacagcaagcaaaagacatacagaacataacagtccaggaaaccaacaaaaataactctgaaagcattgaatgcagcaaaataacaatggatctcaagttcaacaattccaggaaatatatttctatcactgtgccatccaaaacccaaacaatgtcaccacacatcaagtcagttgacgacgttgtggtacttggcatgaatctcagcaagtttaacaaacttactcagtttttcatatgtgttgctggagtttttgtattttacctaatttatgggtatttacaggtaaaaaagttatatgtttgtaatatgttaattatttataataattgcggtcagtatgggcatttactagttttgcccaagatagtcacttaggggatactggctgattcataaatttgaattttttagtatagagtagaaaagagcttcttaacagatcaaaattcaagagttaaataatttaagtggggaggaggcatatgtagagactatcttgaaaaattttcattatgaaaattaagttttaaatatttaacaaaatgtgtgcttccaagagaaagcaatgattcacgtattgattggtatcttggaatattattgaatgatagtgcagtttacttgattcttggagctcaataataaaagatcatttttgcaaa

SEQ ID NO: 12571 - protein, 42 aa, Homo sapiens
MLRLAQTPRRLPSPFRVTYRPWGLDTASKRHTEHNSPGNQQK

SEQ ID NO: 12572 - DNA, 482 bp, Homo sapiens
gagagtgctttccggggaggcgaccgccgcggtggaaagtgcaggagtgggcgaggaggaggaggaagaggaggtgatggcgacggaccaggggagggggagatgctccgtctagctcagacgccacgcaggctgccgtcacccttccgggtgacataccggccttggggtacgcgtgccttcggggcctttcctgtgtttgggacccagatctcctctcctccagaaaaccttgacactgcccatcttcctcatccagaaggagcgttcgaggaatggatgaggtcgggatggaagaaacgggtgattcccttttttgaaagagcggaaaccggccgggcggtttccagggaggagcatctgttcctcctcgcccgtttttcgccctcgggctggcgagaactccctcaggtcccaatccgtggactcgcaggggccatgattgattccggagcgcagttaatcaaggcataatggcatgg

SEQ ID NO: 12573 - protein, 123 aa, Homo sapiens
MLRLAQTPRRLPSPFRVTYRPWGTRAFGAFPVFGTQISSPPENLDTAHLPHPEGAFEEWMRSGWKKRVIPFFERAETGRAVSREEHLFLLARFSPSGWRELPQVPIRGLAGAMIDSGAQLIKA

SEQ ID NO: 12574 - DNA, 2362 bp, Homo sapiens
tcccgcgcatgctctatggggtagagacgctaggccggcactgcctaggtgggccgggcggtgcgagggtcgcctttcagcctttacctctacccactgaaatggagtaggtcggtgagcgccgatctgctggagaatctcattatcccatcggcgctctgcctgctcctggcctccaagcctctgaagcccctcgggtttcagctgccggctaccctcgagcccgtggtgcccacgagagaggcgactttacgtcagcggccctgggctgagatttgagaacgcgaccaagtggagaatgttggagccagattttaaaatccttgtcttccttctgcgtgctacttgatctaaatgagatacggcaaagtcacagaacctgtttttatgtttttgcctgattcatacgggcttctccggtgaagatgggcctgaagtaacgcttgggttgcttctgacgttataactcatcctgtagctgcagcaaccgtggtccttgcaacctcataaaaatgttgccagcattgtttcgatagtgctgcttaattcttggaaggttcttcggacttcacacattccagcagtagctctctcagctcctgtcctgcacagctttgaagtgctggtgatgtcattgaactcttaagtgcaagatgaaacaagtctttctggggttctaagtaggaattggctcatatgattgtggaggctcagacatcccaaaatctgcagccagcaagcaggagacccaggagagcgaatgttgtagctccagtctgaagatcgtccagcctgagacccaggaggagccaatgtttcagtttgaatctgaaggcaggaaaagactgatgtaccagctcatggcagtcaggcaggagcagttcctcttactagcaggaaagttggcctttttgttttattctggccttcaactgattggttcaggcccacccacattaaggagggcaacaatctggtttacttggtctcctgattaaaacattaatctcatccaaaaatgctttcacagacacacttagagtaatgttcaaccaaatatcttggcacccttggtccagtcaagtttacaatattaactgtcacactgttataagtctagtctatgcctaattttaagcttctaaaacaatcaactcaaaggaaatttaactgagctctagtggtcccgtttgctaaagtataacattagtgttttattctaaacaagtttaggcttttctctttgctaagataaattcacatttttaagctttgaaaatgccatatatattatttatttatttatttatttatttatttatttttgaggcagggtctcactgtctggctcaggttggagtacagtggtgtgaccatggttcactgcagctttgacctctcaggctcaagctgttctcctgccgcagcctcctgagtagctgggactacaggctcatgccaccacacactgctaatttttgtatttttggtagagacgggatttccctatgttgcccagggtggtcttgaactcctaggctcaagtgatccacccacctcagtctccccaagtgctgggattacaggcgtgaaccactgtgcccagccaaaaatgctattctgttaatagcttcttagagtttttgttttttgttatgtggccttaaagcagagcagatccatgtgtatagggaccagtcacaaatacattatagaggttgccctcaaacttcatttgtacctttctggcattagctttctctttcaaatgatataaggaggcagcagcatgatgtctttgttccctgacagagggaaatctaggaatcggttatctgccttcagagaagtctggaatgagagtacaaggaaactatgaatctcaccactttgagagcccatttaccaggaggaaatgaatgagaaagagtatgagttcagatcagcttgggaactaaagccatggccatgcctgggagaaaggaacttaaggtgaagacaaaaatcagtggggaagtatacactctattatcaacaaaaatcagatgatcaatttgtatttattacaggaccagagtgtacagaactgagtggccttcaaggcagctcagggcattgaactctgcccttgattcttttgggtgaagacattcagtgccacactaccagtatgtaatgtttgcacctggcaaaagtggtggtcaagatctaccctgaatttactgaaaaatgtctcctcttttctttctcaactactgtggttattaggctatattctttcagtaccttcacactttaagaattgttaattattcttgttttttctgttatcatttatactgataaaatgaattataagcct

SEQ ID NO: 12575 - protein, 61 aa, Homo sapiens [sequence omitted]

SEQ ID NO: 12576 - DNA, 1159 bp, Homo sapiens
tcccgcgcatgctctatggggtagagacgctaggccggcactgcctaggtgggccgggcggtgcgagggtcgcctttcagcctttacctctacccactgaaatggagtaggtcggtgagcgccgatctgctggagaatctcattatcccatcggcgctctgcctgctcctggcctccaagcctctgaagcccctcgggtttcagctgccggctaccctcgagcccgtggtgcccacgagagaggcgactttacgtcagcggccctgggctgagatttgagaacgcgaccaagtggagaatgttggagccagattttaaaatccttgtcttccttctgcgtgctacttgatctaaatgagatacggcaaagtcacagaacctgtttttatgtttttgcctgattcatacgggcttctccggtgaagatgggcctgaagtaacgcttgggttgcttctgacgttataactcatcctgtagctgcagcaaccgtggtccttgcaacctcataaaaatgttgccagcattgtttcgatagtgctgcttaattcttggaaggttcttcggacttcacacattccagcagtagctctctcagctcctgtcctgcacagctttgaagtgctggtgatgtcattgaactcttaagtgcaagatgaaacaagtctttctggggttctaagtaggacacagccctggtgatggctttctgaggatgacacgatggaggcttctccaatagctctaaaactgcggtgtggaaaacattcggcagcctcaaagagcggtcttgttgaccccaactatatcatttttcatcaaaatcattcttgtaaagaatgaccaggcaacactctttgaaaattggaggccatttgcagctgctctctgttgaggaaagtgaataatagggtgccctcaaggaattgcaaaggtatcactcaacagaaactttcgtgtctgaagaaaactagatcattttatcatggtaggcatgctgatatgtttgctttaataaaatgccatatttctgcctttaatctcttgtcaacccgctattaaaaagccccaaagtgcatgtgtgcagcgcatgtaaacacttgtggttttgaggttaccacagaacatactaataaagcatgtaatttgtgttttgtgcac

SEQ ID NO: 12577 - protein, 39 aa, Homo sapiens
MEASPIALKLRCGKHSAASKSGLVDPNYIIFHQNHSCKE

SEQ ID NO: 12578 - DNA, 446 bp, Homo sapiens
agggaatgaagagacaagagctctctttatgccacgtgaggatacagcaaggccccaatctgcaagccaggaagagtcgtcacgagaaccagaccatgcaggaactctgatcgtggacatttcaacctccagaactgtgatccaaaatgcatatgtatctttggaagaaactctgaagtaaaggccggaatattctttgtttaaaacattaaaaacaaaacagaccaaagcatcaagcaagaagtttcctggcaataaactaagcacagcattattttttaaggaacacaaattaagtgttcaacctgtggcaaatttgtactttctccctgaattatgttgttatcaaagaaaaaaattgggaagcatggcaaaatatcatcaaaactgaaactagaattaaacaaaactaaattaaaatgaaataaaatgatgtccattcttaa

SEQ ID NO: 12579 - protein, 50 aa, Homo sapiens
MPREDTARPQSASQEESSREPDHAGTLIVDISTSRTVIQNAYVSLEETLK

SEQ ID NO: 12580 - DNA, 654 bp, Homo sapiens
gaaagattagctgagtttttctgctgacttaactgttgaatagcatcatcctcaggcactaccaaaagtgtttagagcactctgttgaaaatggcagtatttgaagaaactggatgtcacttaaaatatgatccttggataaacatcacatgctgctggccttcttacaaaatgagtgtgagtgaagtgcttggctctgcgagatggtcctggaatatcttcaccactcttcacaattacgtcctcttgcattcccactgatccttcagaattgtgtggcctttcaactttctgaaaggccttcactgtctcttaattcaaattctccacatgtaaatacaagtcagatcaccttacaatttaatctttaagcaaaactgtaaatcatcatttcccgcgacattacaattgttgggggaaaggtgtttggtgtcacatctaatggcttgaaaactcggagcatctctggacacagtcaatatccaggtctcaaatatgcatttactgtgtttattataatgactgcctttgtattcactgcaatcattttctactgtttcttcctttgtgtaatcatttcttcccttcccctccattgtatttttttagagtaattctatattctgtttttgaatacacacttctctttctttt

SEQ ID NO: 12581 - protein, 56 aa, Homo sapiens
MAVFEETGCHLKYDPWINITCCWPSYKMSVSEVLGSARWSWNIFTTLHNYVLLHSH

SEQ ID NO: 12582 - DNA, 1204 bp, Homo sapiens
actaagcagaagaaatccaagtcggctgaatttctgatggttaaagaagatagagaagctacagaaggcactggaaatccagcttttaacatgagcagtccagatctctcagcatgtcagactgcagaaaagaaagttattagacacgacatgccggatcgcacccttgcagctcaccaacaaaaattcaggctgccagcctctgcagaaccaaaaggaaatgaatacggcagaaattactttgacccactgatggatgaggaaataaacccaaggcagtgtgcgacggaggtcagcagagaaggatttgaaattcgaaggggaaggcctcaacgaatacattcctatgtcacttttaaagactggtaaaacatttgagaaaactccaagtcaaccattcattgcagacctaaatatttgtaaaaaggacagtgcagcccagcttggtaccctcacagaagtaactaatgactcaaagggagcagcaggaccccgctggaagttcctgcgtaattcaagaaccccaccttttgtggaaaatgagcagtctcaaccacctcagcctctgcaaatccagatcagatgcctgaggggccttaaagacaaggctcctccaggctcttatgtcctcaaagtgtccaagtgtccctgcttggtcgactgggaggctgtgtcttgcagtggtggcaaacggagcaactaaagaccagaaaacactccgtcaggcacaatggaaacttttatgatgtgggggtgtatttccacgaaaacctttatgtgggagcattcctaaaaaaatcggtccctgttctatggactatgatcccaatctcttagaagaagacgatgaactacactctcagggagatagcctgacggatcattctgtgaaaggaaaatcaactgtttggagaattggagaagctgaagattattcacaggacatatcttacttggaggaactggaggaacaccgattttctgtttgctgttcttcagttgctgatagtagatatggagacttcttcaagcatctccattttgtgctggtatcagcgtcttcagaacttcagttatctcaatggcaaagccagggcttctggtacattatactgctgatgttttttctctggttcctgaggctctacctgcattacttgggccagtggcttttcctccaggccatttcaactcctgttacaaa

SEQ ID NO: 12583 - protein, 129 aa, Homo sapiens
MDYDPNLLEEDDELHSQGDSLTDHSVKGKSTVWRIGEAEDYSQDISYLEELEEHRFSVCCSSVADSRYGDFFKHLHFVLVSASSELQLSQWQSQGFWYIILLMFFLWFLRLYLHYLGQWLFLQAISTPV

SEQ ID NO: 12584 - DNA, 919 bp, Homo sapiens
agggcaagaagctgagaacatggagagagagaagtttcagcagaaggctctgaagcaaactaagcagaagaaatccaagtcggctgaatttctgatggttaaagaagatagagaagctacagaaggcactggaaatccagcttttaacatgagcagtccagatctctcagcatgtcagactgcagaaaagaaagttattagacacgacatgccggatcgcacccttgcagctcaccaacaaaaattcaggctgccagcctctgcagaaccaaaaggaaatgaatacggcagaaattactttgacccactgatggatgaggaaataaacccaaggcagtgtgcgacggaggtcagcagagaagtttgtctaatggctaaaggagagaaagcagaatcaggagtggataatacagctggcctttcagagaaggaaacacagaagaatcctcgtgcaccaatggatgaggcagacgttaaatccgcagcacactcttctcaggggagcattcctaaaaaaatcggtccctgttctatggactatgatcccaatctcttagaagaagacgatgaactacactctcagggagatagcctgacggatcattctgtgaaaggaaaatcaactgtttggagaattggagaagctgaagattattcacaggacatatcttacttggaggaactggaggaacaccgattttctgtttgctgttcttcagttgctgatagtagatatggagacttcttcaagcatctccattttgtgctggtatcagcgtcttcagaacttcagttatctcaatggcaaagccagggcttctggtacattatactgctgatgttttttctctggttcctgaggctctacctgcattacttgggccagtggcttttcctccaggccatttcaactcctgtt

SEQ ID NO: 12585 - protein, 299 aa, Homo sapiens
MEREKFQQKALKQTKQKKSKSAEFLMVKEDREATEGTGNPAFNMSSPDLSACQTAEKKVIRHDMPDRTLAAHQQKFRLPASAEPKGNEYGRNYFDPLMDEEINPRQCATEVSREVCLMAKGEKAESGVDNTAGLSEKETQKNPRAPMDEADVKSAAHSSQGSIPKKIGPCSMDYDPNLLEEDDELHSQGDSLTDHSVKGKSTVWRIGEAEDYSQDISYLEELEEHRFSVCCSSVADSRYGDFFKHLHFVLVSASSELQLSQWQSQGFWYIILLMFFLWFLRLYLHYLGQWLFLQAISTP

SEQ ID NO: 12586 - DNA, 559 bp, Homo sapiens
atccaagtcggctgaatttctgatggttaaagaagatagagaagctacagaaggcactggaaatccagcttttaacatgagcagtccagatctctcagcatgtcagactgcagaaaagaaagttattagacacgacatgccggatcgcacccttgcagctcaccaacaaaaattcaggctgccagcctctgcagaaccaaaaggaaatgaatacggcagaaattactttgacccactgatggatgaggaaataaacccaaggcagtgtgcgacggaggtcagcagagaaggtgctccctcaaaggaaaaatggagcattcctaaaaaaatcggtccctgttctatggactatgatcccaatctcttagaagaagacgatgaactacactctcagggagatagcctgacggatcattctgtgaaaggaaaatcaactgtttggagaattggagaagctgaagattattcacaggacatatcttacttggaggaactggaggaacaccgattttctgtttgctgttcttcagttgctgatagtagatatggagacttcttc

SEQ ID NO: 12587 - protein, 178 aa, Homo sapiens
MVKEDREATEGTGNPAFNMSSPDLSACQTAEKKVIRHDMPDRTLAAHQQKFRLPASAEPKGNEYGRNYFDPLMDEEINPRQCATEVSREGAPSKEKWSIPKKIGPCSMDYDPNLLEEDDELHSQGDSLTDHSVKGKSTVWRIGEAEDYSQDISYLEELEEHRFSVCCSSVADSRYGDF

SEQ ID NO: 12588 - DNA, 708 bp, Homo sapiens
agagactggattgaaatctgtgcattgccaagggcaagaagctgagaacatggagagagagaagtttcagcagaaggctctgaagcaaactaagcagaagaaatccaagtcggctgaatttctgatggttaaagaagatagagaagctacagaaggcactggaaatccagcttttaacatgagcagtccagatctctcagcatgtcagactgcagaaaagaaagttattagacacgacatgccggatcgcacccttgcagctcaccaacaaaaattcaggctgccagcctctgcagaaccaaaaggaaatgaatacggcagaaattactttgacccactgatggatgaggaaataaacccaaggcagtgtgcgacggaggtcagcagagaagggagcattcctaaaaaaatcggtccctgttctatggactatgatcccaatctcttagaagaagacgatgaactacactctcagggagatagcctgacggatcattctgtgaaaggaaaatcaactgtttggagaattggagaagctgaagattattcacaggacatatcttacttggaggaactggaggaacaccgattttctgtttgaagcagttcccttctatgttgcagtctccttgaaggcaaaggttgtgcactgtcatgttttgaagcccagtatcgctgagaacaatgacagacacatgcagtggctca

SEQ ID NO: 12589 - protein, 183 aa, Homo sapiens
MEREKFQQKALKQTKQKKSKSAEFLMVKEDREATEGTGNPAFNMSSPDLSACQTAEKKVIRHDMPDRTLAAHQQKFRLPASAEPKGNEYGRNYFDPLMDEEINPRQCATEVSREGSIPKKIGPCSMDYDPNLLEEDDELHSQGDSLTDHSVKGKSTVWRIGEAEDYSQDISYLEELEEHRFSV

SEQ ID NO: 12590 - DNA, 973 bp, Homo sapiens
tgaagcaaactaagcagaagaaatccaagtcggctgaatttctgatggttaaagaagatagagaagctacagaaggcactggaaatccagcttttaacatgagcagtccagatctctcagcatgtcagactgcagaaaagaaagttattagacacgacatgccggatcgcacccttgcagctcaccaacaaaaattcaggctgccagcctctgcagaaccaaaaggaaatgaatacggcagaaattactttgacccactgatggatgaggaaataaacccaaggcagtgtgcgacggaggtcagcagagaagctttttgatgagagcagacaaggagaaccccaagatgagagtggccgggaggagactctgaattctgaagcacctgggagttccaataagagtcacgaaatccacaaagaagccagcgaagccaccactgctcaccttgaggagttccaaagatctcagaaaactataattctgcttggaagttctccattagaacaggccagactccaaacatctaggaatgaaaaatgcccatgggcataagtgtcctgaacattcttatggatttgggatttgaaattcgaaggggaaggcctcaacgaatacattcctatgtcacttttaaagactggtaaaacatttgagaaaactccaagtcaaccattcattgcagacctaaatatttgtaaaaaggacagtgcagcccagcttggtaccctcacagaagtaactaatgactcaaagggagcagcaggaccccgctggaagttcctgcgtaattcaagaaccccaccttttgtggaaaatgagcagtctcaaccacctcagcctctgcaaatccagatcagatgcctgaggggccttaaagacaaggctcctccaggctcttatgtcctcaaagtgtccaagtgtccctgcttggtcgactgggaggctgtgtcttgcagtggtggcaaacgga

SEQ ID NO: 12591 - protein, 115 aa, Homo sapiens
MSLLKTGKTFEKTPSQPFIADLNICKKDSAAQLGTLTEVTNDSKGAAGPRWKFLRNSRTPPFVENEQSQPPQPLQIQIRCLRGLKDKAPPGSYVLKVSKCPCLVDWEAVSCSGGK

SEQ ID NO: 12592 - DNA, 1028 bp, Homo sapiens
tcatcttcgtctcacccagaatcccatttggtctgtgtcctcttccctactctgtttatcgtggccttggctgtagcagggggaagagacaagtctggaaagaaccctgcccttggagagactggattgaaatctgtgcattgccaagggcaagaagctgagaacatggagagagagaagtttcagcagaaggctctgaagcaaactaagcagaagaaatccaagtcggctgaatttctgatggttaaagaagatagagaagctacagaaggcactggaaatccagcttttaacatgagcagtccagatctctcagcatgtcagactgcagaaaagaaagttattagacacgacatgccggatcgcacccttgcagctcaccaacaaaaattcaggctgccagcctctgcagaaccaaaaggaaatgaatacggcagaaattactttgacccactgatggatgaggaaataaacccaaggcagtgtgcgacggaggtcagcagagaagatgacgatagaattttctataatcgattaacgaagctttttgatgagagcagacaaggagaaccccaagatgagagtggccgggaggagactctgaattctgaagcacctgggagttccaataagagtcacgaaatccacaaagaagccagcgaagccaccactgctcaccttgaggagttccaaagatctcagaaaactataattctgcttggaagttctccattagaacaggaaattagatctacttcattgcattgtatggaggatgagatgagtcatccatggatactcttgctcaaagtaactgctgtaatcagaagcaggaggtactatagagagcaaagattctaaaacccattctcaggtcagtgctcgcaatgttcttatgttcactgtgtcgggaagttccatgaacacacaaggcaacatcataagtaggaaaaaccttcagatttggtgttagaactcagagctgtcatccttgattcagatatttatgtgaacttaaacctctttgt

SEQ ID NO: 12593 - protein, 231 aa, Homo sapiens; identical to SEQ ID NO: 1239

SEQ ID NO: 12594 - DNA, 8192 bp, Homo sapiens
ctactacagtggcggagccgtacaggacctgtttcactgcagggggatccaaaacaagccccgtggagcagcagccagagcaacagcagccgcaagacattgtttctctccctctgcccccccttccccacgcaaccccagatccatttacactttacagttttacctcacaaaaactactacaagcaccaagctccctgatggaaaggagcatcgtgcatcaagtcaccagggtggtccattcaagctgcagatttgtttgtcatccttgtacagcaatctcctcctccactgccactacagggaagtgcatcacatgtcagcatactggagcatagtgaaagagtctattttgaagcttcaaacttagtgctgctgcagaccaggaacaagagagaaagagtggatttcagcctgcacggatggtcttgaaacacaaatggtttttggtctaggcgttttacactgagattctccactgccaccctttctactcaagcaaaatcttcgtgaaaagatctgctgcaaggaactgatagcttatggttctccattgtgatgaaagcacatggtacagttttccaaagaaattagaccattttcttcgtgagaaagaaatcgacgtgctgttttcatagggtatttctcacttctctgtgaaaggaagaaagaacacgcctgagcccaagagccctcaggagccctccagagcctgtgggaagtctccatggtgaagtataggctgaggctacctgtgaacagtacgcagtgaatgttcatccagagctgctgttggcggattgtacccacggggagatgattcctcatgaagagcctggatcccctacagaaatcaaatgtgactttccgtttatcagactaaaatcagagccatccagacagtgaaacagtcaccgtggaggggggacggcgaaaaatgaaatccaaccaagagcggagcaacgaatgcctgcctcccaagaagcgcgagatccccgccaccagccggtcctccgaggagaaggcccctaccctgcccagcgacaaccaccgggtggagggcacagcatggctcccgggcaaccctggtggccggggccacgggggcgggaggcatgggccggcagggacctcggtggagcttggtttacaacagggaataggtttacacaaagcattgtccacagggctggactactccccgcccagcgctcccaggtctgtccccgtggccaccacgctgcctgccgcgtacgccaccccgcagccagggaccccggtgtcccccgtgcagtacgctcacctgccgcacaccttccagttcattgggtcctcccaatacagtggaacctatgccagcttcatcccatcacagctgatccccccaaccgccaaccccgtcaccagtgcagtggcctcggccgcaggggccaccactccatcccagcgctcccagctggaggcctattccactctgctggccaacatgggcagtctgagccagacgccgggacacaaggctgagcagcagcagcagcagcagcagcagcagcagcagcagcatcagcatcagcagcagcagcagcagcagcagcagcagcagcagcagcagcacctcagcagggctccggggctcatcaccccggggtcccccccaccagcccagcagaaccagtacgtccacatttccagttctccgcagaacaccggccgcaccgcctctcctccggccatccccgtccacctccacccccaccagacgatgatcccacacacgctcaccctggggcccccctcccaggtcgtcatgcaatacgccgactccggcagccactttgtccctcgggaggccaccaagaaagctgagagcagccggctgcagcaggccatccaggccaaggaggtcctgaacggtgagatggagaagagccggcggtacggggccccgtcctcagccgacctgggcctgggcaaggcaggcggcaagtcggttcctcacccgtacgagtccaggcacgtggtggtccacccgagcccctcagactacagcagtcgtgatccttcgggggtccgggcctctgtgatggtcctgcccaacagcaacacgcccgcagctgacctggaggtgcaacaggccactcatcgtgaagcctccccttctaccctcaacgacaaaagtggcctgcatttagggaagcctggccaccggtcctacgcgctctcaccccacacggtcattcagaccacacacagtgcttcagagccactcccggtgggactgccagccacggccttctacgcagggactcaaccccctgtcatcggctacctgagcggccagcagcaagcaatcacctacgccggcagcctgccccagcacctggtgatccccggcacacagcccctgctcatcccggtcggcagcactgacatggaagcgtcgggggcagccccggccatagtcacgtcatccccccagtttgctgcagtgcctcacacgttcgtcaccaccgcccttcccaagagcgagaacttcaaccctgaggccctggtcacccaggccgcctacccagccatggtgcaggcccagatccacctgcctgtggtgcagtccgtggcctccccggcggcggctccccctacgctgcctccctacttcatgaaaggctccatcatccagttggccaacggggagctaaagaaggtggaagacttaaaaacagaagatttcatccagagtgcagagataagcaacgacctgaagatcgactccagcaccgtagagaggattgaagacagccatagcccgggcgtggccgtgatacagttcgccgtcggggagcaccgagcccaggtcagcgttgaagttttggtagagtatcctttttttgtgtttggacagggctggtcatcctgctgtccggagagaaccagccagctctttgatttgccgtgttccaaactctcagttggggatgtctgcatctcgcttaccctcaagaacctgaagaacggctctgttaaaaagggccagcccgtggatcccgccagcgtcctgctgaagcactcaaaggccgacggcctggcgggcagcagacacaggtatgccgagcaggaaaacggaatcaaccaggggagtgcccagatgctctctgagaatggcgaactgaagtttccagagaaaatgggattgcctgcagcgcccttcctcaccaaaatagaacccagcaagcccgcggcaacgaggaagaggaggtggtcggcgccagagagccgcaaactggagaagtcagaagacgaaccacctttgactcttcctaagccttctctaattcctcaggaggttaagatttgcattgaaggccggtctaatgtaggcaagtagaggcagcgtgggggaaaggaaacgtggctctcccttatcatttgtatccagattactgtactgtaggctaaaataacacagtatttacatgttatcttcttaattttaggtttctgttctaaccttgtcattagagttacagcaggtgtgtcgcaggagactggtgcatatgctttttccacgagtgtctgtcagtgagcgggcgggaggaagggcacagcaggagcggtcagggctccaggcatccccggggaagaaaggaacggggcttcacagtgcctgccttctctagcggcacagaagcagccgggggcgctgactcccgctagtgtcaggagaaaagtcccgtgggaagggtcctgcaggggtgcagggttgcacgcatgtgggggtgcacaggcgctgtggcggcgagtgagggtctctttttctctgcctccctctgcctcactctcttgctatcggcatgggccgggggggttcagagcagtgtcctcctggggttcccacgtgcaaaatcaacatcaggaacccagcttcagggcatcgcggagacgcgtcagatggcagatttggaaagttaaccatttaaaagaacatttttctctccaacatattttacaataaaagcaacttttaattgtatagatatatatttccccctatggggcctgactgcactgatatatattttttttaaagagcaactgccacatgcgggatttcatttctgctttttactagtgcagcgatgtcaccagggtgttgtggtggacagggaagcccctgctgtcatggccccacatggggtaaggggggttgggggtgggggagagggagagagcgaacacccacgctggtttctgtgcagtgttaggaaaaccaatcaggttattgcattgacttcactcccaagaggtagatgcaaactgcccttcagtgagagcaacagaagctcttcacgttgagtttgcgaaatctttttgtctttgaactctagtactgtttatagttcatgactatggacaactcgggtgccactttttttttttttcagattccagtgtgacatgaggaattagattttgaagatgagcatatattactatctttaagcatttaaaaatactgttcacactttattaccaagcatcttggtctctcattcaacaagtactgtatctcactttaaactctttggggaaaaaacaaaaacaaaaaaaactaagttgctttctttttttcaacactgtaactacatttcagctctgcagaattgctgaagagcaagatattgaaagtttcaatgtggtttaaagggatgaatgtgaattatgaactagtatgtgacaataaatgaccaccaagtactacctgacgggaggcacttttcactttgatgtctgagaatcagttcaaggcatatgcagagttggcagagaaactgagagaaaagggatggagaagagaatactcatttttgtccagtgtttttctttttaagatgaacttttaaagaaccttgcgatttgcacatattgagtttataacttgtgtgatattcctgcagtttttatccaataacattgtgggaaaggtttgggggactgaacgagcataaataaatgtagcaaaatttctttctaacctgcctaaactctaggccattttataaggttatgttcctttgaaaattcattttggtctttttaccacatctgtcacaaaaagccaggtcttagcgggctcttagaaactctgagaattttcttcagattcattgagagagttttccataaagacatttatatatgtgagcaagattttttttaaacaattactttattattgttgttattaatgttattttcagaatggcttttttttttctattcaaaatcaaatcgagatttaatgtttggtacaaacccagaaagggtatttcatagtttttaaacctttcattcccagagatccgaaatatcatttgtgggttttgaatgcatctttaaagtgctttaaaaaaaagttttataagtagggagaaatttttaaatattcttacttggatggctgcaactaaactgaacaaatacctgacttttcttttaccccattgaaaatagtactttcttcgtttcacaaattaaaaaaaaaatctggtatcaacccacattttggctgtctagtattcatttacatttagggttcaccaggactaatgatttttataaaccgttttctggggtgtaccaaaaacatttgaataggtttagaatagctagaatagttccttgactttcctcgaatttcattaccctctcagcatgcttgcagagagctgggtgggctcattcttgcagtcatactgcttatttagtgctgtattttttaaacgtttctgttcagagaacttgcttaatcttccatatattctgctcagggcacttgcaattattaggttttgtttttctttttgttttttagcctttgatggtaagaggaatacgggctgccacatagactttgttctcattaatatcactatttacaactcatgtggactcagaaaaacacacaccaccttttggcttacttcgagtattgaattgactggatccactaaaccaacactaagatgggaaaacacacatggtttggagcaataggaacatcatcataatttttgtggttctatttcaggtataggaattataaaataattggttctttctaaacacttgtcccatttcattctcttgcttttttagcatgtgcaatactttctgtgccaatagagtctgaccagtgtgctatatagttaaagctcattcccttttggctttttccttgtttggttgatcttccccattctggccagagcagggctggagggaaggagccaggagggagagagcctcccacctttcccctgctgcggatgctgagtgctggggcggggagccttcaggagccccgtgcgtctgccgccacgttgcagaaagagccagccaaggagacccgggggaggaaccgcagtgtcccctgtcaccacacggaatagtgaatgtggagtgtggagaggaaggaggcagattcatttctaagacgcactctggagccatgtagcctggagtcaacccattttccacggtcttttctgcaagtgggcaggcccctcctcggggtctgtgtccttgagacttggagccctgcctctgagcctggacgggaagtgtggcctgttgtgtgtgtgcgttctgagcgtgttggccagtggctgtggaggggaccacctgccacccacggtcaccactcccttgtggcagctttctcttcaaataggaagaacgcacagagggcaggagcctcctgtttgcagacgttggcgggccccgaggctcccagagcagcctctgtcaccgcttctgtgtagcaaacattaacgatgacaggggtagaaattcttcggtgccgttcagcttacaaggatcagccatgtgcctctgtactatgtccactttgcaatatttaccgacagccgtcttttgttctttctttcctgttttccatttttaaactagtaacagcaggccttttgcgtttacaatggaacacaatcaccaagaaattagtcagggcgaaaagaaaaaaataatactattaataagaaaccaacaaacaagaacctctctttctagggatttctaaatatataaaatgactgttccttagaatgtttaacttaagaattatttcagtttgtctgggccacactggggcagaggggggagggagggatacagagatggatgccacttacctcagatcttttaaagtggaaatccaaattgaattttcatttggactttcaggataattttctatgttggtcaacttttcgttttccctaactcacccagtttagtttgggatgatttgatttctgttgttgttgatcccatttctaacttggaattgtgagcctctatgttttctgttaggtgagtgtgttgggttttttccccccaccaggaagtggcagcatccctccttctcccctaaagggactctgcggaacctttcacacctctttctcagggacggggcaggtgtgtgtgtggtacactgacgtgtccagaagcagcactttgactgctctggagtagggttgtacaatttcaaggaatgtttggatttcctgcatcttgtggattactccttagataccgcatagattgcaatataatgctgcatgttcaagatgaacagtagctcctagtaatcataaaatccactctttgcacagtttgatctttactgaaatatgttgccaaaatttatttttgttgttgtagctctggattttgttttgttttgttttttaaggaaacgattgacaataccctttaacatctgtgactactaaggaaacctatttctttcatagagagaaaaatctccaatgcttttgaagacactaataccgtgctatttcagatatgggtgaggaagcagagctctcggtaccgaaggccgggcttcttgagctgtgttggttgtcatggctactgtttcatgaaccacaagcagctcaacagactggtctgttgccttctgaaaccctttgcacttcaatttgcaccaggtgaaaacagggccagcagactccatggcccaattcggtttcttcggtggtgatgtgaaaggagagaattacactttttttttttttaagtggcgtggaggcctttgcttccacatttgtttttaacccagaatttctgaaatagagaatttaagaaca

SEQ ID NO: 12595 - protein, 815 aa, Homo sapiens; identical to SEQ ID NO: 1241

SEQ ID NO: 12596 - DNA, 1290 bp, Homo sapiens
cgtaggcagaaaaatagtatcattcatgttgtactcttttatattcattcagtttttttcttaaacctacattatagttctttctggttctagttattttataaatatgatacagctatagcaagttatgacctaacttgttcacagtcactatttatgtaaagaaatgattcattcatttattcattgtgaatttttttaaaactactgcatggtgctgtgggaatggaagtgaataagagctaccggaaggcagttattttcttcctggtcaggcaggggaaagaagaaactctctgaaataatgaatacgaatagaatggggttctaacagtgttctaacagtgaaggaattcagaagagtgacgctgagtaggagtgatcaggaaagactttgaggaggagggatcacttgagttgagctctgctgactagattgcatttctgtgggaagagatggatggagcatgaggaaggccatgtgtgtgtctgggacataacaagccaatgcacgcatactggagcatagtgaaagagtctattttgaagcttcaaacttagtgctgctgcagaccaggaacaagagagaaagagtggatttcagcctgcacggatggtcttgaaacacaaatggtttttggtctaggcgttttacactgagattctccactgccaccctttctactcaagcaaaatcttcgtgaaaagatctgctgcaaggaactgatagcttatggttctccattgtgatgaaagcacatggtacagttttccaaagaaattagaccattttcttcgtgagaaagaaatcgacgtgctgttttcatagggtatttctcacttctctgtgaaaggaagaaagaacacgcctgagcccaagagccctcaggagccctccagagcctgtgggaagtctccatggtgaagtataggctgaggctacctgtgaacagtacgcagtgaatgttatctgatgcacaaaggaaaataataatacaaaacccataacctattcattgtattgttgcggtagatcgagctacatgctgcacagcaaaagaccttctttgcacttctttcaagcagaattattgctgtatattcactctgaactgagagatcattgcaaaaaaaaaaaagaagaagaagaagagaagaaaagaaaaaagaaataggttaagcaaattttgtggtggtgcttatgtgtgcacagacatgcatgaggcctccgcatcttccaaacttggaaagcatattttaacagcacaaatatatctacatgtttgatct

SEQ ID NO: 12597 - protein, 43 aa, Homo sapiens
MLHSKRPSLHFFQAELLLYIHSELRDHCKKKKEEEEEKKRKKK

SEQ ID NO: 12598 - DNA, 629 bp, Homo sapiens
agacatcatttctactacagtggcggagccgtacaggacctgtttcactgcagggggatccaaaacaagccccgtggagcagcagccagagcaacagcagccgcaagacattgtttctctccctctgcccccccttccccacgcaaccccagatccatttacactttacaaacatcagtgctctatcctcatgtccttctaagaatcaaaagttttaacctcacagaatccagcgtgtggcttgtgagtgagactcctttttccatgtgataaccggtctgctttggggaggcaaaagaatcttaccgacacgtacatattttaggatgggctctgagccaattcatcaagccaactcctcactttgaaacaagaaagtgaagaggatgtttcatgattgtggaatacctgccagaggaagaatctaccgaagttcagtcaactattaattggaaaggaggcagcagactgaggagatagagaatctttgctctcaggtggatggaggttggagtcctcaatctgtcacttgtgggtacattatgtagctccttcacctccatttctttatttattagaaggcgggtaataaaagtgtccactgcctaggatggttctagggcttagag

SEQ ID NO: 12599 - protein, 35 aa, Homo sapiens
MEVGVLNLSLVGTLCSSFTSISLFIRRRVIKVSTA

SEQ ID NO: 12600 - DNA, 3362 bp, Homo sapiens
gtataccgcagacatcatttctactacagtggcggagccgtacaggacctgtttcactgcagggggatccaaaacaagccccgtggagcagcagccagagcaacagcagccgcaagacattgtttctctccctctgcccccccttccccacgcaaccccagatccatttacactttacagagcatcgtgcatcaagtcaccagggtggtccattcaagctgcagatttgtttgtcatccttgtacagcaatctcctcctccactgccactacagggaagtgcatcacatgtcaggtcacagaacagaaagtgctggtggacatctcttcttgccccaagatcttcgttggaagtccccgggacttggtgtctttgccgttcaaagtgtttatgaactcgccaggaggcataatgtgtcaccattttattctgggccaccctaaaggatgacacccagcttcagagacctcctcttggacgacatccctgagaatcaatgttttagctgtcccatagtctgacgtctgtttccgaccgcttttgagctggcgcaggcttagtcattaatggccaggacgatgttaaatgttctgcctgattggcttgcagctacacaccttttgtcatttgcagagcagcaactccctcttgagctcttggggagtctttacacaaatacactagaaaaaaggcacccatccattttttttccatcttggcattagctcacaggcatagtcctgggatgacctggagtagaggcagtggaggataaattcatcttgcacagacttgtttgtgctagttctagcctgtctctcgccacagatctagcttttaaatactcaagtgattggttttgtgtaggaatgtgtggattgttggattggaagaattttctccctggatttctagtgtttacataagcagatacaaaaaaaatttgatcactgatttaaatagcagggcttattttaaaaagttatgggtgcttcaaggtggtacagaataaaaatgtcagggttttttttttttttttttttaacaagtcgtaacacaaccaaaatgtatatattaatgttttgtcaggaaagggtcaaaatggaaaatttgcaacaaagacaaactacaatagaacaagtgcaaacagaagctgacaaatatatgcccctcgttgggagttcagcccatggaatgttatgtaggacaaaaggaatggaagagatatttcagtaacattttgttctctgtcaaaaaccttctgaaatataaatctgctgtgtattggagaatggatacagcaattgattcaagttgaatagctttcatttaactagaatatcccacagaaagcagttcttgttctgacaaccatatttttgctttctttcacttaaagaaaattgaattcatgtttacatatcttatagggttgttttatggacaaagacacgggtcaaaccccatcacagtggctagtgttacaacaaatagaaacatttctaaatgaaataacatttctaagccagggccagtgcctgcagtaataatactaggttggtattatgaagccatttgcaactataaataattcagtcatagatgtgctttttttaaaatcctggttttttaaaattctagtcttttgccaatacacacacccatacacatacttcacctatttgcataatagaggaggaatatgaatatgtatataataaagtcactttattttggactttctgaaacagattaccttttttcttctcctcatgatggctccctgagttgcttccaattgttgaaattccataattacccacaaatatggatgtgcccttctaagggtcttgccatgtcaaccagcccagctgaaagctaatagccagtgttagcggtttaaggaactgagcttcagaattgagagcccccagcaaaggaagttctgtttttattctccatttctactctcctcaaggagaaattaggtgtttattgttttgttttgttttttaaattcccagatcattctggcattggtcctggattcgctgcaaatgtaatttttagcaacatctattactcctgaaatattttggctcttcgtggcctgtatgattcagtagactctgaggttttccaagtacattaaggacttaaatacagaatgtcttaaaattttagggctattgatcaagagaaagcttctcgaggaataaagttctgttaggttttagccctattctgctttcaaaattcttaactggatgccgtctattttgttttctttctgtgtttataactaatttgctacttgggtttattgttttcttacttagaaactacttttttttttgttttgtaaatgcacagcacttaaaaatataaaacagttccaaacagttccaacctgttcattgtttataccttgaccatcttttctgtcttattgctgaaccatcgcttctctttctacttctcttctgggatttcatcttgctcagctaaaattctagtgtgttattctgaatattatggctggagtttcctgaccaacttcttgcatctgagtccatttcctgtgcttaaggctgctggcattccattcactgctcctagtcaaaactgaaacttctcctgctaatgagattaggccttacaacactattaatttcttcctctctatttcttgctccattgttatttctcagagatgaaaatctatttgtcattatgagattcattttggcatcacttactaaagttcccttggatttttctgttcttcatacaccctacagcttcaaactgcaacagtcatcaactggtctttgacaaattagttgtctctacacatggtttacaatattacactagctgtttaaaaataattaagcttctttctgtgttctttgctgtgggtcaggaactttacttcctttgccatgcaacacagaagttaatcacaaatgggtcctctgaaccaaataattaaaaatagagcaaagtttctgaaccaggcggttggcagaaacgtctgtacttccatctgtgcatggttaggaaaatatttcacgatatttaaatagcatcagctttgctctcttttgtgtgagagtgtgtctgtgtgtctatgcgtaattcattgctttgaaggtttgtttgactgttagataatcatataaaaaaagttactggcaaggaaacaggaaagcaaatccaggtgttttgtgcatacattctttatttaccagtctctgtgaaggagcaatgatcttgcttttgcttttctctctgactgaaagtttttgccttgttatgtgctgcagaaaactaaataacattgcattttgactttgaaa

SEQ ID NO: 12601 - protein, 51 aa, Homo sapiens
MSGHRTESAGGHLFLPQDLRWKSPGLGVFAVQSVYELARRHNVSPFYSGPP

SEQ ID NO: 12602 - DNA, 1744 bp, Homo sapiens
tataccgcagacatcatttctactacagtggcggagccgtacaggacctgtttcactgcagggggatccaaaacaagccccgtggagcagcagccagagcaacagcagccgcaagacattgtttctctccctctgcccccccttccccacgcaaccccagatccatttacactttacagagcatcgtgcatcaagtcaccagggtggtccattcaagctgcagatttgtttgtcatccttgtacagcaatctcctcctccactgccactacagggaagtgcatcacatgtcaggtcacagaacagaaagtgctggtggacatctcttcttgccccaagatcttcgttggaagtccccgggacttggtgtctttgccgttcaaagtgtttatgaactcgccaggaggcataatgtgtcaccattttattctgggccaccctaaaggatgacacccagcttcagagacctcctcttggacgacatccctgagaatcaatgttttagctgtcccatagtctgacgtctgtttccgaccgcttttgagctggcgcaggcttagtcattaatggccaggacgatgttaaatgttctgcctgattggcttgcagctacacaccttttgtcatttgcagagcagcaactccctcttgagctcttggggagtctttacacaaatacactagaaaaaaggcacccatccattttttttccatcttggcattagctcacaggcatagtcctgggatgacctggagtagaggcagtggaggataaattcatcttgcacagacttgtttgtgctagttctagcctgtctctcgccacagatctagcttttaaatactcaagtgattggttttgtgtaggaatgtgtggattgttggattggaagaattttctccctggatttctagtgtttacataagcagatacaaaaaaaatttgatcactgatttaaatagcagggcttattttaaaaagttatgggtgcttcaaggtggtacagaataaaaatgtcagggttttttttttttttttttttaacaagtcgtaacacaaccaaaatgtatatattaatgttttgtcaggaaagggtcaaaatggaaaatttgcaacaaagacaaactacaatagaacaagtgcaaacagaagctgacaaatatatgcccctcgttgggagttcagcccatggaatgttatgtaggacaaaaggaatggaagagatatttcagtaacattttgttctctgtcaaaaaccttctgaaatataaatctgctgtgtattggagaatggatacagcaattgattcaagttgaatagctttcatttaactagaatatcccacagaaagcagttcttgttctgacaaccatatttttgctttctttcacttaaagaaaattgaattcatgtttacatatcttatagggttgttttatggacaaagacacgggtcaaaccccatcacagtggctagtgttacaacaaatagaaacatttctaaatgaaataacatttctaagccagggccagtgcctgcagtaataatactaggttggtattatgaagccatttgcaactataaataattcagtcatagatgtgctttttttaaaatcctggttttttaaaattctagtcttttgccaatacacacacccatacacatacttcacctatttgcataatagaggaggaatatgaatatgtatataataaagtcactttattttggactttctg

SEQ ID NO: 12603 - protein, 51 aa, Homo sapiens; identical to SEQ ID NO: 12601

SEQ ID NO: 12604 - DNA, 1647 bp, Homo sapiens
gaggaggagagagcagagtataccgcagacatcatttctactacagtggcggagccgtacaggacctgtttcactgcagggggatccaaaacaagccccgtggagcagcagccagagcaacagcagccgcaagacattgtttctctccctctgcccccccttccccacgcaaccccagatccatttacactttacagtcacagaacagaaagtgctggtggacatctcttcttgccccaagatcttcgttggaagtccccgggacttggtgtctttgccgttcaaagtgtttatgaactcgccaggaggcataatgtgtcaccattttattctgggccaccctaaaggatgacacccagcttcagagacctcctcttggacgacatccctgagaatcaatgttttagctgtcccatagtctgacgtctgtttccgaccgcttttgagctggcgcaggcttagtcattaatggccaggacgatgttaaatgttctgcctgattggcttgcagctacacaccttttgtcatttgcagagcagcaactccctcttgagctcttggggagtctttacacaaatacactagaaaaaaggcacccatccattttttttccatcttggcattagctcacaggcatagtcctgggatgacctggagtagaggcagtggaggataaattcatcttgcacagacttgtttgtgctagttctagcctgtctctcgccacagatctagcttttaaatactcaagtgattggttttgtgtaggaatgtgtggattgttggattggaagaattttctccctggatttctagtgtttacataagcagatacaaaaaaaatttgatcactgatttaaatagcagggcttattttaaaaagttatgggtgcttcaaggtggtacagaataaaaatgtcagggttttttttttttttttttttaacaagtcgtaacacaaccaaaatgtatatattaatgttttgtcaggaaagggtcaaaatggaaaatttgcaacaaagacaaactacaatagaacaagtgcaaacagaagctgacaaatatatgcccctcgttgggagttcagcccatggaatgttatgtaggacaaaaggaatggaagagatatttcagtaacattttgttctctgtcaaaaaccttctgaaatataaatctgctgtgtattggagaatggatacagcaattgattcaagttgaatagctttcatttaactagaatatcccacagaaagcagttcttgttctgacaaccatatttttgctttctttcacttaaagaaaattgaattcatgtttacatatcttatagggttgttttatggacaaagacacgggtcaaaccccatcacagtggctagtgttacaacaaatagaaacatttctaaatgaaataacatttctaagccagggccagtgcctgcagtaataatactaggttggtattatgaagccatttgcaactataaataattcagtcatagatgtgctttttttaaaatcctggttttttaaaattctagtcttttgccaatacacacacccatacacatacttcacctatttgcataatagaggaggaatatgaatatgtatataataaagtcactttattttggactttctg

SEQ ID NO: 12605 - protein, 83 aa, Homo sapiens [sequence omitted]

SEQ ID NO: 12606 - DNA, 998 bp, Homo sapiens
cagtggcggagccgtacaggacctgtttcactgcagggggatccaaaacaagccccgtggagcagcagccagagcaacagcagccgcaagacattgtttctctccctctgcccccccttccccacgcaaccccagatccatttacactttacaatttcctctcctgcactccctcgaccattgcaggagcatcgtgcatcaagtcaccagggtggtccattcaagctgcagatttgtttgtcatccttgtacagcaatctcctcctccactgccactacagggaagtgcatcacatgtcaggtcacagaacagaaagtgctggtggacatctcttcttgccccaagatcttcgttggaagtccccgggacttggtgtctttgccgttcaaagtgtttatgaactcgccaggaggcataatgtgtcaccattttattctgggccaccctaaaggatgacacccagcttcagagacctcctcttggacgacatccctgagaatcaatgttttagctgtcccatagtctgacgtctgtttccgaccgcttttgagctggcgcaggcttagtcattaatggccaggacgatgttaaatgttctgcctgattggcttgcagctacacaccttttgtcatttgcagagcagcaactccctcttgagctcttggggagtctttacacaaatacactagaaaaaaggcacccatccattttttttccatcttggcattagctcacaggcatagtcctgggatgacctggagtagaggcagtggaggataaattcatcttgcacagacttgtttgtgctagttctagcctgtctctcgccacagatctagcttttaaatactcaagtgattggttttgtgtaggaatgtgtggattgttggattggaagaattttctccctggatttctagtgtttacataagcagatacaaaaaaaatttgatcactgatttaaatagcagggcttattttaaaaagttatgggtg

SEQ ID NO: 12607 - protein, 51 aa, Homo sapiens; identical to SEQ ID NO: 12601

SEQ ID NO: 12608 - DNA, 780 bp, Homo sapiens
gggggccggacgggcggagcgagaggagcatcgtgcatcaagtcaccagggtggtccattcaagctgcagatttgtttgtcatccttgtacagcaatctcctcctccactgccactacagggaagtgcatcacatgtcaggtcacagaacagaaagtgctggtggacatctcttcttgccccaagatcttcgttggaagtccccgggacttggtgtctttgccgttcaaagtgtttatgaactcgccaggaggcataatgtgtcaccattttattctgggccaccctaaaggatgacacccagcttcagagacctcctcttggacgacatccctgagaatcaatgttttagctgtcccatagtctgacgtctgtttccgaccgcttttgagctggcgcaggcttagtcattaatggccaggacgatgttaaatgttctgcctgattggcttgcagctacacaccttttgtcatttgcagagcagcaactccctcttgagctcttggggagtctttacacaaatacactagaaaaaaggcacccatccattttttttccatcttggcattagctcacaggcatagtcctgggatgacctggagtagaggcagtggaggataaattcatcttgcacagacttgtttgtgctagttctagcctgtctctcgccacagatctagcttttaaatactcaagtgattggttttgtgtaggaatgtgtggattgttggattggaagaattttctccctggatttctagtgtttacataagcagatac

SEQ ID NO: 12609 - protein, 51 aa, Homo sapiens; identical to SEQ ID NO: 12601

SEQ ID NO: 12610 - DNA, 1409 bp, Homo sapiens
ggagcacatctgagagggctcactctgatcatcagctgcacgttaagccacaaaccggcgtcgcttcggcgttccggaacccaggcctgggggccgcggggattgcctctgcgtgcaactccggaaagtttcaaggggtcccccgactgcacaggtaccctcacctttcctgccggcgaacgctggcgaccgcccgaccctgccctctttctctcttcgcacgcaggtccggaaatcggctttgatatggaactactccgctctagcctggaaaggagacccgcgcactcctctcgcagctaatttcggatcattaatttaatcggaaatgaggtaaccagtgtaggagacagagaaagcaaccggagcatcaaatggcagttctcgagaatcgacgaggaacttaaatctggactcagggtttcagtgcggtctccgactcccaccaccccgcccctccgcctgtctcgccgccaggtgtgacctccacgcgaaggaatcttcttcggatgggtgcaccttgccaacaggtgtggcacctggaggactaggaggcgcctccagactaagggcgctcagtgcggcgttcttgttgcagatgattctggaaggccggtaggtgtcgggcgacatttgaccttcttcaggtgcttagaactaagtgtctggaaacatgatcctttcgcgtaagtttctttctgaaagccaccaatcttgactgtaagctgtatttgagagatcttttggctgagtttacttatgacctaacggttagtcaccaactgaggcagggcacaggatgaccaaaaaaaaagtgtcagtttttacacaactctggcctgcaagagcctacgtgcttcataaataaaaataaacatacgagcgaggaaggtgcagagccccggaaatatttttttctcacatttttgaaataccatgcacatatatgtggctatttaagtataactactagtgttcactcttactcatttctacaacttttttttttccatttaaaaatcgattattgttacggtttaaacctcgggttggtctaaagtgacattgttggtctcattacagcctctagtggacagttaacatcagtttcctgaaaaggctctgactggttttgttttcgttgacaagctttgtcaaggtgaaggttagtacgtaagagcataaccgggtaaaatgtcccctcacccctatcctcacccccgcccccaacaccctgcttggcaaagacgacttcagaaaggagcagaagcttgttggctttatatagaaaagacgtatgctttgtgctgcaggtattattattactggactgtgaataaacagaaagcttctgctattcatttcagtttcagacagctttcataaaaactaaattcatctcaaatatt

SEQ ID NO: 12611 - protein, 63 aa, Homo sapiens
MSPHPYPHPRPQHPAWQRRLQKGAEACWLYIEKTYALCCRYYYYWTVNKQKASAIHFSFRQLS

SEQ ID NO: 12612 - DNA, 433 bp, Homo sapiens
ccaaccccacccacatgctggaagactacttctgaagagggaagctgctggtgcatcgggcgcccagcagagggagctgaggagggccgaggaggacgccgacaccagctgacgccccgtgcaggagtgtaatgtacttgtgctctctgaggcctggagccagaagccagatgtttttctgggatgacgaggaggcggttctagaactctgaagcctgtcttgctacagtttggtggagggtcaagaaagatgattcagaagtatgtcttttaagagtcttggtgacacgcacagagcccagtgactttagtctgggtgtggtgagctgacctcagagtctattgtgtgagtgtttttcacttttgagtttgttttacttttgtggtctccccagccttatttgtgagtgcaatctaaggaaagtatatttgt

SEQ ID NO: 12613 - protein, 41 aa, Homo sapiens [sequence omitted]

SEQ ID NO: 12614 - DNA, 412 bp, Homo sapiens
tccattccagactctgtttgcctgggtatcagcagcagaggctgcagaacagcaaagattgctgcctgctccttcctctggaagctttgtcccagaggggcacctgccagatagatgccagccggagctctgctgtatgagaattgctgatggaattttgtgcatctgtcctgttggagagaggaatttttcactggagaaagctcaagcatgaaggctgaatggtggaagaagtaggctctgatggacattacagtttatccctccagatccactttccttccccaggccacgctccatcctgctctgtgcttcaccaagttggcctgtatgggctatgctggtggcttctttgcattctgtcctttggttgggcctagccaatgagaggcactggtaagggatgagaggg

SEQ ID NO: 12615 - protein, 52 aa, Homo sapiens
MVEEVGSDGHYSLSLQIHFPSPGHAPSCSVLHQVGLYGLCWWLLCILSFGWA

SEQ ID NO: 12616 - DNA, 481 bp, Homo sapiens
tttctgacaggaatcattccgccacaagcgaacgagcctgggctggccttgtggaagcctagccgaggcctcagaatatggatgagatcatctgagaccatccaccccaggaagccagcaaagtggctagaacccgccataccaccgcagaatcacgattgctgttctgagtcactacatttcaggtgacttgttgagcagcaaacgagctgacgaacctaaagtcagaagatgctagcggaagaaacaggacccagaactccattggaaaatggggtatacagacttcgaggatgccagacaaaaagatcatttgaaatattgttgtcactaagccttctttgatcaagacaccatgagctcatgacaaacgcctcaatttccttcttctgtaaataaattaatacctggtgagatgtaaaagcccacttgaacggaaaacaacatgtttgatgaaattctgagagaagatacaacccaa

SEQ ID NO: 12617 - protein, 37 aa, Homo sapiens
MLAEETGPRTPLENGVYRLRGCQTKRSFEILLSLSLL

SEQ ID NO: 12618 - DNA, 2136 bp, Homo sapiens
gcgtctacttccggtgtggcccaggcggggtccgcagaaccagctatgtcggcctacggcatgcccatgtacaagagcggggacctggtgtttgccaagttaaagggctatgcccactggccggcgaggatagagcacatgacccagcccaaccgctaccaggtgtttttcttcgggacccacgagacggccttcctgagtcccaaacgcctgttcccgtacaaggagtgcaaggagaagttcggcaagcccaacaagaggcgcggcttcagcgcggggctgtgggaaatcgagaacaaccccacggtccaggcctccgactgcccattagcctcagagaagggcagcggagacgggccttggccggagcccgaggccgcagagggcgacgaggacaagccgacccacgctggtggcggcggcgacgaattggggaagccggacgacgacaagcccactgaggaggagaaggggccgctgaagaggagcgcgggggacccgccggaggacgcccccaaacgacccaaggaggcagcccccgaccaagaggaggaggcggaggcggagagggcggcggaagcggagagggcggcggcggcggcggcggcgacggccgtcgacgaggagagtccgttcctcgtggcggtggagaacggcagcgcccctagcgagccgggcctggtctgcgagccgcctcagccagaggaggaggagctccgggaggaagaagtcgcggacgaggaggcctcccaggagtggcatgccgaggcaccgggcggcggagatcgcgacagcctgtagttaccagcgtttccagaagagcccctgccccgttcctgctgcggcctggccgttcttggggaatctgaccacggcgtgcaaactgggactgcctttccctctcctcagcccgtcctcctccaacccgcgctcctttgccctgccgggccccaggatggcaggccacctgactctcacctctgtgcccccacgcctctgtgatctgagtcagggcctcagttccctccctgggataaagtgaggccaccatcccagcttccggctccctcttctcccccctctacccgccaccccaccccaccccacccccgcccactcgttgcctgattccgtttccgacttggggttcaggcaggctgttttcacctctagacacccctctccacccctcctgcttccccaggcattatgaacctctgcttaggaatatgggtaggagtgaaaggcctggcagataaagagcagagggcacttgcagggcctgggatgagcagtcttcaagctgtggtagttagcgggcaggagagcgacatcttcctgagctcctgtccatgcctgccatacctgccagcttcagacatttagggaaaaggggcagcatgtggggaatgccccccgccttccacaaatccttttgctgacccaggaagttctgggagttgccgtttttcatcaaaacgtttgggggcttccaagttgtttgtgagatctgaaaacttaactttgcccaatatcctggttggggaccgtgagaaatatctgtcccatttagatctctggggccactgatgggatgccctgggaagatccttggctgccgctttctctccccacagcctcaaggccaccctaccgtcatatatatcactcaggcgtagaagaaaagacacatattttataaaatctttttaataaaaggaagttccaagaagaatttttaagaactacctctaggtgtgcctccacgctggccctagctttcccattgctgttccattgctgagacaaactggaaggctccctttctgtttgaagttttatgacttgtagtcaggctttgctgttcgtcacagtgtcattttccattcaggtaccatcacctggtcccatcaacaggtctagtatgtagctcactgataacagaggaagatgtgtctcctcccaccctcttcctaatggtcattatgcctttctccatctattgtctctttcaccccttcccctctcccttgggctctgatgaaaaattgttgactgcagtttcggaagtttgatctgagaaccaaccatagaatgtttcagttctaggaaataaaaccagttgattaaagcaaa

SEQ ID NO: 12619 - protein, 251 aa, Homo sapiens
MSAYGMPMYKSGDLVFAKLKGYAHWPARIEHMTQPNRYQVFFFGTHETAFLSPKRLFPYKECKEKFGKPNKRRGFSAGLWEIENNPTVQASDCPLASEKGSGDGPWPEPEAAEGDEDKPTHAGGGGDELGKPDDDKPTEEEKGPLKRSAGDPPEDAPKRPKEAAPDQEEEAEAERAAEAERAAAAAAATAVDEESPFLVAVENGSAPSEPGLVCEPPQPEEEELREEEVADEEASQEWHAEAPGGGDRDSL

SEQ ID NO: 12620 - DNA, 1783 bp, Homo sapiens
ggtttcacaaatgagcagatcaagggttctccaggaagacctgccatgcatagacacctctacattagtgcagtcaaggatcaggaaacccctttctaatttgagcaacacacatatgaaggaataatccgatgtactgctgcaaagtgtcttcagccaatttagacaagaacaactcttaaattatttttggtgaagaaagttaatcactgaacaatttgaggtgaatggaagttcgctattcctctacaaccttttaccaggttataatgaaattgagtccactgaggaaggaaaaagttagtttcacttgactaagttcccacatggattaagcagcagacccaagaccaagaccagaacgcaatccactctttgatgagaacatacttggatatgacctatgctattttgaatgaaatttagcaaggaagaactgtccatcaatcattttaaccaagttcaccttttgttgccatttaagtttaattttgtcccaggaaattcatagtgagtgattgtgattacattttcctcattttcatgcctctgacattcttgttgaagatgctaatcttgtataaagctgtctttggagttgatgatgctgacacttctcactcctatgggaaatggagagatgtggtgcataaaatagaataaaatgtattagagcaaaataaaactgctaataagagtaatcactgtaatagattttaaaatcattttaaatctagttttaattacctaaatccatctcagaattactactgatgtgatgagaaattcataaattctgtgcaaattgaaaacagaaattacattgtttattaaaatactactttactaccccatctctatattatcatatatgtaaatttacgcatgtatacataaattatacatttatacatataaacttgaatttatcagaactactcaatttcatctcctggttaataatttagtatgcattaaccttcagtattcacatcaagatacattctcctctcaaacatgataaaacgaaagcgttctaagattatacagagtgtgttttctaaacaaaattcgcttctcgttttagaaagttgatgtcatcaaggcatcaccatcaaatttaacttctctacttttctttagataaaaatagagaagaaagctttctaagtgtgtcagtctaagaaaaactttaattagaatctctggctgttgtttaggttgcattctacaacttatttcagcttgacagtaggcaggagacttccccttcaattttaggtcgaagccagaataaaaagtgctttagaaaaagaaaaaactggtttctgttctcctaattcccttctgcccataaaacgaatctatgcaggatatttgcaatagcatctcaaacccacctggctcttctgtatttcttacttgaagacatcagatggctgactccacaggagcctgtggtggatcagagtggaaaactgcaacctgagaggattgagggaaaccttacagagcccctggggtagtggtcaggttggaggtttcacatactctaaatgagagttgtctttattttgctgctcaaatctggtgggctttcttgccaatgagtttgctatggactcaaaacattgttattttgcctgaacaatctctgtggttaatggttgttgttagatattgcatgaaccttgggtttgaaactcaagatagactcctgtggattctcaattttccttttagttaagagtagaagaccttcaatttatccagaaatgtggtt

SEQ ID NO: 12621 - protein, 38 aa, Homo sapiens
MSRSRVLQEDLPCIDTSTLVQSRIRKPLSNLSNTHMKE

SEQ ID NO: 12622 - DNA, 758 bp, Homo sapiens
ctctctgatctgactaacctctttcattctttgccctatgttatatggcttagaccaaagcctgagacatttaaccaatttataaatattaaatgcagaaggcatactttatcagttcctggaaacatcaaagaagctggaaggggaatggaaattggatggcactttgtggaggtcactttgctgacagtcaagtattcaaagatctcctaagatacccggtctttaaagtattatacaaaatatcaggcccagtcccaaggcgcaacttgtgccagcagcccgcgccagcagcctgcaccagcaaaatagcagtagcaagaagagagccagcagaagacacctaccctggccggaagacgcgtacccctgaagattgaggaagaggccatccgggtacaacgtagcagttacgtcagactaagacacttcctgtttataggagactataaaacctttgccctgtcctcactaggggctgacaccattttagtcctcagaccgcctgcacccaggcgctcattaaaacagcatgttgcttccaccgcctcatgttgtctgttggcgcgctctcggggttcgaaccagtacaagaaccttagatatatgatactgcacctaataaaaatagtctaaaataacaacagccaatataggcacaaacctgaaagtgtctgcatagaagtaacacatccatgtacttgataaactaaagtgtagatattttatgcggaataaactttgaagtgaggaatacc

SEQ ID NO: 12623 - protein, 95 aa, Homo sapiens
MQKAYFISSWKHQRSWKGNGNWMALCGGHFADSQVFKDLLRYPVFKVLYKISGPVPRRNLCQQPAPAACTSKIAVARREPAEDTYPGRKTRTPED

SEQ ID NO: 12624 - DNA, 1292 bp, Homo sapiens
ctctgatctgactaacctctttcattctttgccctatgttatatggcttagaccaaagcctgagacatttaaccaatttataaatattaaatgcagaaggcatactttatcagttcctggaaacatcaaagaagctggaaggggaatggaaattggatggcactttgtggaggtcactttgctgacagtcaagtattcaaaggatgaaggctcagatcagtttcatctatatgctatgcctgcctgacctggagaacttggtgttaaaggaaatgtgtttatcaaatgtgtcatgttatccttggagggcaactgaggatcagagcacagctgccttgaattgttccatcgagttattccactgcagttaagtggaacatcaaaaaacgtcaagaagcctaaaacatggaaacttgtttaattttctcaaacaatggcactaaccaaagcaaacgaaactttgacaagaaagaagcaattgtttagccttgtcatgtcctcacagttaataatacaaagggtatattcacagtgcaaagatactttccctttctctcaaaatagaagacaacgtattgtaagatattttacagatgtccttcctcatagaactctgtaaactttactagctcaagaacaaaatcaaagtttcaattcacgggactgattcatcttgcattttaggtattctaatggtatatttgtactgtgtgttgcaacctatagaataaatgtacttcttcttcatgtttcctgtttgctgatgacagataccagtggctcacctttcggcctatgaaacaatgatttcttttcaaatttgaaatctgaataactatgcaccacaatagctgcctttgacccagaatttttctctagtcattatcttccaaagaatttttctgcagttcgttatcctctaagttctgaatcttatccaaaacctgttacaacttaaacttctggctcccactcttaaggacttgctgtttcatcagatcttccttctccatttttccatcagtgaaacctaaaataaattcaaaatcataagaatgtaagagcaaacctaatgttctgtatcatggcataattttacttagagaaaccaaaatatctgaaggtgagttgttcaaatcttaagtgacaacagttaacttactatgagcaatagaaaaaaaatttaaatattagaacaagtgctacaaaagaatggacattttgggacagaaactttctgtattggtaaatctgccacccttctgaataataaatgatttgattttacttcc

SEQ ID NO: 12625 - protein, 38 aa, Homo sapiens
MQKAYFISSWKHQRSWKGNGNWMALCGGHFADSQVFKG

SEQ ID NO: 12626 - DNA, 867 bp, Homo sapiens
gatggtgctaagtttttacagttgtcttagccccagtggttctcaaagtggggttcctggcccagcagcagcatcccgctaggaacttcttagaaatgcaaagaaaaccaagaataaaatgacacctgacaaccttgccagctcagcacatctggaggcactaaatgtctgacccaggaaatgtgcatcaaactgacggtcatcccagcaagagtgaagtggcctctcctgtggttttgatttgcatttctctaatgactatgttgaacatcttttcatgtccttgttagccatttgtatatcctctttggagaaatgtctgttaaagtattctgctcattttttcccttcagttgtttgtctttttgttattgagttgtcagagttctttatataatctggatagtagacattttttggatatatgatttgaaaatattttctgtcattctataggtagtcttttcactcccttgatgcatgaaagttttaatttgataaagtacaattgatgtacaaaagttttaatttgataaagtacaattaattttttatttcgttgcttctactttttgtgtcatatctaagaaacaattgctgaatacaaggttatgaatatttccccctaagtttttttctaagacttttatagttttagcttttatatttatgtctcatatccattttgaggtaagggctcaactttatttttttgcatatggataccccgttgtctcagcatcatttgtggaagacactattctttcgccattgaatgcttttggaacactggtcaaaagttaaacatgaattggccaaagataaatgggctgatttctagattctcaattctattccattgatctg

SEQ ID NO: 12627 - protein, 41 aa, Homo sapiens
MSDPGNVHQTDGHPSKSEVASPVVLICISLMTMLNIFSCPC

SEQ ID NO: 12628 - DNA, 615 bp, Homo sapiens
gcactggacacttcgaggctccattggcaaaacatgcggcaaataggaaaccaagggtagacctttgacatttaagaagtatatgccctaagatttctacagatcctgaaattcatcactacggcagaatcacgcatcttatggctggactgcaatggcgcgatctcagctcaccacaacctccgcctcccaggaaaagaggaagagataggagatttctctctcctccttgtgaggatacaaggagaagatggccatcagcacatcaggaagagagccatcaatagaaccgaatcaacagacaccttgatcatggacttctgagcctcctgaactgtgagaaataatttattattgtcgaacacactcagcctatgctaatttgtcacagctgtccaagctaagaagggcatggagcacctccccatctctttaaccgacacaaacctccctttattccaggaactaccagccactgaagaagattttgtataatttgtgattgggcttgatctaaaaaccatattatcttatgatatagtagtcaatgcattatcaaagaatattacataaagccttcacaccaaatactaaatcagacatcactaccaccaa

SEQ ID NO: 12629 - protein, 48 aa, Homo sapiens [sequence omitted]

SEQ ID NO: 12630 - DNA, 1280 bp, Homo sapiens
ccaagtttatgtcgtattaaaattactggcactgtttgacagtcaatacaggaaaaaaaaaaaaaatatgtcctggaagagaattgagaaagtgccttaaagagtaactggatgcctccgaaaaattcttaagcctagtaggtttgccaatattccttacaatttcctgtgacagtgtcctcagaatgaaggtgaagaaacctgagaaacagaaatgccttaggaaatgatgaatctggatgagaaaaaggagagaagggtctggatgggatctttgccatagtgaaagaagggtctcagaaaatgttactgcaaaatgaagtcctcagaagcagctctctctctgaccttctccaaacctcctgtctctggaccttcatttccacccatctcctcctccccaccaccgccaggctggccatgcgtactagactccctcttcctcaaggtgaattgactgctggggaaatgggctcaggagattaaaggcctgcttattaatggaaagagcttcctcccacacacagatatataaagccgcctcgccatttcttccttccaccgtgacccatagtctttctgggacaagggctgagatttcacagccgagttttaaagttgctggggatgctaacaacagggacttttatgcttgaatttctgctgcaaatcatacacccttggactcagtccactaagtctatagaattatctgcaaagcaatgcaataggatatacaaattttttgactatttgtatcgaaaataaatcaggaccttgaactatataaaaagctaacacattatcatgaaaactctgcatgaatactgataaaacatactggatgccctttgactcttacagtccttgttctcatctttttgcttatatccatttctcttttcaattaatttggaataattttgcttgaataataatctgatagtaacttcattatttctaattatattatcttaatgtgcaaattcaatcatttttggcttacattaacaaagataaaaatgtgtgacagaggttagtaatagaaggttagttttacatgaaatgaggaccagataaaagaccagtacaatgttatatatttatgtccttcacatgataggcagacatcaatccttgatgtcatgttcaaataaaggacttatatatatgcatagtgacaaagcactatgcatatgtatatgcatgggaacaatggagagaagttcagtgagagaattcccaattgtattaattactacaaacatttattgaataaa

SEQ ID NO: 12631 - protein, 60 aa, Homo sapiens
MLLQNEVLRSSSLSDLLQTSCLWTFISTHLLLPTTARLAMRTRLPLPQGELTAGEMGSGD

SEQ ID NO: 12632 - DNA, 928 bp, Homo sapiens
aaaaccaagaataaaatgacacctgacaaccttgccagctcagcacatctggaggcactaaatgtctgacccaggaaatgtgcatcaaactgacgggtgaattgactgctggggaaatgggctcaggagattaaaggcctgcttattaatggaaagagcttcctcccacacacagatatataaagccgcctcgccatttcttccttccaccgtgacccatagtctttctgggacaagggctgagatttcacagccgagttttaaagttgctggggatgctaacaacagggacttttatgcttgaatttctgctgcaaatcatacacccttggactcagtccactaagtctatagaattatctgcaaagcaatgcaataggatatacaaattttttgactatttgtatcgaaaataaatcaggaccttgaactatataaaaagctaacacattatcatgaaaactctgcatgaatactgataaaacatactggatgccctttgactcttacagtccttgttctcatctttttgcttatatccatttctcttttcaattaatttggaataattttgcttgaataataatctgatagtaacttcattatttctaattatattatcttaatgtgcaaattcaatcatttttggcttacattaacaaagataaaaatgtgtgacagaggttagtaatagaaggttagttttacatgaaatgaggaccagataaaagaccagtacaatgttatatatttatgtccttcacatgataggcagacatcaatccttgatgtcatgttcaaataaaggacttatatatatgcatagtgacaaagcactatgcatatgtatatgcatgggaacaatggagagaagttcagtgagagaattcccaattgtattaattactacaaacatttattgaataaa

SEQ ID NO: 12633 - protein, 60 aa, Homo sapiens
MLYIYVLHMIGRHQSLMSCSNKGLIYMHSDKALCICICMGTMERSSVREFPIVLITTNIY

SEQ ID NO: 12634 - DNA, 511 bp, Homo sapiens
taaaattactggcactgtttgacagtcaatacaggaaaaaaaaaaaaaatatgtcctggaagagaattgagaaagtgccttaaagagtaactggatgcctccgaaaaattcttaagcctagtagggtctcagaaaatgttactgcaaaatgaagtcctcagaagcagctctctctctgaccttctccaaacctcctgtctctggaccttcatttccacccatctcctcctccccaccaccgccaggctggccatgcgtactagactccctcttcctcaaggcaggtcatggaaaccagaatccctttccccaaagccagccacaaagcatcaaatattgtttctacttcccccagctcccctccagcctttctgtgtaaaccgtatagaaattatctgacctacctggtttaagtgtaggtcataacactcccattccagagaaggtcctgccccatgcccagatggaacgatggagtactgcacagagtccaggaaggatctaaacaggc

SEQ ID NO: 12635 - protein, 87 aa, Homo sapiens
MLLQNEVLRSSSLSDLLQTSCLWTFISTHLLLPTTARLAMRTRLPLPQGRSWKPESLSPKPATKHQILFLLPPAPLQPFCVNRIEII

SEQ ID NO: 12636 - DNA, 278 bp, Homo sapiens
agataatggagagagagaagagaacagcagtagccgttgccagaaatattgagcaaggcggatttattagatgaagatatcaaaatactttccattgaggaaacaggttggaggtgggaggctgtaaccatgcttgattttgtaccaccctaacctttgcttgatccaggttccagtccaatatgcaccattcagcctggttgcagcatgttaagcagccctggaggcagcagatgagggatcctatgaagcaactttcagacattcagaaccaagac

SEQ ID NO: 12637 - protein, 31 aa, Homo sapiens
MHHSAWLQHVKQPWRQQMRDPMKQLSDIQNQ

SEQ ID NO: 12638 - DNA, 455 bp, Homo sapiens
gacacgccagcagcctcatgggggtggagggaagagaggcctcatggtgagggactgaggcctcctactaaaagccagcactaacttgtcaggcatgaaagtgagccacctggaagcacatcttcagcccctgtggaccctttagatgactgcaggccctgctgacatcttgactgaaacctcatgagacagctagaaccagaatcgcccagagagaagaacatcaaaggtgcgggtttagggcccagaaagccactggccccttaatatccagaaaaggacaaaaactcacgggagtcaagcactgtttgcctggaagaagaaagataaagacacagacaagccctgctcccccaccagccaaaactactattctacctgtttcctgattctgacccacgtatattcacttgtttcatcattttctcattcaaaaatatattcattcaattaat

SEQ ID NO: 12639 - protein, 71 aa, Homo sapiens
LKPHETARTRIAQREEHQRCGFRAQKATGPLISRKGQKLTGVKHCLPGRRKIKTQTSPAPPPAKTTILPVS

SEQ ID NO: 12640 - DNA, 3508 bp, Homo sapiens
agagaagtgggtgacttaggagtatcctctccacttctgacccttagtttcgtctgtgcacaactcgctcaaaatgggcaactcattaagcgtattttgttcctggttccgccgcaggtcctggccacgccatcggcaacctgctcgtcttgtccgtgaggccttcccagctggccgggctcaccccgcggctcctgcacccgtgcctgcccggggcatctggggccattccccactcctcttcaaccgtcagcgacatcttgggccttcttttccagtcagctgggacggcgcccttatgaggctgtgtcttatcccttggaacacggacaccccacagagtcctgcctcctgtagtctggagcgccccctcaaggaagaaacccgtgctatctgctcgtaactccatgatgtttggacacctcagccccgtgaggaaccctcgtctcagaggcaagtttaaccttcaacttccttcattagatgagcaggtgatcccaaccaggctcccgaagatggaggtgagggcagaagagcccaaagaagcaacggaggtgaaagaccaggtagagacccaggggcaggaggacaataaaacgggcccctgtagcaatgggaaagcagcctccacctctaggcccctggagactcagggaaacctcacttcctcctggtacaatcccaggcccttggagggaaatgtccacctcaagagcttgacagaaaagaaccagactgacaaggcccaggtgcatgcagtgagtttctactccaagggccatggagtcaccagttcacacagccctgctggaggcatccttccctttgggaagcctgacccacttccagcagtgctccctgcccctgttccggactgctccctgtggccagagaaggcagccttgaaggtgctgggtaaagaccacctgcctagctctccaggcttgctgatggtgggggaggacatgcagcccaaggatcctgcagctcttagatcaagtaggtcttctccacccagagctgccggccacaggccccgcaaaagaaaactgtcggggccaccgctgcagctgcaacagacccctcccctgcaactgaggtgggatagagacgaggggcccccaccagctaagcttccatgtctatctcctgaggcactgttggtgggtaaggcttcccaaagagaaggacgcctccagcagggcaacatgcgtaagaacgtgagagtgttaagtagaacatcaaaattcaggagactaagacagctgcttaggaggagaaagaagagatggcagggcaggcgtggtggctcacgcctgtaatccagcactttgggaggcccaggcggatggatcaggaggtcaagagattaagacctgaggagcatctctgcctgcaccatctgggaagtgaggagcgcctctgcccacctgctccaccgtctgggaagtgaggagcacctctgcccagctgccccaccgtctgggcagtgaagagcgcctctgcccggcccccgccctgtctgggaagtgacgagtgcctctgcccaaccgcctcacagtctgggaagtgagaagcgcctctacccaggccctgccccgtctgggcagtgaggagtgcctctgcccggcccccttacactctgggaagtgaggagcgcttctgcctggccagtgccctgtctgggaagtgagaagcacctctgcccagctgcccaccatctgggaattgaggaggagcactgcctctgcccagcctccaccccatctgggaagtgacaagcaactctgcccggccgcctcacagtatgggaagtgaggagcgcctctgcccagctgccgccctgtttggaaagtaaggagcgcctctgcctcaccgccgtcctgtctgcaaagtgaggagtgcctctgcccggcctcctcaccgtctgggaaatgaggagcgcctctgcctggccaccgtcccatctgggaagtgaggagtgcttctgcccagccgccaccctgtctggaaagtgaggaacacctctgcccggccccctcactgtttgtaagggaggagcacctctgcccagcccctgcaccatctgggaagtgaggagcgtctctgcccagctgctgtgcaaccttccaagtgtgaagtgacggccttgtgtgtgatctttctgccctccccaagtttgcattttcgacattaaagtttactttttagttaaaaaaaggagatcgagaccattctggccaacatggtgaaactccgtctctactgaaaatacaaaaattaggcgggcacagtggcttgtgcctgtagtcccagctactcgggaggctgaggcaggagaatggcttgaacccaggaggtggaggttgtagtgagccgagatcacaccactgcactccagcctggtgacagagcaagactccatcctgaaacgatgttgtagttgagagcatgatggtcttttgggacaggaggaacaagaggttctggttgccactcttcaatcagttcttctttttccttgactgtaaggtcagatctttcttgtaatttgtaagtcttaaagaagtctgattatccagagtatcagaatcccttccaaaataagatggtaagcaggagcctcgtaaagcgcctgtaccatctccaccagaacccactgctccgtggcagtcgccatagttagccgcttccttccatacgctgtctcatttctatctcactgttcagcttagctgctgtccagacaaatgtttctcaaaatttgagtcacctatagacccaagcaaagggaagaaaaaagaaaaagacaaaagaaaaatctatgcattttagtttgtgagatgctggtgtaaggactgtaagccccattcgaggacaatgtcttgtaaatttttaattatctcagcaaaaaaaattagaagttttatgttttggaatggcaaaataactgagattaatatcacaatggagttcaaattttcaaattctcataaaacatatcaacatccaagaatatacctacagatatacctgtctttggatctcaatgtgagaaacaataaaccaggataaatagaagtgtggggccaagatcaagaggagggcacagtaacctctgggtgttaagtagaaaggacaaacggccaatgagaaaaggatggagatagcacaaaactgggaagatctacgattgtaatctcatgcctgtctcttgacatgcttgtatttttatgttacaaaccatctttcaactttcttttattctcattcaaatgttttcagtgtttattcagcacttatttcagtgagaacatgtatttaatctggcattcacttattcaattaatttttattgagggccaactgtgtgcctggctaggagtagagggtacaaccatgaagaagacaaaaaatcaaaacagacacagggttttcttttatggatccagtgggagagaaacatatcagaaagacaataaaacaaaaaaaaatgttttcttaaaga

SEQ ID NO: 12641 - protein, 304 aa, Homo sapiens
MMFGHLSPVRNPRLRGKFNLQLPSLDEQVIPTRLPKMEVRAEEPKEATEVKDQVETQGQEDNKTGPCSNGKAASTSRPLETQGNLTSSWYNPRPLEGNVHLKSLTEKNQTDKAQVHAVSFYSKGHGVTSSHSPAGGILPFGKPDPLPAVLPAPVPDCSLWPEKAALKVLGKDHLPSSPGLLMVGEDMQPKDPAALRSSRSSPPRAAGHRPRKRKLSGPPLQLQQTPPLQLRWDRDEGPPPAKLPCLSPEALLVGKASQREGRLQQGNMRKNVRVLSRTSKFRRLRQLLRRRKKRWQGRRGGSRL

SEQ ID NO: 12642 - DNA, 2352 bp, Homo sapiens
aaagctggaaccctgcccctttggagggggaggcggcggcggcggcggcggctgcgcgggcctcgggtgcgcgggcacgcgggactcccagctgtcaatcaggcgcgggctgagctctacgaggcggagcggcggcggtggcgacggcgatgggaccccagcgagagatctgcagctaggctggctgcacttgctccacgggtcaggggatcggagggggattgaagaatgcgccattaaaaggaaagatcaaggagtaaaccagaagaagaagaaaaagaggacttcaaagctgggaaggatgagttcttgcagcaacgtctgtgggtccaggcaggcacaggctgcagctgagggtggttaccagcgctatggagtccggtcctacctgcaccagttttatgaggactgtacagcctcaatttgggagtatgaggatgatttccagatccaaagatcacctaacaggtggagctcagtattctggaaggttggactcatctcaggtacagtttttgtgatcctcggattgactgttctggcagtgggctttcttgtgccccccaaaatcgaagcatttggcgaagccgattttgtggtggtcgacacacatgctgtccagtttaacagtgctctggacatgtacaagctggcaggagctgttctcttctgcattggaggcacgtccatggcagggtgcctgctgatgtcggtgtttgtaaagagctactccaaagaagaaaaattcctccagcagaagtttaaagaacgaatcgcagacatcaaagcccacacccagccggttacaaaagctccagggccaggggaaacaaagattccagtcactttgtccagggttcaaaatgtccagcctctactggcaacctgaaacctttcccaccccagttcttcttgtctgatttatgcccgtggttaaaaagagcaggccagttttcgagataaagaagatttggcgttgactgccctagggctgtgttcagctgtgggcaatataatgggtggactcacacttgctcagttcaggcagctctgctggagggcggtgccatgcctaagcctgtgcacatgcatccagctgcttaagatgggtgcttccttgtacccggccaccagaaaacccctggaactcctctttcatagatcgtgactttgtgttattttccgtgttgtttgaaagtgccgaacagtttagaccagctcaccaatggctaatgtggtccattttattttctaatattggtttatctaatgttttctgcgtggtgctgtcttccattcctgtctcactatgtgtaagattttgtcatatgtgttcatagaaacatggaattctctgattttgagccgaacatgagtttttagactgtatcttgacatgaggttcctgacattggatacaaagttatcagcattcacaaatctttttgttttctccattttttttccctttgagatgaagtgctgttcttttgcctaggttggagtacagcggtgaaatcatagcgcactgcagccttgaactcctgggctcaagcgatcctcccacctcagcctcccaagtagctgggactacaggcacctgccaccacccccagttaatattttttttaattttttttagaggcaggatcttgctgtccaattttttttaaaaagctaaaattgccaactttagaatcttgaccaaaaaaaattaattttaggagcatctatttatgcagtgttcaaaagtactgaattagaaaccaggaagttttagttccttctactacctgtgtgatcttggggaaattatttaacctctcagtcctaattttccccttctgtataatgggagttctggatcacaatatgtctgggctctcattacccaaacatctgagattccatttttgccatgtgtcatcgagtcgctccccaacagatgtttgtgatgtttttgtggctgtcaccatggtgggattctttcagaatgagactcctggaaattcactgagtcagcagccttcacaccatctacccttaaatatccaaccccagcaatttatacaacgctgtcatatttttaaaaaaacaaaagtaagccatcctcaaataaggaaccccttggtagatattaaccttaaaaagggttttcattctcaaacaagatgctttgttctccaacaagatgttcatctcatcacttgcacttttgttttaatgtatggattcagattagactgagaaaaatggatggtattttcttaaaattgtgccaccttagagcccccccccttttttttttcttccttcactggataaataaaatatgtgaacaagtggaacctg

SEQ ID NO: 12643 - protein, 195 aa, Homo sapiens
MSSCSNVCGSRQAQAAAEGGYQRYGVRSYLHQFYEDCTASIWEYEDDFQIQRSPNRWSSVFWKVGLISGTVFVILGLTVLAVGFLVPPKIEAFGEADFVVVDTHAVQFNSALDMYKLAGAVLFCIGGTSMAGCLLMSVFVKSYSKEEKFLQQKFKERIADIKAHTQPVTKAPGPGETKIPVTLSRVQNVQPLLAT

SEQ ID NO: 12644 - DNA, 870 bp, Homo sapiens
gggtgcgcgggcacgcgggactcccagctgtcaatcaggcgcgggctgagctctacgaggcggagcggcggcggtggcgacggcgatgggaccccagcgagagatctgcagctaggctggctgcacttgctccacgggtcaggggatcggagggggattgaagaatgcgccattaaaaggaaagatcaaggagtaaaccagaagaagaagaaaaagaggacttcaaagctgggaaggatgagttcttgcagcaacgtctgtgggtccaggcaggcacaggctgcagctgagggtggttaccagcgctatggagtccggtcctacctgcaccagttttatgaggactgtacagcctcaatttgggagtatgaggatgatttccagatccaaagatcacctaacaggtggagctcagtattctggaaggttggactcatctcaggtacagtttttgtgatcctcggattgactgttctggcagtgggctttcttgtgccccccaaaatcgaagcatttggcgaagccgattttgtggtggtcgacacacatgctgtccagtttaacagtgctctggacatgtacaagctggcaggagctgttctcttctgcattggaggcacgtccatggcagggtgcctgctgatgtcggtgtttgtaaagagctactccaaagaagaaaaattcctccagcagaagtttaaagaacgaatcgcagacatcaaagcccacacccagccggttacaaaagctccaggaactcctctttcatagatcgtgactttgtgttattttccgtgttgtttgaaagtgccgaacagtttagaccagctcaccaatggctaatgtggtccattttattttctaatattg

SEQ ID NO: 12645 - protein, 177 aa, Homo sapiens
MSSCSNVCGSRQAQAAAEGGYQRYGVRSYLHQFYEDCTASIWEYEDDFQIQRSPNRWSSVFWKVGLISGTVFVILGLTVLAVGFLVPPKIEAFGEADFVVVDTHAVQFNSALDMYKLAGAVLFCIGGTSMAGCLLMSVFVKSYSKEEKFLQQKFKERIADIKAHTQPVTKAPGTPLS

SEQ ID NO: 12646 - DNA, 596 bp, Homo sapiens
agctgtcaatcaggcgcgggctgagctctacgaggcggagcggcggcggtggcgacggcgatgggaccccagcgagagatctgcagctaggctggctgcacttgctccacgggtcaggggatcggagggggattgaagaatgcgccattaaaaggaaagatcaaggagtaaaccagaagaagaagaaaaagaggacttcaaaggtgcctggcacgtagtgctttaaaaacactgaaggaaggggaggatgaaaaatggaggactactcaggccttcatccacaccaacccacgtagaactctgcaggaagtttcaaagtactggagattaaagtggtcaacagtacagaaaatgtccctgcccacatgtagcttacactctatcatgtatatggtctatcagaccataagtaaataaaccacacatagaatatcagatagtaacaagtgctaggaagagaaacaaacctagacaaggggatagaaagtaatggaacgctgatatttagatatattgattatagaaagcctctcagaagaatttgatagggagtggcagcataatttttttccctcctcatgtctctgggttatgat

SEQ ID NO: 12647 - protein, 71 aa, Homo sapiens
LSIRRGLSSTRRSGGGGDGDGTPARDLQLGWLHLLHGSGDRRGIEECAIKRKDQGVNQKKKKKRTSKVPGT

SEQ ID NO: 12648 - DNA, 1571 bp, Homo sapiens
ctgagctctacgaggcggagcggcggcggtggcgacggcgatgggaccccagcgagagatctgcagctaggctggctgcacttgctccacgggtcaggggatcggagggggattgaagaatgcgccattaaaaggaaagatcaaggagtaaaccagaagaagaagaaaaagaggacttcaaagcactggccctgtggaaaagtggctataatgggaacctcagtctcattatctcagaatcattttatgggagagaaaagcagcatgaaaaattgaatgatatttcaaagaaaataaatagaacagggcctgtgcctggcctcacaactgactcacacatagtgtcacaggaaaacactcatatttgttgcctctcttctctcaaggagaccttgaagacaaagaatataatgtctgtaatgttcttagagtttcatgaggcataaagatttatttctgcttcaaggctatgaacatttataaaggaaaataaaaagtaactgcatatattacacagaaatttaaatttccaacacattgatactacagtctattggcacacatagtgatatcacaatagcacattcatgagcttgtttccctaatacaggaattattcaaggaattctcagcatttgtactccctttacctcttgatgatgcccattttgttatgtttattgcttcatgagtgtgtctccttgtaacccaagagtccattgagggcagacctggctccactcatcttcacaactattatttatctcacaggtgcctggcacgtagtgctttaaaaacactgaaggaaggggaggatgaaaaatggaggactactcaggccttcatccacaccaacccacgtagaactctgcaggaagtttcaaagtactggagattaaagtggtcaacagtacagaaaatgtccctgcccacatgtagcttacactctatcatgtatatggtctatcagaccataagtaaataaaccacacatagaatatcagatagtaacaagtgctaggaagagaaacaaacctagacaaggggatagaaagtaatggaacgctgatatttagatatattgattatagaaagcctctcagaagaatttgatagggagtggcagcataatttttttccctcctcatgtctctgggttatgataggtgtgctgagttggtaagaactgaatattcatttaatgtataacagtgcatgcaattgagacagttgctatggacaggttataaaaagaagaaatccatggatggatcctcatttatcagcaagtagagcatccttcagagagaataaaaacaactctctcttcatagataaccaaacaatgacacacaaaagttgcttgtgcccaatcatcatggccatgctggcagggaggatgcaacaggctccatcagagtgtttacagaatgaagactaatgtggattgaattaaatataatactaaagagtgtgtttactctggattgaattaaatataatactaaagagtgtgtttactcatcccctctatccatgtacctcctgtgatattaaagctttctgtaaat

SEQ ID NO: 12649 - protein, 57 aa, Homo sapiens
MDPHLSASRASFRENKNNSLFIDNQTMTHKSCLCPIIMAMLAGRMQQAPSECLQNED

SEQ ID NO: 12650 - DNA, 985 bp, Homo sapiens
tgctgggattacaggcgtgagccactgcgccccgccaagagagaggggtctttaaaagtaccttttctgtaatgaaaagagcattgttcaactaggcatacattactcagtctggttcttacctttcatatgtcttttgatcctgtggccaaagcctgtggcattaatccatgtggatgttgtcattccagctgggaaggatgagttcttgcagcaacgtctgtgggtccaggcaggcacaggctgcagctgagggtggttaccagcgctatggagtccggtcctacctgcaccagttttatgaggactgtacagcctcaatttgggagtatgaggatgatttccagatccaaagatcacctaacaggtggagctcagtattctggaagcaggaactgggttttcacacatcctcccacagccaagagtggaatcggaagttacagcacaaaaactgtcctcgctgctgtttcgggagtttgtcaccacctggagaggcccttctctgtcgccattgggattggccttaccaccctaaggccccaggttgctctgctgagcctggaggaggacccttccaaagcattccaactcttctgtgtggccctaaacgaggctgctttgcttcctcagaactttaaacaacctctgcattgcaattttttgactctttccatttgggagtcctctttctgttagacctgggaccaattcgactttgaactgtgtccagagataatttttatgatactgtatggaattgctccctcaatttttatcctttccagtactcagcatggtaccaagactaagctgatgagtcccaactgctctcctcacctcccatatgctactcatgagactccttcgtacctatcatcccacgctctccctcccatgttttaacatgtctggaattccccaatgggtgcatctctcagagattctcattaaagactggcattaacagccccttcagaagcct

SEQ ID NO: 12651 - protein, 156 aa, Homo sapiens
MWMLSFQLGRMSSCSNVCGSRQAQAAAEGGYQRYGVRSYLHQFYEDCTASIWEYEDDFQIQRSPNRWSSVFWKQELGFHTSSHSQEWNRKLQHKNCPRCCFGSLSPPGEALLCRHWDWPYHPKAPGCSAEPGGGPFQSIPTLLCGPKRGCFASSEL

SEQ ID NO: 12652 - DNA, 1092 bp, Homo sapiens
tgctgggattacaggcgtgagccactgcgccccgccaagagagaggggtctttaaaagtaccttttctgtaatgaaaagagcattgttcaactaggcatacattactcagtctggttcttacctttcatatgtcttttgatcctgtggccaaagcctgtggcattaatccatgtggatgttgtcattccagctgggaaggatgagttcttgcagcaacgtctgtgggtccaggcaggcacaggctgcagctgagggtggttaccagcgctatggagtccggtcctacctgcaccagttttatgaggactgtacagcctcaatttgggagtatgaggatgatttccagatccaaagatcacctaacaggtggagctcagtattctagcacagcatctaattcacaggagaagctcaatgaatgtttgctgaattgaggtgtttgagttgaagaaactgcaataattgttcttagtaaacagacctccttgtgacctgcaccaattcatatgatactgggatcaaaagcttcaacgaatatggtggctgatttagactcacctgcctcgggtgacattcaaaaggctgctgatgtgtcacggtgaggctgcgccaggctggcaccagagcctgcttcttccttccatggagtggagctggctgaagaggttgggcaatccgggtccaaggagctgagtctctgccgtgtattgactgtcttgtttcctgcttgacttccttgtttcctgtccccacctgcctcaccctaactcttcattcaagttgcaaatgtatattctcctctgaggaggcttgcttttgaggaagacagtagaaattccccaaattcccttttcagacccatcctgcaaaatatgcctaccctagagtgtaataatccgcacttttatttttgcttactctttctagtattttctggttaaattagaagcagtagaacatagtggctaataacatgagctgagaaagggtgaatctagacttttcaatttactagttgtgtaactttaaaccaattatttactccatgccttacacacttcatcaataaaatggaagtaatggtgtcttcc

SEQ ID NO: 12653 - protein, 71 aa, Homo sapiens
MWMLSFQLGRMSSCSNVCGSRQAQAAAEGGYQRYGVRSYLHQFYEDCTASIWEYEDDFQIQRSPNRWSSVF

SEQ ID NO: 12654 - DNA, 1644 bp, Homo sapiens
gtacaagctggcaggagctgttctcttctgcattggaggcacgtccatggcagggtgcctgctgatgtcggtgtttgtaaagagctactccaaagaagaaaaattcctccagcagaagtttaaagaacgaatcgcagacatcaaagcccacacccagccggttacaaaagctccagggccaggggaaacaaagattccagtcactttgtccagggttcaaaatgtccagcctctactggcaacctgaaacctttcccaccccagttcttcttgtctgatttatgcccgtggttaaaaagagcaggccagttttcgagataaagaagatttggcgttgactgccctagggctgtgttcagctgtgggcaatataatgggtggactcacacttgctcagttcaggcagctctgctggagggcggtgccatgcctaagcctgtgcacatgcatccagctgcttaagatgggtgcttccttgtacccggccaccagaaaacccctggaactcctctttcatagatcgtgactttgtgttattttccgtgttgtttgaaagtgccgaacagtttagaccagctcaccaatggctaatgtggtccattttattttctaatattggtttatctaatgttttctgcgtggtgctgtcttccattcctgtctcactatgtgtaagattttgtcatatgtgttcatagaaacatggaattctctgattttgagccgaacatgagtttttagactgtatcttgacatgaggttcctgacattggatacaaagttatcagcattcacaaatctttttgttttctccattttttttccctttgagatgaagtgctgttcttttgcctaggttggagtacagcggtgaaatcatagcgcactgcagccttgaactcctgggctcaagcgatcctcccacctcagcctcccaagtagctgggactacaggcacctgccaccacccccagttaatattttttttaattttttttagaggcaggatcttgctgtccaattttttttaaaaagctaaaattgccaactttagaatcttgaccaaaaaaaattaattttaggagcatctatttatgcagtgttcaaaagtactgaattagaaaccaggaagttttagttccttctactacctgtgtgatcttggggaaattatttaacctctcagtcctaattttccccttctgtataatgggagttctggatcacaatatgtctgggctctcattacccaaacatctgagattccatttttgccatgtgtcatcgagtcgctccccaacagatgtttgtgatgtttttgtggctgtcaccatggtgggattctttcagaatgagactcctggaaattcactgagtcagcagccttcacaccatctacccttaaatatccaaccccagcaatttatacaacgctgtcatatttttaaaaaaacaaaagtaagccatcctcaaataaggaaccccttttttttttcttccttcactggataaataaaatatgtgaacaagtggaacctgaattgcattgtcattccttcagtgtggttattttctctccaacatgtaattttccattctgagactgaataagctctgatgtttccccggctaaatggaagaata

SEQ ID NO: 12655 - protein, 100 aa, Homo sapiens [sequence omitted]

SEQ ID NO: 12656 - DNA, 1934 bp, Homo sapiens
gaccactgaatgttttctcaatgaaaatgtggaacaactgggggtggtgtggtggtcggaggagggggtgcacaaaaatactatcaactaaaaagggaatccaaatgtctattaaaaataagcatttgattgtaattccagcattcagccacacgatgtcacaattggattttgattttcactgtgtgtttgtctcaatagatgaaggcattttcaaagctggagcagagaggtctgaaacacggggggcagcagaagtccaagaagatgaagatactcaggttgaggttccagtcgatcagaggccagcagaaatagtagacgaggaagaagatggagagaaggcaaacaaggatgcagaacagaaagaagacttttcaggaatgaatggtgaccttgaagaggaaggaggtagggaggctacagatgcccctgagcaagtcgaggagattctggatcacagtgagcagcaggcacgccctgctcgtgtaaatggaggcaccgatgaggagaatggtgaggagctgcagcaggttaataatgagcttcaactggtcctagacaaggaaagaaagtctcaaggagctggcagtggacaagatgaggctgatgtagaccctcaaagaccaccaaggccagaagtaaaaattaccagtccagaagaaaatgaaaacaaccaacaaaacaaggactatgctgccgtggcttagaacatttttaaaaagagagtatatggatcgcaagaaaaatgaagggttatcatacttgaaagataagcacatagttattgctgaatataatgtgacactatggtcgaatactacctacgaattataacattagaagcctagtggaaagaccagataactttaaatggctactaaaggataattacttacttttattgcatgtgttttaaaagtcatatagaaatattaaataagacggacagaggagaatttgcactggaagacaattgccacttgtaaaggatgaaaaataggatcactcttattgtacgctttattataagtttagaaggcagtttattctaaataatttttctctaggaaggcgtagaattttaaagaactggtaataggaaagcatgtactattttcttaaagcaataaactcttgaatgaacagattgcgatttactttcagacataatttggagatggcagtagatcaaaatgtgtccatgacttgttaacatgcctttctttcttcctccttagccaaaatccacctttgaactacaaagacagagcaaggcgttcattttggtgggaggaagcattggttcagagtgttagtgactagtatcgccatgccgtcacttaaatgctttcaggcttgcatgcttgtggctccaatggcgcacactcaggaaggaattgtaaaggagcacccagttatattataaagcctggatgtatggtttgcagataatggaaatcctgtggattttcactgatccagtctatctttaccaatagtatctctctcttctcccttatgttattagagaacctgatattggctattccaaagattaaattattttcaaatagttttcaacaaaaataaaagtgtattaggaagaaaaaagtagactatatgaagagtttgtgactgctcaatttaacttgttttttgccttatttctattaagactgttttactatgtttttgccctagggatatcagcaaatatttatttttcctagcatgatatagttagaatttcaagcagatttctttgtaattagaaggcatctgatagaaattgtaaaactttagaagttattataatgaaaccaattcctgaatcacaacttcatggactgactaaattgatttatagttgccttgtgaggtatgtatggggaaaacataaaaacataattaaaacataatttcgtcctttt

SEQ ID NO: 12657 - protein, 229 aa, Homo sapiens
MKMWNNWGWCGGRRRGCTKILSTKKGIQMSIKNKHLIVIPAFSHTMSQLDFDFHCVFVSIDEGIFKAGAERSETRGAAEVQEDEDTQVEVPVDQRPAEIVDEEEDGEKANKDAEQKEDFSGMNGDLEEEGGREATDAPEQVEEILDHSEQQARPARVNGGTDEENGEELQQVNNELQLVLDKERKSQGAGSGQDEADVDPQRPPRPEVKITSPEENENNQQNKDYAAVA

SEQ ID NO: 12658 - DNA, 2993 bp, Homo sapiens
aaggccccgcgcgtttccggctcctgctcagaagctgtccaccttgattctgcccgtagcaggtgaacctggtgtggtgcgcgcactgcgggtcctgattggctgtgcacgccacggtgaaaaacttgagcgtctactccgagtcctgcaagctcctagtgtctcctctgggtggacgcctaggcgcacggccgttacttctctttcacctgtggattcgtcagtttctcgttcgtttcaggaggcgatcccgcgccctgggtgcggtgaggccgctgggacagcggaggtgcctcccgacgcgaagcagcgagctgaggcggcggccagcggggaagatgagcggcagcagcgccaggtccagccacctgtctcagcccgtcgtgaagagcgtgcttgtgtaccgcaacggggaccccttctacgcggggcgccgcgtcgtcatccatgagaagaaggtgtccagcttcgaagtcttcctgaaggaggtgaccggcggcgttcaggcaccctttggggccgtcaggaacatctacaccccgcggactggccaccgaatccggaagctagaccagatccagagcgggggcaattacgtggctggaggccaggaagccttcaagaaactcaattacttggacataggagaaatcaagaaaagaccaatggaagttgttaatacagaggtaaaaccagtaatccatagcaggatcaacgtgtcagctcgctttagaaaaccgcttcaggagccgtgcactatcttcttgattgcaaatggagacctcataaacccagcttctcgcctccttatccccagaaaaaccttgaatcagtgggatcatgtactacaaatggtcacagaaaaaatcactctgaggagcggggctgttcacaggctttatactttagaaggaaaacttgttgagagtggagcagagttggagaatgggcagttttatgtggctgttggcagagataagtttaagaaactgccttacagtgagttactttttgacaagtcaacgatgagaaggccttttggtcagaaagcttcttcactacctcctattgtaggatccagaaagtctaaagggagtggaaatgatcgccactctaagtcaacagttggatccagtgacaactcatctcctcagcccctgaagaggaaagggaaaaaagaagacgtgaattcagaaaaactgacgaaattgaaacaaaatgtaaaattaaagaattcacaagaaaccattccaaatagtgatgaaggcattttcaaagctggagcagagaggtctgaaacacggggggcagcagaagtccaagaagatgaagatactcaggttgaggttccagtcgatcagaggccagcagaaatagtagacgaggaagaagatggagagaaggcaaacaaggatgcagaacagaaagaagacttttcaggaatgaatggtgaccttgaagaggaaggaggtagggaggctacagatgcccctgagcaagtcgaggagattctggatcacagtgagcagcaggcacgccctgctcgtgtaaatggaggcaccgatgaggagaatggtgaggagctgcagcaggttaataatgagcttcaactggtcctagacaaggaaagaaagtctcaaggagctggcagtggacaagatgaggctgatgtagaccctcaaagaccaccaaggccagaagtaaaaattaccagtccagaagaaaatgaaaacaaccaacaaaacaaggactatgctgccgtggcttagaacatttttaaaaagagagtatatggatcgcaagaaaaatgaagggttatcatacttgaaagataagcacatagttattgctgaatataatgtgacactatggtcgaatactacctacgaattataacattagaagcctagtggaaagaccagataactttaaatggctactaaaggataattacttacttttattgcatgtgttttaaaagtcatatagaaatattaaataagacggacagaggagaatttgcactggaagacaattgccacttgtaaaggatgaaaaataggatcactcttattgtacgctttattataagtttagaaggcagtttattctaaataatttttctctaggaaggcgtagaattttaaagaactggtaataggaaagcatgtactattttcttaaagcaataaactcttgaatgaacagattgcgatttactttcagacataatttggagatggcagtagatcaaaatgtgtccatgacttgttaacatgcctttctttcttcctccttagccaaaatccacctttgaactacaaagacagagcaaggcgttcattttggtgggaggaagcattggttcagagtgttagtgactagtatcgccatgccgtcacttaaatgctttcaggcttgcatgcttgtggctccaatggcgcacactcaggaaggaattgtaaaggagcacccagttatattataaagcctggatgtatggtttgcagataatggaaatcctgtggattttcactgatccagtctatctttaccaatagtatctctctcttctcccttatgttattagagaacctgatattggctattccaaagattaaattattttcaaatagttttcaacaaaaataaaagtgtattaggaagaaaaaagtagactatatgaagagtttgtgactgctcaatttaacttgttttttgccttatttctattaagactgttttactatgtttttgccctagggatatcagcaaatatttatttttcctagcatgatatagttagaatttcaagcagatttctttgtaattagaaggcatctgatagaaattgtaaaactttagaagttattataatgaaaccaattcctgaatcacaacttcatggactgactaaattgatttatagttgccttgtgaggtatgtatggggaaaacataaaaacataattaaaacataatttcgtcctttt

SEQ ID NO: 12659 - protein, 476 aa, Homo sapiens
MSGSSARSSHLSQPVVKSVLVYRNGDPFYAGRRVVIHEKKVSSFEVFLKEVTGGVQAPFGAVRNIYTPRTGHRIRKLDQIQSGGNYVAGGQEAFKKLNYLDIGEIKKRPMEVVNTEVKPVIHSRINVSARFRKPLQEPCTIFLIANGDLINPASRLLIPRKTLNQWDHVLQMVTEKITLRSGAVHRLYTLEGKLVESGAELENGQFYVAVGRDKFKKLPYSELLFDKSTMRRPFGQKASSLPPIVGSRKSKGSGNDRHSKSTVGSSDNSSPQPLKRKGKKEDVNSEKLTKLKQNVKLKNSQETIPNSDEGIFKAGAERSETRGAAEVQEDEDTQVEVPVDQRPAEIVDEEEDGEKANKDAEQKEDFSGMNGDLEEEGGREATDAPEQVEEILDHSEQQARPARVNGGTDEENGEELQQVNNELQLVLDKERKSQGAGSGQDEADVDPQRPPRPEVKITSPEENENNQQNKDYAAVA

SEQ ID NO: 12660 - DNA, 2077 bp, Homo sapiens
gtgcaatggtgccatcttggctcaccgcaacctctgccttccaggttcaagcaattctcctgccttagcctcctgagtagctggaattacaggcatgcgccaccacgcccaggaggcgatcccgcgccctgggtgcggtgaggccgctgggacagcggaggtgcctcccgacgcgaagcagcgagctgaggcggcggccagcggggaagatgagcggcagcagcgccaggtccagccacctgtctcagcccgtcgtgaagagcgtgcttgtgtaccgcaacggggaccccttctacgcggggcgccgcgtcgtcatccatgagaagaaggtgtccagcttcgaagtcttcctgaaggaggtgaccggcggcgttcaggcaccctttggggccgtcaggaacatctacaccccgcggactggccaccgaatccggaagctagaccagatccagagcgggggcaattacgtggctggaggccaggaagccttcaagaaactcaattacttggacataggagaaatcaagaaaagaccaatggaagttgttaatacagaggtaaaaccagtaatccatagcaggatcaacgtgtcagctcgctttagaaaaccgcttcaggagccgtgcactatcttcttgattgcaaatggagacctcataaacccagcttctcgcctccttatccccagaaaaaccttgaatcagtgggatcatgtactacaaatggtcacagaaaaaatcactctgaggagcggggctgttcacaggctttatactttagaaggaaaacttgttgagagtggagcagagttggagaatgggcagttttatgtggctgttggcagagataagtttaagaaactgccttacagtgagttactttttgacaagtcaacgatgagaaggccttttggtcagaaagcttcttcactacctcctattgtaggatccagaaagtctaaagggagtggaaatgatcgccactctaagtcaacagttggatccagtgacaactcatctcctcagcccctgaagaggaaagggaaaaaagaagacgtgaattcagaaaaactgacgaaattgaaacaaaatgtaaaattaaagaattcacaagaaaccattccaaatagtgatgaaggcattttcaaagctggagcagagaggtctgaaacacggggggcagcagaagtccaagaagatgaagatactcaggttgaggttccagtcgatcagaggccagcagaaatagtagacgaggaagaagatggagagaaggcaaacaaggatgcagaacagaaagaagacttttcaggaatgaatggtgaccttgaagaggaaggaggtagggaggctacagatgcccctgagcaagtcgaggagattctggatcacagtgagcagcaggcacgccctgctcgtgtaaatggaggcaccgatgaggagaatggtgaggagctgcagcaggttaataatgagcttcaactggtcctagacaaggaaagaaagtctcaaggagctggcagtggacaagatgaggctgatgtagaccctcaaagaccaccaaggccagaagtaaaaattaccagtccagaagaaaatgaaaacaaccaacaaaacaaggactatgctgccgtggcttagaacatttttaaaaagagagtatatggatcgcaagaaaaatgaagggttatcatacttgaaagataagcacatagttattgctgaatataatgtgacactatggtcgaatactacctacgaattataacattagaagcctagtggaaagaccagataactttaaatggctactaaaggataattacttacttttattgcatgtgttttaaaagtcatatagaaatattaaataagacggacagaggagaatttgcactggaagacaattgccacttgtaaaggatgaaaaataggatcactcttattgtacgctttattataagtttagaaggcagtttattctaaataatttttctctaggaaggcgtagaattttaaagaactggtaataggaaagcatgtactattttcttaaagcaataaactcttgaatgaac

SEQ ID NO: 12661 - protein, 476 aa, Homo sapiens; identical to SEQ ID NO: 12659

SEQ ID NO: 12662 - DNA, 1108 bp, Homo sapiens
ctgggggtggtgtggtggtcggaggagggggtgcacaaaaatactatcaactaaaaagggaatccaaatgtctattaaaaataagcatttgattgtaattccagcattcagccacacgatgtcacaattggattttgattttcactgtgtgtttgtctcaatagatgaaggcattttcaaagctggagcagagaggtctgaaacacggggggcagcagaagtccaagaagatgaagatactcaggttgaggttccagtcgatcagaggccagcagaaatagtagacgaggaagaagatggagagaaggcaaacaaggatgcagaacagaaagaagacttttcaggaatgaatggtgaccttgaagaggaaggaggtagggaggctacagatgcccctgagcaagtcgaggagattctggatcacagtgagcagcaggcacgccctgctcgtgtaaatggaggcaccgatgaggagaatggtgaggagctgcagcaggttaataatgagcttcaactggtcctagacaaggaaagaaagtctcaaggagctggcagtggacaagatgaggctgatgtagaccctcaaagaccaccaaggccagaagtaaaaattaccagtccagaagaaaatgaaaacaaccaacaaaacaaggactatgctgccgtggcttagaacatttttaaaaagagagtatatggatcgcaagaaaaatgaagggttatcatacttgaaagataagcacatagttattgctgaatataatgtgacactatggtcgaatactacctacgaattataacattagaagcctagtggaaagaccagataactttaaatggctactaaaggataattacttacttttattgcatgtgttttaaaagtcatatagaaatattaaataagacggacagaggagaatttgcactggaagacaattgccacttgtaaaggatgaaaaataggatcactcttattgtacgctttattataagtttagaaggcagtttattctaaataatttttctctaggaaggcgtagaattttaaagaactggtaataggaaagcatgtactattttcttaaagcaataaactcttgaatga

SEQ ID NO: 12663 - protein, 201 aa, Homo sapiens
MSIKNKHLIVIPAFSHTMSQLDFDFHCVFVSIDEGIFKAGAERSETRGAAEVQEDEDTQVEVPVDQRPAEIVDEEEDGEKANKDAEQKEDFSGMNGDLEEEGGREATDAPEQVEEILDHSEQQARPARVNGGTDEENGEELQQVNNELQLVLDKERKSQGAGSGQDEADVDPQRPPRPEVKITSPEENENNQQNKDYAAVA

SEQ ID NO: 12664 - DNA, 2204 bp, Homo sapiens
aaggccccgcgcgtttccggctcctgctcagaagctgtccaccttgattctgcccgtagcaggtgaacctggtgtggtgcgcgcactgcgggtcctgattggctgtgcacgccacggtgaaaaacttgagcgtctactccgagtcctgcaagctcctagtgtctcctctgggtggacgcctaggcgcacggccgttacttctctttcacctgtggattcgtcagtttctcgttcgtttcaggaggcgatcccgcgccctgggtgcggtgaggccgctgggacagcggaggtgcctcccgacgcgaagcagcgagctgaggcggcggccagcggggaagatgagcggcagcagcgccaggtccagccacctgtctcagcccgtcgtgaagagcgtgcttgtgtaccgcaacggggaccccttctacgcggggcgccgcgtcgtcatccatgagaagaaggtgtccagcttcgaagtcttcctgaaggaggtgaccggcggcgttcaggcaccctttggggccgtcaggaacatctacaccccgcggactggccaccgaatccggaagctagaccagatccagagcgggggcaattacgtggctggaggccaggaagccttcaagaaactcaattacttggacataggagaaatcaagaaaagaccaatggaagttgttaatacagaggtaaaaccagtaatccatagcaggatcaacgtgtcagctcgctttagaaaaccgcttcaggagccgtgcactatcttcttgattgcaaatggagacctcataaacccagcttctcgcctccttatccccagaaaaaccttgaatcagtgggatcatgtactacaaatggtcacagaaaaaatcactctgaggagcggggctgttcacaggctttatactttagaaggaaaacttgttgagagtggagcagagttggagaatgggcagttttatgtggctgttggcagagataagtttaagaaactgccttacagtgagttactttttgacaagtcaacgatgagaaggccttttggtcagaaagcttcttcactacctcctattgtaggatccagaaagtctaaagggagtggaaatgatcgccactctaagtcaacagttggatccagtgacaactcatctcctcagcccctgaagaggaaagggaaaaaagaagacgtgaattcagaaaaactgacgaaattgaaacaaaatgtaaaattaaagaattcacaagaaaccattccaaatagtgatgaaggcattttcaaagctggagcagagaggtctgaaacacggggggcagcagaagtccaagaagatgaagatactcaggttgaggttccagtcgatcagaggccagcagaaatagtagacgaggaagaagatggagagaaggcaaacaaggatgcagaacagaaagaagacttttcaggaatgaatggtgaccttgaagaggaaggaggtagggaggctacagatgcccctgagcaagtcgaggagattctggatcacagtgagcagcaggcacgccctgctcgtgtaaatggaggcaccgatgaggagaatggtgaggagctgcagcaggttaataatgagcttcaactggtcctagacaaggaaagaaagtctcaaggagctggcagtggacaagatgaggctgatgtagaccctcaaagaccaccaaggccagaagtaaaaattaccagtccagaagaaaatgaaaacaaccaacaaaacaaggactatgctgccgtggcttagaacatttttaaaaagagagtatatggatcgcaagaaaaatgaagggttatcatacttgaaagataagcacatagttattgctgaatataatgtgacactatggtcgaatactacctacgaattataacattagaagcctagtggaaagaccagataactttaaatggctactaaaggataattacttacttttattgcatgtgttttaaaagtcatatagaaatattaaataagacggacagaggagaatttgcactggaagacaattgccacttgtaaaggatgaaaaataggatcactcttattgtacgctttattataagtttagaaggcagtttattctaaataatttttctctaggaaggcgtagaattttaaagaactggtaataggaaagcatgtactattttcttaaagcaataaactcttgaatga

SEQ ID NO: 12665 - protein, 476 aa, Homo sapiens; identical to SEQ ID NO: 12659

SEQ ID NO: 12666 - DNA, 339 bp, Homo sapiens
gcgtcgtcatccatgagaagaaggtgtccagcttcgaagtcttcctgaaggaggtgaccggcggcgttcaggcaccctttggggccgtcaggaacatctacaccccgcggactggccaccgaatccggaagctagaccagatccagagcgggggcaattacgtggctggaggccaggaagccttcaagaaactcaattacttggacataggagaaatcaagaaaagaccaatggaagttgttaatacagagctacatgttctctgattgaaatccatgggaaggttccctgtcaagtgagaagattctgagcgttgttaaataaatctttaccaaagct

SEQ ID NO: 12667 - protein, 75 aa, Homo sapiens
EEGVQLRSLPEGGDRRRSGTLWGRQEHLHPADWPPNPEARPDPERGQLRGWRPGSLQETQLLGHRRNQEKTNGSC

SEQ ID NO: 12668 - DNA, 1382 bp, Homo sapiens
cattatgctaacagcataaacatgcagggggtgggagcagggtcacaaaagtgagtgttgtcaattctacttggaatgaaaggttgaaataatttaaacagtacgggaaatgcagagcaattttctcctctggtgacaatatagtgtccaacacttggaagtgatttttaagaatgtttatttaaattaaaaggatggatttccaaggaaaaaaaataaggaaaaggaaagaaaaaactgaacagaaaacgcaaaagtatcagtttggtcactaacctttgcaaggatacctttttattttctttaagattcctgttgtttatacacagattttaagtttactcctactgctgacccaagtgaaattccttctccagtcacagtgtcaacctctaccccccaactgcaacgagagttttgaggggcatcaatcacaccgagaagtcacagcccctcaaccactgaggtgtgggggggtagggatctgcatttcttcatatcaaccccacactatagggcacctaaatgggtgggcggtgggggagaccgactcacttgagtttcttgaaggcttcctggcctccagccacgtaattgcccccgctctggatctggtctagcttccggattcggtggccagtccgcggggtgtagatgttcctgacggccccaaagggtgcctgaacgccgccggtcacctccttcaggaagacttcgaagctggacaccttcttctcatggatgacgacgcggcgccccgcgtagaaggggtccccgttgcggtacacaagcacgctcttcacgacgggctgagacaggtggctggacctggcgctgctgccgctcatcttccccgctggccgccgcctcagctcgctgcttcgcgtcgggaggcacctccgctgtcccagcggcctcaccgcacccagggcgcgggatcgcctcctgaaacgaacgagaaactgacgaatccacaggtgaaagagaagtaacggccgtgcgcctaggcgtccacccagaggagacactaggagcttgcaggactcggagtagacgctcaagtttttcaccgtggcgtgcacagccaatcaggacccgcagtgcgcgcaccacaccaggttcacctgctacgggcagaatcaaggtggacagcttctgagcaggagccggaaacgcgcggggccttcaaacaggcacgcctagtgagggcaggagagaggaggacgcacacacacacacacacacaaatatggtgaaacccaatttcttacatcatatctgtgctaccctttccaaacagcctaatttttcttttctctcttcttgcacctttacccctcaatctcctgcttgctcccaaattaaagcaattaagttcctgg

SEQ ID NO: 12669 - protein, 84 aa, Homo sapiens; identical to SEQ ID NO: 1252

SEQ ID NO: 12670 - DNA, 782 bp, Homo sapiens
tgccatcttggctcaccgcaacctctgccttccaggttcaagcaattctcctgccttagcctcctgagtagctggaattacaggcatgcgccaccacgcccaggaggcgatcccgcgccctgggtgcggtgaggccgctgggacagcggaggtgcctcccgacgcgaagcagcgagctgaggcggcggccagcggggaagatgagcggcagcagcgccaggtccagccacctgtctcagcccgtcgtgaagagcgtgcttgtgtaccgcaacggggaccccttctacgcggggcgccgcgtcgtcatccatgagaagaaggtgtccagcttcgaagtcttcctgaaggaggtgaccggcggcgttcaggcaccctttggggccgtcaggaacatctacaccccgcggactggccaccgaatccggaagctagaccagatccagagcgggggcaattacgtggctggaggccaggaagccttcaagaaactcaagtgagtcggtctcccccaccgcccacccatttaggtgccctatagtgtggggttgatatgaagaaatgcagatccctacccccccacacctcagtggttgaggggctgtgacttctcggtgtgattgatgcccctcaaaactctcgttgcagttggggggtagaggttgacactgtgactggagaaggaatttcacttgggtcagcagtaggagtaaacttaaaatctgtgtataaacaacaggaatcttaaagaaaataaaaaggtatccttgcaaaggttagtgacc

SEQ ID NO: 12671 - protein, 75 aa, Homo sapiens
MRHHAQEAIPRPGCGEAAGTAEVPPDAKQRAEAAASGEDERQQRQVQPPVSARREERACVPQRGPLLRGAPRRHP

SEQ ID NO: 12672 - DNA, 3933 bp, Homo sapiens
cgcggcacgccccgcgcatgcctggtgcacagagtctgcaggtcgggcggtagcgacaggtcagagctgcggcctgagcagccagcgtccggcatgaaggtctggggtctggctgctgcctgcttcttgctccagcaccatggaatgcctgcgcagtttaccctgcctcctgccccgcgcgatgagacttccccggcggacgctgtgtgccctggccttggacgtgacctctgtgggtcctcccgttgctgcctgcggccgccgagccaacctgattggaaggagccgagcggcgcagctttgcgggcccgaccggctccgcgtggcaggtgaagtgcaccggtttagaacctctgacgtctctcaagccactttagccagtgtagccccagtatttactgtgacaaaatttgacaaacagggaaacgttacttcttttgtatttgaaagctgtgataactccagagtgtcttctgatattagattatcgtaatttaaacttagagcaatggctgttccgggaactcccttcacagttgtctggagagggtcaactcgttacataccctttaccttttgagtttagagctatagaagcactcctgcaatattggatcaacacccttcaggggaaacttagcattttgcagccactgatccttgagaccttggatgctttggtggaccccaaacattcttctgtagacagaagcaaactgcacattttactacagaatggcaaaagtctatcagagttagaaacagatattaaaattttcaaagagtcaattttggagatcttggatgaggaagagttgctagaagagctctgtgtatcaaaatggagtgacccacaagtctttgaaaagagcagtgctgggattgaccatgcagaagagatggagttgctgttggaaaactactaccgattggctgacgatctctccaatgcagctcgtgagcttagggtgctgattgatgattcacaaagtattattttcattaatctggacagccaccgaaacgtgatgatgaggttgaatctacagctgaccatgggaaccttctctctttcgctctttggactaatgggagttgcttttggaatgaatttggaatcttcccttgaagaggtgagaatgtattattatttctaaaacttgggggttttggccgggcatggtggctcatgtcagtaatcctagcactttaggaggctgaggcaggtggatcacctgaggtcaggagtttgagaccaacctggccaacatggcgaaaccctgtctctactaaaaatacaaaaattagacaggcacggtggcaggcacctgtaatcccagctacttgggaggctgaggcaggagaatcacttgaacccgggaggcggaggttgcagtgagctgagatcgcgccgttgcactccagcctgggagacagagtgagactctgtctccaaaaaaaaagattgggttttgaagatcgatatttttaatggatttaaaaaataaaggctgggcaccttggctcaacgcctgtaatcccagcactttgggaggctgaggcaggtagatcacgaggtcaggagatcgaggccatcctggctaacccggtgaaaccctgtctctactaaaaatacaaaaaattagccgggcgtggtggcagacgcctgtagtcccagctactccggaggctgaggcaggagaatggcatgaacctgggaggcggagcttgcagtgagccaggatcacaccactgcactccagcctgggcgacaggacagagtgagactctgtctcaaaaaataaataaataaaaagtctaacctgtaaactaccatggtgaaataaaatatataatgtaactcacaattcaggcagtactgttggaccatgttataacctagataaatacagcctaggttactttgtttcccaaaacatataattacagatgggaaaggtgtgataaaacagtgtctctgtgaagcagtgttaatgaagagtttttattttttaattcttacatgtctggcaacgtaccaggcggtttgcatactttatttggctcaatcattgcaactctgaaaatagatatattatccctactttgtagatgagaagactgaggctcagaacatttaacttgcccacaggcatagagctggaaaaataacagaattaggacatgaccccaaagacttgcactttctactgctctgttgcctttctgtattaagataatacttaactcccagagtttttcatttcactgtggttttgtacagtcatccctcagtatccaagaagaattggttacaggatccccacagataccaaagtctgtgggtattcaagtctctgatataaaatgacccagtacagtcaaccttgcatatctgcagatacagaacccactgactgtgttttcacagaatagcttattgtaagttttctagaactgaacctggatgtgcatctggcacagtgtgatgctggattctgtgtcctcattagtctaacgagtctactctgttgcccacatcacctcccattaggaccactatgcccttttaaaaagtggtctttataagatgtaagtattatgacacccttctgcatacaactattcaatggcttttgattagccttaggataaaaatcccgtcctgccgcaccgacttgtccatcttgtgggtagccacttgttactacctctctcagtgtccttcccagacatgctgcttccactcctctcccctcagatccccgttttgcttagttacttcctcctcatctttcaggtctcaaagtagttgtcccttcactgaatgcaccgacaacctggcccagtaaagttactttgtcgtctgcgcccaaataatcctacccttccatctgctacattccttaaatctgcaatcccttgttcaaagcctgcaaaagagcatgagctccttgaagcaaagacagtattagtcatttttaatgtaaagtataaaagaaaaggaaatacatgtgttcattcatctcacaaatacgtttttttattgcctgttatataccaagcactgctttaggcccatttagcagtgagtctgcccttgcgtaggttatattgtagtggaggagagagttcataaacaaacaaagtatgttaagtgctaagtgcctcagagaaaaataaagccagagaagcggatagagaatgttaggcagtaggatgtgtggcattttagagatagggtggtcaaggaagatgtaaggcggtaacaccctggtggaggcaggaagatctgggggagagtgttctaagtagagggaaccacagaagtaaagattgaggcaggaacgatctgagcttgttcatgaaatggcaagaaggttggaatggttagaagagcatgagtcaggtggaaaatgaggtcccagatgcagataagtatgatcatgtcagtgacgtagagcgtggtaggggtttggatttctaagtgggataggaacccactggaggtttgaactcaaatctagatcattggaaagttcagaagcaagcagaataccttgtgcaacataatccagccattgacattctcaaaagatacatccaaagacctttacagattccctaagtgtgactacaggactttctctacaagtccctgtcttttctctaaatacataatcatgtttatgtatatatactcaatctacaagctaactccattttatactttgatatttttctctcacttaattgccaacttttcaaaacaatggaagatttttcaaattcctttcttatagttttagtatgtgcaatcctaggtacagcacagcccatttgtaatgagataagagtggtaggtggtagtgagctacgcttgctcagtagtaggctgaaaagattcaaattaatgtcttatcagaattacaa

SEQ ID NO: 12673 - protein, 117 aa, Homo sapiens
MECLRSLPCLLPRAMRLPRRTLCALALDVTSVGPPVAACGRRANLIGRSRAAQLCGPDRLRVAGEVHRFRTSDVSQATLASVAPVFTVTKFDKQGNVTSFVFESCDNSRVSSDIRLS

SEQ ID NO: 12674 - DNA, 1788 bp, Homo sapiens
cgcggcacgccccgcgcatgcctggtgcacagagtctgcaggtcgggcggtagcgacaggtcagagctgcggcctgagcagccagcgtccggcatgaaggtctggggtctggctgctgcctgcttcttgctccagcaccatggaatgcctgcgcagtttaccctgcctcctgccccgcgcgatgagacttccccggcggacgctgtgtgccctggccttggacgtgacctctgtgggtcctcccgttgctgcctgcggccgccgagccaacctgattggaaggagccgagcggcgcagctttgcgggcccgaccggctccgcgtggcaggtgaagtgcaccggtttagaacctctgacgtctctcaagccactttagccagtgtagccccagtatttactgtgacaaaatttgacaaacagggaaacgttacttcttttgaaaggaagaaaactgaattataccaagagttaggtcttcaagccagagatttgagatttcagcatgtaatgagtatcacagtcagaaacaataggattatcatgagaatggagtatttgaaagctgtgataactccagagtgtcttctgatattagattatcgtaatttaaacttagagcaatggctgttccgggaactcccttcacagttgtctggagagggtcaactcgttacataccctttaccttttgagtttagagctatagaagcactcctgcaatattggatcaacacccttcaggggaaacttagcattttgcagccactgatccttgagaccttggatgctttggtggaccccaaacattcttctgtagacagaagcaaactgcacattttactacagaatggcaaaagtctatcagagttagaaacagatattaaaattttcaaagagtcaattttggagatcttggatgaggaagagttgctagaagagctctgtgtatcaaaatggagtgacccacaagtctttgaaaagagcagtgctgggattgaccatgcagaagagatggagttgctgttggaaaactactaccgattggctgacgatctctccaatgcagctcgtgagcttagggtgctgattgatgattcacaaagtattattttcattaatctggacagccaccgaaacgtgatgatgaggttgaatctacagctgaccatgggaaccttctctctttcgctctttggactaatgggagttgcttttggaatgaatttggaatcttcccttgaagaggaccatagaattttttggctgattacaggaattatgttcatgggaagtggcctcatctggaggcgcctgctttcattccttggacgacagctagaagctccattgcctcctatggtatgaaggatatggttcacggcggtattgtggaagggttatgatcatgggccctaaagtcagagcgcctgggattaagttgtcacaggcactatggcccttgcgagttgctttctcaaacttccttcagtttccctatctgtcagttaagtcggtattacctgcttcatagggttatgggaagaattaaacaatatgtgtaaagcacttactagcacactgcctaacacaataagttagaaatataatttgtgtagaactctgacaacatacatttaaacagatgttagtaattctggtataaggtttgtcataaccaaatggaaatgtaggaaacatttataacgttcttaaaagatagaaaattcacctccattttctttgtacttgaagatggcaccactggaataaatacttaagacactgat

SEQ ID NO: 12675 - protein, 408 aa, Homo sapiens
MECLRSLPCLLPRAMRLPRRTLCALALDVTSVGPPVAACGRRANLIGRSRAAQLCGPDRLRVAGEVHRFRTSDVSQATLASVAPVFTVTKFDKQGNVTSFERKKTELYQELGLQARDLRFQHVMSITVRNNRIIMRMEYLKAVITPECLLILDYRNLNLEQWLFRELPSQLSGEGQLVTYPLPFEFRAIEALLQYWINTLQGKLSILQPLILETLDALVDPKHSSVDRSKLHILLQNGKSLSELETDIKIFKESILEILDEEELLEELCVSKWSDPQVFEKSSAGIDHAEEMELLLENYYRLADDLSNAARELRVLIDDSQSIIFINLDSHRNVMMRLNLQLTMGTFSLSLFGLMGVAFGMNLESSLEEDHRIFWLITGIMFMGSGLIWRRLLSFLGRQLEAPLPPMV

SEQ ID NO: 12676 - DNA, 2572 bp, Homo sapiens
cgcggcacgccccgcgcatgcctggtgcacagagtctgcaggtcgggcggtagcgacaggtcagagctgcggcctgagcagccagcgtccggcatgaaggtctggggtctggctgctgcctgcttcttgctccagcaccatggaatgcctgcgcagtttaccctgcctcctgccccgcgcgatgagacttccccggcggacgctgtgtgccctggccttggacgtgacctctgtgggtcctcccgttgctgcctgcggccgccgagccaacctgattggaaggagccgagcggcgcagctttgcgggcccgaccggctccgcgtggcaggtgaagtgcaccggtttagaacctctgacgtctctcaagccactttagccagtgtagccccagtatttactgtgacaaaatttgacaaacagggaaacgttacttcttttgaaaggaagaaaactgaattataccaagagttaggtcttcaagccagagatttgagatttcagcatgtaatgagtatcacagtcagaaacaataggattatcatgagaatggagtatttgaaagctgtgataactccagagtgtcttctgatattagattatcgtaatttaaacttagagcaatggctgttccgggaactcccttcacagttgtctggagagggtcaactcgttacataccctttaccttttgagtttagagctatagaagcactcctgcaatattggatcaacacccttcaggggaaacttagcattttgcagccactgatccttgagaccttggatgctttggtggaccccaaacattcttctgtagacagaagcaaactgcacattttactacagaatggcaaaagtctatcagagttagaaacagatattaaaattttcaaagagtcaattttggagatcttggatgaggaagagttgctagaagagctctgtgtatcaaaatggagtgacccacaagtctttgaaaagagcagtgctgggattgaccatgcagaagagatggagttgctgttggaaaactactaccgattggctgacgatctctccaatgcagctcgtgagcttagggtgctgattgatgattcacaaagtattattttcattaatctggacagccaccgaaacgtgatgatgaggttgaatctacagctgaccatgggaaccttctctctttcgctctttggactaatgggagttgcttttggaatgaatttggaatcttcccttgaagaggaccatagaattttttggctgattacaggaattatgttcatgggaagtggcctcatctggaggcgcctgctttcattccttggacgacagctagaagctccattgcctcctatggtatgaaggatatggttcacggcggtattgtggaagggttatgatcatgggccctaaagtcagagcgcctgggattaagttgtcacaggcactatggcccttgcgagttgctttctcaaacttccttcagtttccctatctgtcagttaagtcggtattacctgcttcatagggttatgggaagaattaaacaatatgtgtaaagcacttactagcacactgcctaacacaataagttagaaatataatttgtgtagaactctgacaacatacatttaaacagatgttagtaattctggtataaggtttgtcataaccaaatggaaatgtaggaaacatttataacgttcttaaaagatagaaaattcacctccattttctttgtacttgaagatggcaccactggaataaatacttaagacactgatactgcttatagtcctttcttcactgagtagttacataatacatcattttactagtggcttttcttttaaaaaagatactaaaattaatacttctgctttatttagatggcttctttacctaaaaagactcttctggcagatagaagcatggaattgaaaaatagcctcagactggatggacttggatcaggaaggagcatcctaacaaaccgttaggaacagccccgtggatactgaagttttttttatggtagttacaggaaacttctgatactctttttattattttcttgtatagagtcagacacttgaaaaaaactaatgtttgaagacaaaaatattttggcagtcacaataccagaactggattgcatttccagaattctgagttaaagaaacaaagtatttgctttgtaaaaggccaaaattctatttcctacaaactttaaatgctgtttttatagatgtgatatgaggcaacacaagcacagacagttgcatagattttaatttatacatatcaagaaaagtgcaatttcatgctgaatgaagcgtaggaacttgacaagcccataggtagctatagttctttgtcagtatagggaattatgttcatgtgaatttcctgattctcaggtgactaaaaagctagcattctatgtattaaccttacaacagactctgtaagtttgagctttaaaaaccaaactttgacataaccttatttcttgtatttgcccccttttttttataaaaggtgaataaaaagaaataatttaatatc

SEQ ID NO: 12677 - protein, 408 aa, Homo sapiens; identical to SEQ ID NO: 12675

SEQ ID NO: 12678 - DNA, 2039 bp, Homo sapiens
cgcggcacgccccgcgcatgcctggtgcacagagtctgcaggtcgggcggtagcgacaggtcagagctgcggcctgagcagccagcgtccggcatgaaggtctggggtctggctgctgcctgcttcttgctccagcaccatggaatgcctgcgcagtttaccctgcctcctgccccgcgcgatgagacttccccggcggacgctgtgtgccctggccttggacgtgacctctgtgggtcctcccgttgctgcctgcggccgccgagccaacctgattggaaggagccgagcggcgcagctttgcgggcccgaccggctccgcgtggcaggtgaagtgcaccggtttagaacctctgacgtctctcaagccactttagccagtgtagccccagtatttactgtgacaaaatttgacaaacagggaaacgttacttcttttgaaaggaagaaaactgaattataccaagagttaggtcttcaagccagagatttgagatttcagcatgtaatgagtatcacagtcagaaacaataggattatcatgagaatggagtatttgaaagctgtgataactccagagtgtcttctgatattagattatcgtaatttaaacttagagcaatggctgttccgggaactcccttcacagttgtctggagagggtcaactcgttacataccctttaccttttgagtttagagctatagaagcactcctgcaatattggatcaacacccttcaggggaaacttagcattttgcagccactgatccttgagaccttggatgctttggtggaccccaaacattcttctgtagacagaagcaaactgcacattttactacagaatggcaaaagtctatcagagttagaaacagatattaaaattttcaaagagtcaattttggagatcttggatgaggaagagttgctagaagagctctgtgtatcaaaatggagtgacccacaagtctttgaaaagagcagtgctgggattgaccatgcagaagagatggagttgctgttggaaaactactaccgattggctgacgatctctccaatgcagctcgtgagcttagggtgctgattgatgattcacaaagtattattttcattaatctggacagccaccgaaacgtgatgatgaggttgaatctacagctgaccatgggaaccttctctctttcgctctttggactaatgggagttgcttttggaatgaatttggaatcttcccttgaagaggaccatagaattttttggctgattacaggaattatgttcatgggaagtggcctcatctggaggcgcctgctttcattccttggacgacagctagaagctccattgcctcctatgatggcttctttacctaaaaagactcttctggcagatagaagcatggaattgaaaaatagcctcagactggatggacttggatcaggaaggagcatcctaacaaaccgttaggaacagccccgtggatactgaagttttttttatggtagttacaggaaacttctgatactctttttattattttcttgtatagagtcagacacttgaaaaaaactaatgtttgaagacaaaaatattttggcagtcacaataccagaactggattgcatttccagaattctgagttaaagaaacaaagtatttgctttgtaaaaggccaaaattctatttcctacaaactttaaatgctgtttttatagatgtgatatgaggcaacacaagcacagacagttgcatagattttaatttatacatatcaagaaaagtgcaatttcatgctgaatgaagcgtaggaacttgacaagcccataggtagctatagttctttgtcagtatagggaattatgttcatgtgaatttcctgattctcaggtgactaaaaagctagcattctatgtattaaccttacaacagactctgtaagtttgagctttaaaaaccaaactttgacataaccttatttcttgtatttgcccccttttttttataaaaggtgaataaaaagaaataatttaatatc

SEQ ID NO: 12679 - protein, 443 aa, Homo sapiens; identical to SEQ ID NO: 1254

SEQ ID NO: 12680 - DNA, 3891 bp, Homo sapiens
cgcggcacgccccgcgcatgcctggtgcacagagtctgcaggtcgggcggtagcgacaggtcagagctgcggcctgagcagccagcgtccggcatgaaggtctggggtctggctgctgcctgcttcttgctccagcaccatggaatgcctgcgcagtttaccctgcctcctgccccgcgcgatgagacttccccggcggacgctgtgtgccctggccttggacgtgacctctgtgggtcctcccgttgctgcctgcggccgccgagccaacctgattggaaggagccgagcggcgcagctttgcgggcccgaccggctccgcgtggcaggtgaagtgcaccggtttagaacctctgacgtctctcaagccactttagccagtgtagccccagtatttactgtgacaaaatttgacaaacagggaaacgttacttcttttgaaaggaagaaaactgaattataccaagagttaggtcttcaagccagagatttgagatttcagcatgtaatgagtatcacagtcagaaacaataggattatcatgagaatggagtatttgaaagctgtgataactccagagtgtcttctgatattagattatcgtaatttaaacttagagcaatggctgttccgggaactcccttcacagttgtctggagagggtcaactcgttacataccctttaccttttgagtttagagctatagaagcactcctgcaatattggatcaacacccttcaggggaaacttagcattttgcagccactgatccttgagaccttggatgctttggtggaccccaaacattcttctgtagacagaagcaaactgcacattttactacagaatggcaaaagtctatcagagttagaaacagatattaaaattttcaaagagtcaattttggagatcttggatgaggaagagttgctagaagagctctgtgtatcaaaatggagtgacccacaagtctttgaaaagagcagtgctgggattgaccatgcagaagagatggagttgctgttggaaaactactaccgattggctgacgatctctccaatgcagctcgtgagcttagggtgctgattgatgattcacaaagtattattttcattaatctggacagccaccgaaacgtgatgatgaggttgaatctacagctgaccatgggaaccttctctctttcgctctttggactaatgggagttgcttttggaatgaatttggaatcttcccttgaagaggaccatagaattttttggctgattacaggaattatgttcatgggaagtggcctcatctggaggcgcctgctttcattccttggacgacagctagaagctccattgcctcctatggtatgaaggatatggttcacggcggtattgtggaagggttatgatcatgggccctaaagtcagagcgcctgggattaagttgtcacaggcactatggcccttgcgagttgctttctcaaacttccttcagtttccctatctgtcagttaagtcggtattacctgcttcatagggttatgggaagaattaaacaatatgtgtaaagcacttactagcacactgcctaacacaataagttagaaatataatttgtgtagaactctgacaacatacatttaaacagatgttagtaattctggtataaggtttgtcataaccaaatggaaatgtaggaaacatttataacgttcttaaaagatagaaaattcacctccattttctttgtacttgaagatggcaccactggaataaatacttaagacactgatactgcttatagtcctttcttcactgagtagttacataatacatcattttactagtggcttttcttttaaaaaagatactaaaattaatacttctgctttatttagatggcttctttacctaaaaagactcttctggcagatagaagcatggaattgaaaaatagcctcagactggatggacttggatcaggaaggagcatcctaacaaaccgttaggaacagccccgtggatactgaagttttttttatggtagttacaggaaacttctgatactctttttattattttcttgtatagagtcagacacttgaaaaaaactaatgtttgaagacaaaaatattttggcagtcacaataccagaactggattgcatttccagaattctgagttaaagaaacaaagtatttgctttgtaaaaggccaaaattctatttcctacaaactttaaatgctgtttttatagatgtgatatgaggcaacacaagcacagacagttgcatagattttaatttatacatatcaagaaaagtgcaatttcatgctgaatgaagcgtaggaacttgacaagcccataggtagctatagttctttgtcagtatagggaattatgttcatgtgaatttcctgattctcaggtgactaaaaagctagcattctatgtattaaccttacaacagactctgtaagtttgagctttaaaaaccaaactttgacataaccttatttcttgtatttgcccccttttttttataaaaggtgaataaaaagaaataatttaatatcaccattgtatggattcctaatcaagatttcacgttctcagcccctgagactagttttctttgctctctgtaattagagcctttggaagcaaagttgaaaggaagtatttccattctgttactgttttgtagcactttgtccatttattgatttttaaagtagatatttagataccacccctgccctgccccaaaaagaaaaatgtttattgtcctgctaatctatatgcctacacctcagaagctgacagatgagcttcctaaaacatgaggatgaataaatgttagaactgtgatatcttctcatttccacagagatttgggtttaaaacaaatggctaatatttgtaagcctgaaagctgccatcctctttaacatcctacctaccttttaaaatattttctggaggttaagtacagttaggcactagaacatttgttaagcctcccaaagtagtgtgcatggaagattctagagtgtccagctcttgcactacaaatgtaataataacagaataaatacacttaccctgatgatattgagggtacatgattagcctaatgtgatgtcatatgaggaagtttaggagtccatttttcaggtggtttggtgataggaataaaaatgttactcccgtcgctgatttggaagaaaaccgatgaagtacaagtaaggtttccccactcctgtgtgtggtcatgggaagccattagagggaagctgcagaacagaatggaacaggacaggctgggctagactcgagcacgcagtggcccctgtgccaccacactgtgggtcaggaacacgcgtcatggtgttcttgtcggaatgtgaacatacagcaccctctagcattacgaatctcttaggatttttaagattgtatttgataatacttatatttcacagggcacacttttggcacacctcagagcacactgctgctattttgggtcgtatcactgtaaaatacataataagtactacttaactgtgacatgaagaattggaatcccagagggcaacatttgatttgactaagatcaggcataagatagaatttttgtcatttttccttgcagttttattgacttagtttatgagcttggataaaataattttttgatgaatcatgtcaataaaaggaaaaataatgtaactacctcataagtctgataaaaggaagttgctagtgttttatagaatttctgaaggtggttaaatcaagtatgatttcaaaatatcaactagttccacttttgtgattgcaggatgcttcttatactaaagttctcataaataataaatcagcttatgcc

SEQ ID NO: 12681 - protein, 408 aa, Homo sapiens; identical to SEQ ID NO: 12675

SEQ ID NO: 12682 - DNA, 3358 bp, Homo sapiens
cgcggcacgccccgcgcatgcctggtgcacagagtctgcaggtcgggcggtagcgacaggtcagagctgcggcctgagcagccagcgtccggcatgaaggtctggggtctggctgctgcctgcttcttgctccagcaccatggaatgcctgcgcagtttaccctgcctcctgccccgcgcgatgagacttccccggcggacgctgtgtgccctggccttggacgtgacctctgtgggtcctcccgttgctgcctgcggccgccgagccaacctgattggaaggagccgagcggcgcagctttgcgggcccgaccggctccgcgtggcaggtgaagtgcaccggtttagaacctctgacgtctctcaagccactttagccagtgtagccccagtatttactgtgacaaaatttgacaaacagggaaacgttacttcttttgaaaggaagaaaactgaattataccaagagttaggtcttcaagccagagatttgagatttcagcatgtaatgagtatcacagtcagaaacaataggattatcatgagaatggagtatttgaaagctgtgataactccagagtgtcttctgatattagattatcgtaatttaaacttagagcaatggctgttccgggaactcccttcacagttgtctggagagggtcaactcgttacataccctttaccttttgagtttagagctatagaagcactcctgcaatattggatcaacacccttcaggggaaacttagcattttgcagccactgatccttgagaccttggatgctttggtggaccccaaacattcttctgtagacagaagcaaactgcacattttactacagaatggcaaaagtctatcagagttagaaacagatattaaaattttcaaagagtcaattttggagatcttggatgaggaagagttgctagaagagctctgtgtatcaaaatggagtgacccacaagtctttgaaaagagcagtgctgggattgaccatgcagaagagatggagttgctgttggaaaactactaccgattggctgacgatctctccaatgcagctcgtgagcttagggtgctgattgatgattcacaaagtattattttcattaatctggacagccaccgaaacgtgatgatgaggttgaatctacagctgaccatgggaaccttctctctttcgctctttggactaatgggagttgcttttggaatgaatttggaatcttcccttgaagaggaccatagaattttttggctgattacaggaattatgttcatgggaagtggcctcatctggaggcgcctgctttcattccttggacgacagctagaagctccattgcctcctatgatggcttctttacctaaaaagactcttctggcagatagaagcatggaattgaaaaatagcctcagactggatggacttggatcaggaaggagcatcctaacaaaccgttaggaacagccccgtggatactgaagttttttttatggtagttacaggaaacttctgatactctttttattattttcttgtatagagtcagacacttgaaaaaaactaatgtttgaagacaaaaatattttggcagtcacaataccagaactggattgcatttccagaattctgagttaaagaaacaaagtatttgctttgtaaaaggccaaaattctatttcctacaaactttaaatgctgtttttatagatgtgatatgaggcaacacaagcacagacagttgcatagattttaatttatacatatcaagaaaagtgcaatttcatgctgaatgaagcgtaggaacttgacaagcccataggtagctatagttctttgtcagtatagggaattatgttcatgtgaatttcctgattctcaggtgactaaaaagctagcattctatgtattaaccttacaacagactctgtaagtttgagctttaaaaaccaaactttgacataaccttatttcttgtatttgcccccttttttttataaaaggtgaataaaaagaaataatttaatatcaccattgtatggattcctaatcaagatttcacgttctcagcccctgagactagttttctttgctctctgtaattagagcctttggaagcaaagttgaaaggaagtatttccattctgttactgttttgtagcactttgtccatttattgatttttaaagtagatatttagataccacccctgccctgccccaaaaagaaaaatgtttattgtcctgctaatctatatgcctacacctcagaagctgacagatgagcttcctaaaacatgaggatgaataaatgttagaactgtgatatcttctcatttccacagagatttgggtttaaaacaaatggctaatatttgtaagcctgaaagctgccatcctctttaacatcctacctaccttttaaaatattttctggaggttaagtacagttaggcactagaacatttgttaagcctcccaaagtagtgtgcatggaagattctagagtgtccagctcttgcactacaaatgtaataataacagaataaatacacttaccctgatgatattgagggtacatgattagcctaatgtgatgtcatatgaggaagtttaggagtccatttttcaggtggtttggtgataggaataaaaatgttactcccgtcgctgatttggaagaaaaccgatgaagtacaagtaaggtttccccactcctgtgtgtggtcatgggaagccattagagggaagctgcagaacagaatggaacaggacaggctgggctagactcgagcacgcagtggcccctgtgccaccacactgtgggtcaggaacacgcgtcatggtgttcttgtcggaatgtgaacatacagcaccctctagcattacgaatctcttaggatttttaagattgtatttgataatacttatatttcacagggcacacttttggcacacctcagagcacactgctgctattttgggtcgtatcactgtaaaatacataataagtactacttaactgtgacatgaagaattggaatcccagagggcaacatttgatttgactaagatcaggcataagatagaatttttgtcatttttccttgcagttttattgacttagtttatgagcttggataaaataattttttgatgaatcatgtcaataaaaggaaaaataatgtaactacctcataagtctgataaaaggaagttgctagtgttttatagaatttctgaaggtggttaaatcaagtatgatttcaaaatatcaactagttccacttttgtgattgcaggatgcttcttatactaaagttctcataaataataaatcagcttatgcc

SEQ ID NO: 12683 - protein, 443 aa, Homo sapiens; identical to SEQ ID NO: 1254

SEQ ID NO: 12684 - DNA, 5819 bp, Homo sapiens
cgcggcacgccccgcgcatgcctggtgcacagagtctgcaggtcgggcggtagcgacaggtcagagctgcggcctgagcagccagcgtccggcatgaaggtctggggtctggctgctgcctgcttcttgctccagcaccatggaatgcctgcgcagtttaccctgcctcctgccccgcgcgatgagacttccccggcggacgctgtgtgccctggccttggacgtgacctctgtgggtcctcccgttgctgcctgcggccgccgagccaacctgattggaaggagccgagcggcgcagctttgcgggcccgaccggctccgcgtggcaggtgaagtgcaccggtttagaacctctgacgtctctcaagccactttagccagtgtagccccagtatttactgtgacaaaatttgacaaacagggaaacgttacttcttttgaaaggaagaaaactgaattataccaagagttaggtcttcaagccagagatttgagatttcagcatgtaatgagtatcacagtcagaaacaataggattatcatgagaatggagtatttgaaagctgtgataactccagagtgtcttctgatattagattatcgtaatttaaacttagagcaatggctgttccgggaactcccttcacagttgtctggagagggtcaactcgttacataccctttaccttttgagtttagagctatagaagcactcctgcaatattggatcaacacccttcaggggaaacttagcattttgcagccactgatccttgagaccttggatgctttggtggaccccaaacattcttctgtagacagaagcaaactgcacattttactacagaatggcaaaagtctatcagagttagaaacagatattaaaattttcaaagagtcaattttggagatcttggatgaggaagagttgctagaagagctctgtgtatcaaaatggagtgacccacaagtctttgaaaagagcagtgctgggattgaccatgcagaagagatggagttgctgttggaaaactactaccgattggctgacgatctctccaatgcagctcgtgagcttagggtgctgattgatgattcacaaagtattattttcattaatctggacagccaccgaaacgtgatgatgaggttgaatctacagctgaccatgggaaccttctctctttcgctctttggactaatgggagttgcttttggaatgaatttggaatcttcccttgaagaggaccatagaattttttggctgattacaggaattatgttcatgggaagtggcctcatctggaggcgcctgctttcattccttggacgacagctagaagctccattgcctcctatggtatgaaggatatggttcacggcggtattgtggaagggttatgatcatgggccctaaagtcagagcgcctgggattaagttgtcacaggcactatggcccttgcgagttgctttctcaaacttccttcagtttccctatctgtcagttaagtcggtattacctgcttcatagggttatgggaagaattaaacaatatgtgtaaagcacttactagcacactgcctaacacaataagttagaaatataatttgtgtagaactctgacaacatacatttaaacagatgttagtaattctggtataaggtttgtcataaccaaatggaaatgtaggaaacatttataacgttcttaaaagatagaaaattcacctccattttctttgtacttgaagatggcaccactggaataaatacttaagacactgatactgcttatagtcctttcttcactgagtagttacataatacatcattttactagtggcttttcttttaaaaaagatactaaaattaatacttctgctttatttagatggcttctttacctaaaaagactcttctggcagatagaagcatggaattgaaaaatagcctcagactggatggacttggatcaggaaggagcatcctaacaaaccgttaggaacagccccgtggatactgaagttttttttatggtagttacaggaaacttctgatactctttttattattttcttgtatagagtcagacacttgaaaaaaactaatgtttgaagacaaaaatattttggcagtcacaataccagaactggattgcatttccagaattctgagttaaagaaacaaagtatttgctttgtaaaaggccaaaattctatttcctacaaactttaaatgctgtttttatagatgtgatatgaggcaacacaagcacagacagttgcatagattttaatttatacatatcaagaaaagtgcaatttcatgctgaatgaagcgtaggaacttgacaagcccataggtagctatagttctttgtcagtatagggaattatgttcatgtgaatttcctgattctcaggtgactaaaaagctagcattctatgtattaaccttacaacagactctgtaagtttgagctttaaaaaccaaactttgacataaccttatttcttgtatttgcccccttttttttataaaaggtgaataaaaagaaataatttaatatcaccattgtatggattcctaatcaagatttcacgttctcagcccctgagactagttttctttgctctctgtaattagagcctttggaagcaaagttgaaaggaagtatttccattctgttactgttttgtagcactttgtccatttattgatttttaaagtagatatttagataccacccctgccctgccccaaaaagaaaaatgtttattgtcctgctaatctatatgcctacacctcagaagctgacagatgagcttcctaaaacatgaggatgaataaatgttagaactgtgatatcttctcatttccacagagatttgggtttaaaacaaatggctaatatttgtaagcctgaaagctgccatcctctttaacatcctacctaccttttaaaatattttctggaggttaagtacagttaggcactagaacatttgttaagcctcccaaagtagtgtgcatggaagattctagagtgtccagctcttgcactacaaatgtaataataacagaataaatacacttaccctgatgatattgagggtacatgattagcctaatgtgatgtcatatgaggaagtttaggagtccatttttcaggtggtttggtgataggaataaaaatgttactcccgtcgctgatttggaagaaaaccgatgaagtacaagtaaggtttccccactcctgtgtgtggtcatgggaagccattagagggaagctgcagaacagaatggaacaggacaggctgggctagactcgagcacgcagtggcccctgtgccaccacactgtgggtcaggaacacgcgtcatggtgttcttgtcggaatgtgaacatacagcaccctctagcattacgaatctcttaggatttttaagattgtatttgataatacttatatttcacagggcacacttttggcacacctcagagcacactgctgctattttgggtcgtatcactgtaaaatacataataagtactacttaactgtgacatgaagaattggaatcccagagggcaacatttgatttgactaagatcaggcataagatagaatttttgtcatttttccttgcagttttattgacttagtttatgagcttggataaaataattttttgatgaatcatgtcaataaaaggaaaaataatgtaactacctcataagtctgataaaaggaagttgctagtgttttatagaatttctgaaggtggttaaatcaagtatgatttcaaaatatcaactagttccacttttgtgattgcaggatgcttcttatactaaagttctcataaataataaatcagcttatgccaaaaatatatgaagttccttggttttaaattttgaactaaaatggactgagcacattaattactgtttgaaagtaggtaccaaacactgggttatgtgagtgagtaagcaatcatatcgcctgtcaaacacatcaagtgtcgaacacgtcaaggtgtgatactgtctttggaaggctcctaaacaaatgtgagcacaattattaacaccttattcttcatgaacacagactgttaagcagcactaaccaattttatattaaaaagctatttattttggtgagttattccaagagttgtatacagctttattttttggaattgcaatattaaagttgcacgttggatttaactctcatgactttagtaatacctacagaggtgagctaatggatggtacatggagtagggactgcagagaccctagttttgtccccactccatcttcaaataattttggtctcttaggtctgtgatacaaaggcataaaacaattcctatcttgaagccttgagaaaagctgttacatatacgcagatagtagcaagacagaaaatgcaaatatgtaaatgtcttctgatatcttgaaataaagataaatttcagttaaacttgtataagttcagatttctgttaatgagaaattacaaccctacaaggtaaggtctttacattttagttattaagcagaatcaatgcttaaaactatagttaatacttagtggaaagaaaatttaatccatgtatcaggataatatattagactgtcatgcattaattttttcctgtatgccaggttttttacatacgtgccatatcagttgaccttttacagtaggagtataatttacattgtttttgacattggggttagtatggttaaatgtcctataaacttgaagcttgcttccatttttgtgggtcttaacctccacctggtgcttgctattgggtgtattcaggcattgagaaaaatataaatcgtgaggtaaataatggtcatgtttaaacagaggccttatcatttagtgaagcataaaaactgacactatataaatgcatccgtctaatgaaaagacccagtactgagaaaaacatccctttactcaagtgtcagatgtcagagtgctctaactgctcaactcataagtgaatacaactaagtaatttctggtcccctaaaaataaccatccttttaattaaaagtaattcttcagataggttgggctaccaataattgtccctaaacaaaaccaaatggcgcttccttgtgcttttgctgtgccataggttactatgcagctagcacatgtacctcttccagaaaaatgaggtcatcctgggagtgacccagagatgctctctagggatgtacctcttgatgttcttgttaactttccactcttcagctggattcctcttcctgtccccttttcaccagtctctactcttgagagaagctgagaagagaagggctcttctcatttgttattttctcctgcttttagtatcatctcacccgtggcagaagaaagaggttcttcccaatttaacacaaaataaactagttactgtttacagataatgcccgctaatgtttactgaaactgaaaccctatgatacattccattcccttaagtgtgccacgctgcaggactgacaaatgaaatccatcctacgaaaaacagcccaggaacaagcgaggccaaggcctgctttcctctccggcccttacagtagcgtgtggctcaggccacatcttttccctctagttcttttggcacaagttgtaacctaatgcgacaaaggtccctcatgagatggcttaaaactagcagtgtcgctaggctctttaggtgttagaacagccaactctacaaaagtattggagggcacagaagggtgatagtcttggtttttatatttgt

SEQ ID NO: 12685 - protein, 408 aa, Homo sapiens; identical to SEQ ID NO: 12675

SEQ ID NO: 12686 - DNA, 5286 bp, Homo sapiens
cgcggcacgccccgcgcatgcctggtgcacagagtctgcaggtcgggcggtagcgacaggtcagagctgcggcctgagcagccagcgtccggcatgaaggtctggggtctggctgctgcctgcttcttgctccagcaccatggaatgcctgcgcagtttaccctgcctcctgccccgcgcgatgagacttccccggcggacgctgtgtgccctggccttggacgtgacctctgtgggtcctcccgttgctgcctgcggccgccgagccaacctgattggaaggagccgagcggcgcagctttgcgggcccgaccggctccgcgtggcaggtgaagtgcaccggtttagaacctctgacgtctctcaagccactttagccagtgtagccccagtatttactgtgacaaaatttgacaaacagggaaacgttacttcttttgaaaggaagaaaactgaattataccaagagttaggtcttcaagccagagatttgagatttcagcatgtaatgagtatcacagtcagaaacaataggattatcatgagaatggagtatttgaaagctgtgataactccagagtgtcttctgatattagattatcgtaatttaaacttagagcaatggctgttccgggaactcccttcacagttgtctggagagggtcaactcgttacataccctttaccttttgagtttagagctatagaagcactcctgcaatattggatcaacacccttcaggggaaacttagcattttgcagccactgatccttgagaccttggatgctttggtggaccccaaacattcttctgtagacagaagcaaactgcacattttactacagaatggcaaaagtctatcagagttagaaacagatattaaaattttcaaagagtcaattttggagatcttggatgaggaagagttgctagaagagctctgtgtatcaaaatggagtgacccacaagtctttgaaaagagcagtgctgggattgaccatgcagaagagatggagttgctgttggaaaactactaccgattggctgacgatctctccaatgcagctcgtgagcttagggtgctgattgatgattcacaaagtattattttcattaatctggacagccaccgaaacgtgatgatgaggttgaatctacagctgaccatgggaaccttctctctttcgctctttggactaatgggagttgcttttggaatgaatttggaatcttcccttgaagaggaccatagaattttttggctgattacaggaattatgttcatgggaagtggcctcatctggaggcgcctgctttcattccttggacgacagctagaagctccattgcctcctatgatggcttctttacctaaaaagactcttctggcagatagaagcatggaattgaaaaatagcctcagactggatggacttggatcaggaaggagcatcctaacaaaccgttaggaacagccccgtggatactgaagttttttttatggtagttacaggaaacttctgatactctttttattattttcttgtatagagtcagacacttgaaaaaaactaatgtttgaagacaaaaatattttggcagtcacaataccagaactggattgcatttccagaattctgagttaaagaaacaaagtatttgctttgtaaaaggccaaaattctatttcctacaaactttaaatgctgtttttatagatgtgatatgaggcaacacaagcacagacagttgcatagattttaatttatacatatcaagaaaagtgcaatttcatgctgaatgaagcgtaggaacttgacaagcccataggtagctatagttctttgtcagtatagggaattatgttcatgtgaatttcctgattctcaggtgactaaaaagctagcattctatgtattaaccttacaacagactctgtaagtttgagctttaaaaaccaaactttgacataaccttatttcttgtatttgcccccttttttttataaaaggtgaataaaaagaaataatttaatatcaccattgtatggattcctaatcaagatttcacgttctcagcccctgagactagttttctttgctctctgtaattagagcctttggaagcaaagttgaaaggaagtatttccattctgttactgttttgtagcactttgtccatttattgatttttaaagtagatatttagataccacccctgccctgccccaaaaagaaaaatgtttattgtcctgctaatctatatgcctacacctcagaagctgacagatgagcttcctaaaacatgaggatgaataaatgttagaactgtgatatcttctcatttccacagagatttgggtttaaaacaaatggctaatatttgtaagcctgaaagctgccatcctctttaacatcctacctaccttttaaaatattttctggaggttaagtacagttaggcactagaacatttgttaagcctcccaaagtagtgtgcatggaagattctagagtgtccagctcttgcactacaaatgtaataataacagaataaatacacttaccctgatgatattgagggtacatgattagcctaatgtgatgtcatatgaggaagtttaggagtccatttttcaggtggtttggtgataggaataaaaatgttactcccgtcgctgatttggaagaaaaccgatgaagtacaagtaaggtttccccactcctgtgtgtggtcatgggaagccattagagggaagctgcagaacagaatggaacaggacaggctgggctagactcgagcacgcagtggcccctgtgccaccacactgtgggtcaggaacacgcgtcatggtgttcttgtcggaatgtgaacatacagcaccctctagcattacgaatctcttaggatttttaagattgtatttgataatacttatatttcacagggcacacttttggcacacctcagagcacactgctgctattttgggtcgtatcactgtaaaatacataataagtactacttaactgtgacatgaagaattggaatcccagagggcaacatttgatttgactaagatcaggcataagatagaatttttgtcatttttccttgcagttttattgacttagtttatgagcttggataaaataattttttgatgaatcatgtcaataaaaggaaaaataatgtaactacctcataagtctgataaaaggaagttgctagtgttttatagaatttctgaaggtggttaaatcaagtatgatttcaaaatatcaactagttccacttttgtgattgcaggatgcttcttatactaaagttctcataaataataaatcagcttatgccaaaaatatatgaagttccttggttttaaattttgaactaaaatggactgagcacattaattactgtttgaaagtaggtaccaaacactgggttatgtgagtgagtaagcaatcatatcgcctgtcaaacacatcaagtgtcgaacacgtcaaggtgtgatactgtctttggaaggctcctaaacaaatgtgagcacaattattaacaccttattcttcatgaacacagactgttaagcagcactaaccaattttatattaaaaagctatttattttggtgagttattccaagagttgtatacagctttattttttggaattgcaatattaaagttgcacgttggatttaactctcatgactttagtaatacctacagaggtgagctaatggatggtacatggagtagggactgcagagaccctagttttgtccccactccatcttcaaataattttggtctcttaggtctgtgatacaaaggcataaaacaattcctatcttgaagccttgagaaaagctgttacatatacgcagatagtagcaagacagaaaatgcaaatatgtaaatgtcttctgatatcttgaaataaagataaatttcagttaaacttgtataagttcagatttctgttaatgagaaattacaaccctacaaggtaaggtctttacattttagttattaagcagaatcaatgcttaaaactatagttaatacttagtggaaagaaaatttaatccatgtatcaggataatatattagactgtcatgcattaattttttcctgtatgccaggttttttacatacgtgccatatcagttgaccttttacagtaggagtataatttacattgtttttgacattggggttagtatggttaaatgtcctataaacttgaagcttgcttccatttttgtgggtcttaacctccacctggtgcttgctattgggtgtattcaggcattgagaaaaatataaatcgtgaggtaaataatggtcatgtttaaacagaggccttatcatttagtgaagcataaaaactgacactatataaatgcatccgtctaatgaaaagacccagtactgagaaaaacatccctttactcaagtgtcagatgtcagagtgctctaactgctcaactcataagtgaatacaactaagtaatttctggtcccctaaaaataaccatccttttaattaaaagtaattcttcagataggttgggctaccaataattgtccctaaacaaaaccaaatggcgcttccttgtgcttttgctgtgccataggttactatgcagctagcacatgtacctcttccagaaaaatgaggtcatcctgggagtgacccagagatgctctctagggatgtacctcttgatgttcttgttaactttccactcttcagctggattcctcttcctgtccccttttcaccagtctctactcttgagagaagctgagaagagaagggctcttctcatttgttattttctcctgcttttagtatcatctcacccgtggcagaagaaagaggttcttcccaatttaacacaaaataaactagttactgtttacagataatgcccgctaatgtttactgaaactgaaaccctatgatacattccattcccttaagtgtgccacgctgcaggactgacaaatgaaatccatcctacgaaaaacagcccaggaacaagcgaggccaaggcctgctttcctctccggcccttacagtagcgtgtggctcaggccacatcttttccctctagttcttttggcacaagttgtaacctaatgcgacaaaggtccctcatgagatggcttaaaactagcagtgtcgctaggctctttaggtgttagaacagccaactctacaaaagtattggagggcacagaagggtgatagtcttggtttttatatttgt

SEQ ID NO: 12687 - protein, 443 aa, Homo sapiens; identical to SEQ ID NO: 1254

SEQ ID NO: 12688 - DNA, 662 bp, Homo sapiens
cagccaccgaaacgtgatgatgaggttgaatctacagctgaccatgggaaccttctctctttcgctctttggactaatgggagttgcttttggaatgaatttggaatcttcccttgaagaggaccatagaattttttggctgattacaggaattatgttcatgggaagtggcctcatctggaggcgcctgctttcattccttggacgacagctagaagctccattgcctcctatggtatgaaggatatggttcacggcggtattgtggaagggttatgatcatgggccctaaagtcagagcgcctgggattaagttgtcacaggcactatggcccttgcgagttgctttctcaaacttccttcagtttccctatctgtcagttaagtcggtattacctgcttcatagggttatgggaagaattaaacaatatgtgtaaagcacttactagcacactgcctaacacaataagttagaaatataatttgtgtagaactctgacaacatacatttaaacagatgttagtaattctggtataaggtttgtcataaccaaatggaaatgtaggaaacatttataacgttcttaaaagatagaaaattcacctccattttctttgtacttgaagatggcaccactggaataaatacttaagacactga

SEQ ID NO: 12689 - protein, 74 aa, Homo sapiens
MMRLNLQLTMGTFSLSLFGLMGVAFGMNLESSLEEDHRIFWLITGIMFMGSGLIWRRLLSFLGRQLEAPLPPMV

SEQ ID NO: 12690 - DNA, 1900 bp, Homo sapiens
atcacaaagaaaatcttagatcacatattgcatataggactgggggttgtggttcacacctgtaatcccagcactttggtaggccaaggtgggcagatcactttaggccaggagttcgagaccagcctgaccaacatggtgaaaccccatctctactaaaaatacaaaaattagctgggcatggtgccgcacacctgtaatcccagctactcaggggggccgaggcacaagaatcgcttgaatcaggtagacggaggttgcagtgagccaagattgagccactggactccatcctgggtgaagagcaagactccatctcaacaacaacaaaaagaggaggcagatttctgttcaataagtgacatgcatttccatcagtgatagctgatcagttgtgtaacaggctatctttgaggaagtgagctctcaatcattggagccaatgataacagcatagctataaatgggattccttccttgtgagagattaaatttaaattctgtgattctgtacattaactaaaaacagtgtgctgcaaaatattaccactctgaaaatgacggtgaggaagaatgtttttctaagtctgaggttcccaaacttccttggatcacgatgcccttagtgtcttagtaattttttcacagtatcggaagacaaaaaatttattatgttacagattcctttatgttatttcccttgcaactttaaaatattctgaggtgctatcgtgcccagcatagcaccagacattcagctcacagtttgagaactgtggatataagcaaagaccttaaattgcgtgtcctctggcatcatgacttaagatttgcacgcatgtaaacaaaggctgcaaagaaacacaaagtaaaagcagtacatttggcatatagatgattttaaaatatttaaaaccttttaaatcatgttcttctcctgctttattctgtgggtgctatcaaggcccttgtttttcttagttcctttctacaggaaagagctgtacaaataacataaggctttcaaactctggggcagtaacaattcaaggaatcttctaaggaacctggcgttttgcgatggaaatgaactgtgttctcttttaggaccatagaattttttggctgattacaggaattatgttcatgggaagtggcctcatctggaggcgcctgctttcattccttggacgacagctagaagctccattgcctcctatgatggcttctttacctaaaaagactcttctggcagatagaagcatggaattgaaaaatagcctcagactggatggacttggatcaggaaggagcatcctaacaaaccgttaggaacagccccgtggatactgaagttttttttatggtagttacaggaaacttctgatactctttttattattttcttgtatagagtcagacacttgaaaaaaactaatgtttgaagacaaaaatattttggcagtcacaataccagaactggattgcatttccagaattctgagttaaagaaacaaagtatttgctttgtaaaaggccaaaattctatttcctacaaactttaaatgctgtttttatagatgtgatatgaggcaacacaagcacagacagttgcatagattttaatttatacatatcaagaaaagtgcaatttcatgctgaatgaagcgtaggaacttgacaagcccataggtagctatagttctttgtcagtatagggaattatgttcatgtgaatttcctgattctcaggtgactaaaaagctagcattctatgtattaaccttacaacagactctgtaagtttgagctttaaaaaccaaactttgacataaccttatttcttgtatttgcccccttttttttataaaaggtgaataaaaagaaataatttaatatc

SEQ ID NO: 12691 - protein, 63 aa, Homo sapiens
MFMGSGLIWRRLLSFLGRQLEAPLPPMMASLPKKTLLADRSMELKNSLRLDGLGSGRSILTNR

SEQ ID NO: 12692 - DNA, 3219 bp, Homo sapiens
atcacaaagaaaatcttagatcacatattgcatataggactgggggttgtggttcacacctgtaatcccagcactttggtaggccaaggtgggcagatcactttaggccaggagttcgagaccagcctgaccaacatggtgaaaccccatctctactaaaaatacaaaaattagctgggcatggtgccgcacacctgtaatcccagctactcaggggggccgaggcacaagaatcgcttgaatcaggtagacggaggttgcagtgagccaagattgagccactggactccatcctgggtgaagagcaagactccatctcaacaacaacaaaaagaggaggcagatttctgttcaataagtgacatgcatttccatcagtgatagctgatcagttgtgtaacaggctatctttgaggaagtgagctctcaatcattggagccaatgataacagcatagctataaatgggattccttccttgtgagagattaaatttaaattctgtgattctgtacattaactaaaaacagtgtgctgcaaaatattaccactctgaaaatgacggtgaggaagaatgtttttctaagtctgaggttcccaaacttccttggatcacgatgcccttagtgtcttagtaattttttcacagtatcggaagacaaaaaatttattatgttacagattcctttatgttatttcccttgcaactttaaaatattctgaggtgctatcgtgcccagcatagcaccagacattcagctcacagtttgagaactgtggatataagcaaagaccttaaattgcgtgtcctctggcatcatgacttaagatttgcacgcatgtaaacaaaggctgcaaagaaacacaaagtaaaagcagtacatttggcatatagatgattttaaaatatttaaaaccttttaaatcatgttcttctcctgctttattctgtgggtgctatcaaggcccttgtttttcttagttcctttctacaggaaagagctgtacaaataacataaggctttcaaactctggggcagtaacaattcaaggaatcttctaaggaacctggcgttttgcgatggaaatgaactgtgttctcttttaggaccatagaattttttggctgattacaggaattatgttcatgggaagtggcctcatctggaggcgcctgctttcattccttggacgacagctagaagctccattgcctcctatgatggcttctttacctaaaaagactcttctggcagatagaagcatggaattgaaaaatagcctcagactggatggacttggatcaggaaggagcatcctaacaaaccgttaggaacagccccgtggatactgaagttttttttatggtagttacaggaaacttctgatactctttttattattttcttgtatagagtcagacacttgaaaaaaactaatgtttgaagacaaaaatattttggcagtcacaataccagaactggattgcatttccagaattctgagttaaagaaacaaagtatttgctttgtaaaaggccaaaattctatttcctacaaactttaaatgctgtttttatagatgtgatatgaggcaacacaagcacagacagttgcatagattttaatttatacatatcaagaaaagtgcaatttcatgctgaatgaagcgtaggaacttgacaagcccataggtagctatagttctttgtcagtatagggaattatgttcatgtgaatttcctgattctcaggtgactaaaaagctagcattctatgtattaaccttacaacagactctgtaagtttgagctttaaaaaccaaactttgacataaccttatttcttgtatttgcccccttttttttataaaaggtgaataaaaagaaataatttaatatcaccattgtatggattcctaatcaagatttcacgttctcagcccctgagactagttttctttgctctctgtaattagagcctttggaagcaaagttgaaaggaagtatttccattctgttactgttttgtagcactttgtccatttattgatttttaaagtagatatttagataccacccctgccctgccccaaaaagaaaaatgtttattgtcctgctaatctatatgcctacacctcagaagctgacagatgagcttcctaaaacatgaggatgaataaatgttagaactgtgatatcttctcatttccacagagatttgggtttaaaacaaatggctaatatttgtaagcctgaaagctgccatcctctttaacatcctacctaccttttaaaatattttctggaggttaagtacagttaggcactagaacatttgttaagcctcccaaagtagtgtgcatggaagattctagagtgtccagctcttgcactacaaatgtaataataacagaataaatacacttaccctgatgatattgagggtacatgattagcctaatgtgatgtcatatgaggaagtttaggagtccatttttcaggtggtttggtgataggaataaaaatgttactcccgtcgctgatttggaagaaaaccgatgaagtacaagtaaggtttccccactcctgtgtgtggtcatgggaagccattagagggaagctgcagaacagaatggaacaggacaggctgggctagactcgagcacgcagtggcccctgtgccaccacactgtgggtcaggaacacgcgtcatggtgttcttgtcggaatgtgaacatacagcaccctctagcattacgaatctcttaggatttttaagattgtatttgataatacttatatttcacagggcacacttttggcacacctcagagcacactgctgctattttgggtcgtatcactgtaaaatacataataagtactacttaactgtgacatgaagaattggaatcccagagggcaacatttgatttgactaagatcaggcataagatagaatttttgtcatttttccttgcagttttattgacttagtttatgagcttggataaaataattttttgatgaatcatgtcaataaaaggaaaaataatgtaactacctcataagtctgataaaaggaagttgctagtgttttatagaatttctgaaggtggttaaatcaagtatgatttcaaaatatcaactagttccacttttgtgattgcaggatgcttcttatactaaagttctcataaataataaatcagcttatgcc

SEQ ID NO: 12693 - protein, 63 aa, Homo sapiens; identical to SEQ ID NO: 12691

SEQ ID NO: 12694 - DNA, 5147 bp, Homo sapiens
atcacaaagaaaatcttagatcacatattgcatataggactgggggttgtggttcacacctgtaatcccagcactttggtaggccaaggtgggcagatcactttaggccaggagttcgagaccagcctgaccaacatggtgaaaccccatctctactaaaaatacaaaaattagctgggcatggtgccgcacacctgtaatcccagctactcaggggggccgaggcacaagaatcgcttgaatcaggtagacggaggttgcagtgagccaagattgagccactggactccatcctgggtgaagagcaagactccatctcaacaacaacaaaaagaggaggcagatttctgttcaataagtgacatgcatttccatcagtgatagctgatcagttgtgtaacaggctatctttgaggaagtgagctctcaatcattggagccaatgataacagcatagctataaatgggattccttccttgtgagagattaaatttaaattctgtgattctgtacattaactaaaaacagtgtgctgcaaaatattaccactctgaaaatgacggtgaggaagaatgtttttctaagtctgaggttcccaaacttccttggatcacgatgcccttagtgtcttagtaattttttcacagtatcggaagacaaaaaatttattatgttacagattcctttatgttatttcccttgcaactttaaaatattctgaggtgctatcgtgcccagcatagcaccagacattcagctcacagtttgagaactgtggatataagcaaagaccttaaattgcgtgtcctctggcatcatgacttaagatttgcacgcatgtaaacaaaggctgcaaagaaacacaaagtaaaagcagtacatttggcatatagatgattttaaaatatttaaaaccttttaaatcatgttcttctcctgctttattctgtgggtgctatcaaggcccttgtttttcttagttcctttctacaggaaagagctgtacaaataacataaggctttcaaactctggggcagtaacaattcaaggaatcttctaaggaacctggcgttttgcgatggaaatgaactgtgttctcttttaggaccatagaattttttggctgattacaggaattatgttcatgggaagtggcctcatctggaggcgcctgctttcattccttggacgacagctagaagctccattgcctcctatgatggcttctttacctaaaaagactcttctggcagatagaagcatggaattgaaaaatagcctcagactggatggacttggatcaggaaggagcatcctaacaaaccgttaggaacagccccgtggatactgaagttttttttatggtagttacaggaaacttctgatactctttttattattttcttgtatagagtcagacacttgaaaaaaactaatgtttgaagacaaaaatattttggcagtcacaataccagaactggattgcatttccagaattctgagttaaagaaacaaagtatttgctttgtaaaaggccaaaattctatttcctacaaactttaaatgctgtttttatagatgtgatatgaggcaacacaagcacagacagttgcatagattttaatttatacatatcaagaaaagtgcaatttcatgctgaatgaagcgtaggaacttgacaagcccataggtagctatagttctttgtcagtatagggaattatgttcatgtgaatttcctgattctcaggtgactaaaaagctagcattctatgtattaaccttacaacagactctgtaagtttgagctttaaaaaccaaactttgacataaccttatttcttgtatttgcccccttttttttataaaaggtgaataaaaagaaataatttaatatcaccattgtatggattcctaatcaagatttcacgttctcagcccctgagactagttttctttgctctctgtaattagagcctttggaagcaaagttgaaaggaagtatttccattctgttactgttttgtagcactttgtccatttattgatttttaaagtagatatttagataccacccctgccctgccccaaaaagaaaaatgtttattgtcctgctaatctatatgcctacacctcagaagctgacagatgagcttcctaaaacatgaggatgaataaatgttagaactgtgatatcttctcatttccacagagatttgggtttaaaacaaatggctaatatttgtaagcctgaaagctgccatcctctttaacatcctacctaccttttaaaatattttctggaggttaagtacagttaggcactagaacatttgttaagcctcccaaagtagtgtgcatggaagattctagagtgtccagctcttgcactacaaatgtaataataacagaataaatacacttaccctgatgatattgagggtacatgattagcctaatgtgatgtcatatgaggaagtttaggagtccatttttcaggtggtttggtgataggaataaaaatgttactcccgtcgctgatttggaagaaaaccgatgaagtacaagtaaggtttccccactcctgtgtgtggtcatgggaagccattagagggaagctgcagaacagaatggaacaggacaggctgggctagactcgagcacgcagtggcccctgtgccaccacactgtgggtcaggaacacgcgtcatggtgttcttgtcggaatgtgaacatacagcaccctctagcattacgaatctcttaggatttttaagattgtatttgataatacttatatttcacagggcacacttttggcacacctcagagcacactgctgctattttgggtcgtatcactgtaaaatacataataagtactacttaactgtgacatgaagaattggaatcccagagggcaacatttgatttgactaagatcaggcataagatagaatttttgtcatttttccttgcagttttattgacttagtttatgagcttggataaaataattttttgatgaatcatgtcaataaaaggaaaaataatgtaactacctcataagtctgataaaaggaagttgctagtgttttatagaatttctgaaggtggttaaatcaagtatgatttcaaaatatcaactagttccacttttgtgattgcaggatgcttcttatactaaagttctcataaataataaatcagcttatgccaaaaatatatgaagttccttggttttaaattttgaactaaaatggactgagcacattaattactgtttgaaagtaggtaccaaacactgggttatgtgagtgagtaagcaatcatatcgcctgtcaaacacatcaagtgtcgaacacgtcaaggtgtgatactgtctttggaaggctcctaaacaaatgtgagcacaattattaacaccttattcttcatgaacacagactgttaagcagcactaaccaattttatattaaaaagctatttattttggtgagttattccaagagttgtatacagctttattttttggaattgcaatattaaagttgcacgttggatttaactctcatgactttagtaatacctacagaggtgagctaatggatggtacatggagtagggactgcagagaccctagttttgtccccactccatcttcaaataattttggtctcttaggtctgtgatacaaaggcataaaacaattcctatcttgaagccttgagaaaagctgttacatatacgcagatagtagcaagacagaaaatgcaaatatgtaaatgtcttctgatatcttgaaataaagataaatttcagttaaacttgtataagttcagatttctgttaatgagaaattacaaccctacaaggtaaggtctttacattttagttattaagcagaatcaatgcttaaaactatagttaatacttagtggaaagaaaatttaatccatgtatcaggataatatattagactgtcatgcattaattttttcctgtatgccaggttttttacatacgtgccatatcagttgaccttttacagtaggagtataatttacattgtttttgacattggggttagtatggttaaatgtcctataaacttgaagcttgcttccatttttgtgggtcttaacctccacctggtgcttgctattgggtgtattcaggcattgagaaaaatataaatcgtgaggtaaataatggtcatgtttaaacagaggccttatcatttagtgaagcataaaaactgacactatataaatgcatccgtctaatgaaaagacccagtactgagaaaaacatccctttactcaagtgtcagatgtcagagtgctctaactgctcaactcataagtgaatacaactaagtaatttctggtcccctaaaaataaccatccttttaattaaaagtaattcttcagataggttgggctaccaataattgtccctaaacaaaaccaaatggcgcttccttgtgcttttgctgtgccataggttactatgcagctagcacatgtacctcttccagaaaaatgaggtcatcctgggagtgacccagagatgctctctagggatgtacctcttgatgttcttgttaactttccactcttcagctggattcctcttcctgtccccttttcaccagtctctactcttgagagaagctgagaagagaagggctcttctcatttgttattttctcctgcttttagtatcatctcacccgtggcagaagaaagaggttcttcccaatttaacacaaaataaactagttactgtttacagataatgcccgctaatgtttactgaaactgaaaccctatgatacattccattcccttaagtgtgccacgctgcaggactgacaaatgaaatccatcctacgaaaaacagcccaggaacaagcgaggccaaggcctgctttcctctccggcccttacagtagcgtgtggctcaggccacatcttttccctctagttcttttggcacaagttgtaacctaatgcgacaaaggtccctcatgagatggcttaaaactagcagtgtcgctaggctctttaggtgttagaacagccaactctacaaaagtattggagggcacagaagggtgatagtcttggtttttatatttgt

SEQ ID NO: 12695 - protein, 63 aa, Homo sapiens; identical to SEQ ID NO: 12691

SEQ ID NO: 12696 - DNA, 865 bp, Homo sapiens
tcctgggcctaaagcatttggccattatttaactttttttttttttttttttttttgagacagcgtctggtgcactccagcctgggcgacagagcaagactccttctcaaaaaaaaaaaaaaaaaaaaaaaaaagtagaaatgagggtataagggtataattaaaattgattttaaaaagccacacaaacagtaataacattgtctctctcctcaatttttttcttcaggcccaatatgtattgatttctcctgaagccagctcaaggtttgggagctccctcatcaccgtgaggtccaaggcaaagaaccaagtcgtcattgctgctggaaggagttctttgggagcccgactctccggggcacttcacgtctatagccttggctcagattgaagatttcactgcatttccccactctgcccacctctctcatgctgaatcacatccatgcttccctctaatggcttcccatgaccacacacaggagtggggaaaccttacttgtacttcatcggttttcttccaaatcagcgacgggagtaacatttttattcctatcaccaaaccacctgaaaaatggactcctaaacttcctcatatgacatcacattaggctaatcatgtaccctcaatatcatcagggtaagtgtatttattctgttattattacatttgtagtgcaagagctggacactctagaatcttccatgcacactactttgggaggcttaacaaatgttctagtgcctaactgtacttaacctccagaaaatattttaaaaggtaggtaggatgttaaagaggatggcagctttcaggcttacaaatattagccatttgttttaaacccaaatctctgtggaa

SEQ ID NO: 12697 - protein, 50 aa, Homo sapiens
MASHDHTQEWGNLTCTSSVFFQISDGSNIFIPITKPPEKWTPKLPHMTSH

SEQ ID NO: 12698 - DNA, 555 bp, Homo sapiens
ctcgctccctttgcatctaaacctatttcctcttcctcttgaatgtctttccaatggctggaaaggtccctctgtggttatctgttagaacagtctctgtacacaattcctcctaaaaacatccttttttaaaaaaagaattgttcagccataaagaaagaacaagatcatgccctttgcagggacatggatggagctggaggccattatccttcataaactattgcaggaacagaaaaccaaacactccatattctcacttgtaagtgggagctaaatgagaacacgtggacacatagagggaaacaacacacactggggcctatgagagggcggaaggtgggaggagggagagatcaggaaaaataactaatggatacttagggtgatgaaataatctgtgtaacaaacccccatgacacacctttatgtatgtaacaaaccagcacttcctgcgcatgtacccctgaacttaaaagttaaaaaaaagttgaacttaaaaataacagattggcccatgccaatcaaagtataatagaaagcatagtatacaga

SEQ ID NO: 12699 - protein, 39 aa, Homo sapiens
MTHLYVCNKPALPAHVPLNLKVKKKLNLKITDWPMPIKV

SEQ ID NO: 12700 - DNA, 3489 bp, Homo sapiens; identical to SEQ ID NO: 1255

SEQ ID NO: 12701 - protein, 840 aa, Homo sapiens; identical to SEQ ID NO: 1256

SEQ ID NO: 12702 - DNA, 2841 bp, Homo sapiens
gtgacctgcttagagagaagcggtgggtctgcacctggattttggagtcccagtgctgctgcagctctgagcattcccacgtcaccagagaagccggtgggcaatgagatcatgtctgctttcaggttgtggcctggcctgctgatcatgttgggttctctctgccatagaggttcaccgtgtggcctttcaacacacgtagaaataggacacagagctctggagtttcttcagcttcacaatgggcgtgttaactacagagagctgttactagaacaccaggatgcgtatcaggctggaatcgtgtttcctgattgtttttaccctagcatctgcaaaggaggaaaattccatgatgtgtctgagagcactcactggactccgtttcttaatgcaagcgttcattatatccgagagaactatccccttccctgggagaaggacacagagaaactggtagctttcttgtttggaattacttctcacatggcggcagatgtcagctggcatagtctgggccttgaacaaggattccttaggaccatgggagctattgattttcacggctcctattcagaggctcattcggctggtgattttggaggagatgtgttgagccagtttgaatttaattttaattaccttgcacgacgctggtatgtgccagtcaaagatctactgggaatttatgagaaactgtatggtcgaaaagtcatcaccgaaaatgtaatcgttgattgttcacatatccagttcttagaaatgtatggtgagatgctagctgtttccaagttatatcccacttactctacaaagtccccgtttttggtggaacaattccaagagtattttcttggaggactggatgatatggcattttggtccactaatatttaccatctaacaagcttcatgttggagaatgggaccagtgactgcaacctgcctgagaaccctctgttcattgcatgtggcggccagcaaaaccacacccagggctcaaaaatgcagaaaaatgattttcacagaaatttgactacatccctaactgaaagtgttgacaggaatataaactatactgaaagaggagtgttctttagtgtaaattcctggaccccggattccatgtcctttatctacaaggctttggaaaggaacataaggacaatgttcataggtggctctcagttgtcacaaaagcacgtctccagccccttagcatcttacttcttgtcatttccttatgcgaggcttggctgggcaatgacctcagctgacctcaaccaggatgggcacggtgacctcgtggtgggcgcaccaggctacagccgccccggccacatccacatcgggcgcgtgtacctcatctacggcaatgacctgggcctgccacctgttgacctggacctggacaaggaggcccacaggatccttgaaggcttccagccctcaggtcggtttggctcggccttggctgtgttggactttaacgtggacggcgtgcctgacctggccgtgggagctccctcggtgggctccgagcagctcacctacaaaggtgccgtgtatgtctactttggttccaaacaaggaggaatgtcttcttcccctaacatcaccatttcttgccaggacatctactgtaacttgggctggactctcttggctgcagatgtgaatggagacagtgaacccgatctggtcatcggctccccttttgcaccaggtggagggaagcagaagggaattgtggctgcgttttattctggccccagcctgagcgacaaagaaaaactgaacgtggaggcagccaactggacggtgagaggcgaggaagacttctcctggtttggatattcccttcacggtgtcactgtggacaacagaaccttgctgttggttgggagcccgacctggaagaatgccagcaggctgggccatttgttacacatccgagatgagaaaaagagccttgggagggtgtatggctacttcccaccaaacggccaaagctggtttaccatttctggagacaaggcaatggggaaactgggtacttccctttccagtggccacgtactgatgaatgggactctgaaacaagtgctgctggttggagcccctacgtacgatgacgtgtctaaggtggcattcctgaccgtgaccctacaccaaggcggagccactcgcatgtacgcactcacatctgacgcgcagcctctgctgctcagcaccttcagcggagaccgccgcttctcccgatttggtggcgttctgcacttgagtgacctggatgatgatggcttagatgaaatcatcatggcagcccccctgaggatagcagatgtaacctctggactgattgggggagaagacggccgagtatatgtatataatggcaaagagaccacccttggtgacatgactggcaaatgcaaatcatggataactccatgtccagaagaaaaggcccaatatgtattgatttctcctgaagccagctcaaggtttgggagctccctcatcaccgtgaggtccaaggcaaagaaccaagtcgtcattgctgctggaaggagttctttgggagcccgactctccggggcacttcacgtctatagccttggctcagattgaagatttcactgcatttccccactctgcccacctctctcatgctgaatcacatccatggtgagcattttgatggacaaagtggcacatccagtggagcggtggtagatcctgatagacatggggctcctgggagtagagagacacactaacagccacaccctctggaaatctgatacagtaaatatatgactgcaccagaaatatgtg

SEQ ID NO: 12703 - protein, 840 aa, Homo sapiens; identical to SEQ ID NO: 1256

SEQ ID NO: 12704 - DNA, 1335 bp, Homo sapiens
tgatgaggcttgagggcaggggtcgtgtccctagtgcccggctcaaagtggaagctccaaacttatttgtcggtcgtctcccttgttgctctgactttccactttgtataccctggggaactgagcacaggagggaggcgacgcggctggtgtcactttggggtaaagccccctctgctccccgccgtgtccccggccagctctggccccctgcatccgggctctctcaccttggcggagacctccctccagcggcagaaagcctcgtaggcagcgcgcacggcggcgcgggcctctcgcaccccgcagtcggctaccatgcccagagcggcgccgctggccgggtcttgcacggggaaggtggcggcggccgggagccagcggccgcccacgaagctgtcggtgcgcagcagcgccgcagagaggcccgccaggcgcccagcgtagcagcggagctgggccgggccgggcgcaggcccggaggcagggaccaggccgccggcgcgggggcggaggcggcagcctggaaacgtcgacccgaggcgccgggccccacagctccgcagccaaatgcaggtcgccatggcccgggcaacgacggcgacaggaaacaggttgtggcctggcctgctgatcatgttgggttctctctgccatagaggttcaccgtgtggcctttcaacacacgtagaaataggacacagagctctggagtttcttcagcttcacaatgggcgtgttaactacagagagctgttactagaacaccaggatgcgtatcaggctggaatcgtgtttcctgattgtttttaccctagcatctgcaaaggaggaaaattccatgatgtgtctgagagcactcactggactccgtttcttaatgcaagcgttcattatatccgagagaactatccccttccctgggagaaggacacagagaaactggtagctttcttgtttggaattacttctcacatggcggcagatgtcagctggcatagtctgggccttgaacaaggattccttaggaccatgggagctattgattttcacggctcctattcagaggctcattcggctggtgattttggaggagatgtgttgagccagtttgaatttaattttaattaccttgcacgacgctggtatgtgccagtcaaagatctactgggaatttatgagaaactgtatggtcgaaaagtcatcaccgaaaatgtaatcgttgattgttcacatatccagttcttagaaatgtaagttatatcccacttactctacaaagtccccgtttttggtggaacaattccaagagtattttcttggaggactggatga

SEQ ID NO: 12705 - protein, 228 aa, Homo sapiens
MQVAMARATTATGNRLWPGLLIMLGSLCHRGSPCGLSTHVEIGHRALEFLQLHNGRVNYRELLLEHQDAYQAGIVFPDCFYPSICKGGKFHDVSESTHWTPFLNASVHYIRENYPLPWEKDTEKLVAFLFGITSHMAADVSWHSLGLEQGFLRTMGAIDFHGSYSEAHSAGDFGGDVLSQFEFNFNYLARRWYVPVKDLLGIYEKLYGRKVITENVIVDCSHIQFLEM

SEQ ID NO: 12706 - DNA, 1069 bp, Homo sapiens
agtgctgctgcagctctgagcattcccacgtcaccagagaagccggtgggcaatgagatcatgtctgctttcaggttgtggcctggcctgctgatcatgttgggttctctctgccatagaggttcaccgtgtggcctttcaacacacgtagaaataggacacagagctctggagtttcttcagcttcacaatgggcgtgttaactacagagagctgttactagaacaccaggatgcgtatcaggctggaatcgtgtttcctgattgtttttaccctagcatctgcaaaggaggaaaattccatgatgtgtctgagagcactcactggactccgtttcttaatgcaagcgttcattatatccgagagaactatccccttccctgggagaaggacacagagaaactggtagctttcttgtttggaattacttctcacatggcggcagatgtcagctggcatagtctgggccttgaacaaggattccttaggaccatgggagctattgattttcacggctcctattcagaggctcattcggctggtgattttggtactgtttatttacatttgctaaattttctcgtggtatagttcacttataatgacatcactactgtgctttaaatatgtgtgtctttaatattttgctggttgcatgtattttctatttaatgttgcagttcatttagagtagagatgtacctcatttaacatagagatgtatttctaaaaacttgtgtctatatgtatttttttgttaaaaaattctacactttgttgttgacatgtcataattttagaaaaactttacttatacattgggttaaaattcattagctagtgtctcctactttcctaatactttagctttaaactagtaaactccaccttttgcctgtagtagtaaattgcttttaaatatttaaactaggtggtgaatggtgtttattaaacccttatggtcgatatttccttaaagtaaaacaaaaaacacctttggttatatggccagttctttcttaatttatatgtttcactaactaagatttttaaaagataattttttctt

SEQ ID NO: 12707 - protein, 176 aa, Homo sapiens; identical to SEQ ID NO: 1258

SEQ ID NO: 12708 - DNA, 1006 bp, Homo sapiens
tttggagtcccagtgctgctgcagctctgagcattcccacgtcaccagagaagccggtgggcaatgagatcatgtctgctttcaggttgtggcctggcctgctgatcatgttgggttctctctgccatagaggttcaccgtgtggcctttcaacacacgtagaaatagctgttactagaacaccaggatgcgtatcaggctggaatcgtgtttcctgattgtttttaccctagcatctgcaaaggaggaaaattccatgatgtgtctgagagcactcactggactccgtttcttaatgcaagcgttcattatatccgagagaactatccccttccctgggagaaggacacagagaaactggtagctttcttgtttggaattacttctcacatggcggcagatgtcagctggcatagtctgggccttgaacaaggattccttaggaccatgggagctattgattttcacggctcctattcagaggctcattcggctggtgattttggtactgtttatttacatttgctaaattttctcgtggtatagttcacttataatgacatcactactgtgctttaaatatgtgtgtctttaatattttgctggttgcatgtattttctatttaatgttgcagttcatttagagtagagatgtacctcatttaacatagagatgtatttctaaaaacttgtgtctatatgtatttttttgttaaaaaattctacactttgttgttgacatgtcataattttagaaaaactttacttatacattgggttaaaattcattagctagtgtctcctactttcctaatactttagctttaaactagtaaactccaccttttgcctgtagtagtaaattgcttttaaatatttaaactaggtggtgaatggtgtttattaaacccttatggtcgatatttccttaaagtaaaacaaaaaacacctttggttatatggccagttctttcttaatttatatgtttcactaactaagattttt

SEQ ID NO: 12709 - protein, 58 aa, Homo sapiens
MRIRLESCFLIVFTLASAKEENSMMCLRALTGLRFLMQAFIISERTIPFPGRRTQRNW

SEQ ID NO: 12710 - DNA, 1938 bp, Homo sapiens
ggagagaagccgcgcggcgcttagggcaaggtgcagagggcggcgcggcggtgcagcgagaaagacgcggagagagggcgctgctctgtggctctgcaaccttccgccagctcccacgctttccccgcgcgtccccggcgcctcctcgctcctcttgcttccccgcgacccctgcgttcccgtgcgcgcgcgcccgcttgcctgtttcctgtcgccgtcgttgcccgggccatggcgacctgcatttggctgcggagctgtggggcccggcgcctcgggtcgacgtttccaggctgccgcctccgcccccgcgccggcggcctggtccctgcctccgggcctgcgcccggcccggcccagctccgctgctacgctgggcgcctggcgggcctctctgcggcgctgctgcgcaccgacagcttcgtgggcggccgctggctcccggccgccgccaccttccccgtgcaagacccggccagcggcgccgctctgggcatggtagccgactgcggggtgcgagaggcccgcgccgccgtgcgcgctgcctacgaggctttctgccgctggagggaggtctccgccaaggagaggagttcattacttcggaagtggtacaatttaatgatacaaaataaggatgaccttgccagaataatcacagctgaaagtggaaagccactgaaggaggcacatggagaaattctctattccgcctttttcctagagtggttctctgaggaagcccgccgtgtttacggagacattatccacaccccggcaaaggacaggcgggccctggtcctcaagcagcccataggcgtggctgcagtcatcaccccgtggaatttccccagtgccatgatcacccggaaggtgggggccgccctggcagccggctgtactgtcgtggtgaagcctgccgaagacacgcccttctccgccctggccctggctgagcttgcaagccaggctgggattccttcaggtgtatacaatgttattccctgttctcgaaagaatgccaaggaagtaggggaggcaatttgtactgatcctctggtgtccaaaatttcctttactggttcaacaactacaggaaagatcctgttgcaccacgcagcaaactctgtgaaaagggtctctatggagctgggcggccttgctccatttatagtatttgacagtgccaacgtggaccaggctgtagcaggggccatggcatctaaatttaggaacactggacagacttgtgtttgctcaaaccaattcttggtgcaaaggggcatccatgatgcctttgtaaaagcattcgccgaggccatgaagaagaacctgcgcgtaggtaatggatttgaggaaggaactactcagggcccattaattaatgaaaaagcggtagaaaaggtggagaaacaggtgaatgatgccgtttctaaaggtgccaccgttgtgacaggtggaaaacgacaccaacttggaaaaaatttctttgagcctaccctgctgtgcaatgtcacccaggacatgctgtgcactcatgaagagactttcgggcctctggcaccagttatcaagttcgatacagaggaggaggctatagcaatcgctaacgcagctgatgttgggttagcaggttatttttactctcaagacccagcccagatctggagagtggcagagcagctggaagtgggcatggttggcgtcaacgaaggattaatttcctctgtggagtgcccttttggtggagtgaagcagtccggccttgggcgagaggggtccaagtatggcattgatgagtatctggaactcaagtatgtgtgttacgggggcttgtaggattctttggttctttaaaaaaatttaaaaggagacttatctacatatataggtacatgccatccattattttaaataaactaataggttttcagaatt

SEQ ID NO: 12711 - protein, 535 aa, Homo sapiens; identical to SEQ ID NO: 1260

SEQ ID NO: 12712 - DNA, 5334 bp, Homo sapiens
ggagagaagccgcgcggcgcttagggcaaggtgcagagggcggcgcggcggtgcagcgagaaagacgcggagagagggcgctgctctgtggctctgcaaccttccgccagctcccacgctttccccgcgcgtccccggcgcctcctcgctcctcttgcttccccgcgacccctgcgttcccgtgcgcgcgcgcccgcttgcctgtttcctgtcgccgtcgttgcccgggccatggcgacctgcatttggctgcggagctgtggggcccggcgcctcgggtcgacgtttccaggctgccgcctccgcccccgcgccggcggcctggtccctgcctccgggcctgcgcccggcccggcccagctccgctgctacgctgggcgcctggcgggcctctctgcggcgctgctgcgcaccgacagcttcgtgggcggccgctggctcccggccgccgccaccttccccgtgcaagacccggccagcggcgccgctctgggcatggtagccgactgcggggtgcgagaggcccgcgccgccgtgcgcgctgcctacgaggctttctgccgctggagggaggtctccgccaaggagaggagttcattacttcggaagtggtacaatttaatgatacaaaataaggatgaccttgccagaataatcacagctgaaagtggaaagccactgaaggaggcacatggagaaattctctattccgcctttttcctagagtggttctctgaggaagcccgccgtgtttacggagacattatccacaccccggcaaaggacaggcgggccctggtcctcaagcagcccataggcgtggctgcagtcatcaccccgtggaatttccccagtgccatgatcacccggaaggtgggggccgccctggcagccggctgtactgtcgtggtgaagcctgccgaagacacgcccttctccgccctggccctggctgagcttgcaagccaggctgggattccttcaggtgtatacaatgttattccctgttctcgaaagaatgccaaggaagtaggggaggcaatttgtactgatcctctggtgtccaaaatttcctttactggttcaacaactacaggaaagatcctgttgcaccacgcagcaaactctgtgaaaagggtctctatggagctgggcggccttgctccatttatagtatttgacagtgccaacgtggaccaggctgtagcaggggccatggcatctaaatttaggaacactggacagacttgtgtttgctcaaaccaattcttggtgcaaaggggcatccatgatgcctttgtaaaagcattcgccgaggccatgaagaagaacctgcgcgtaggtaatggatttgaggaaggaactactcagggcccattaattaatgaaaaagcggtagaaaaggtggagaaacaggtgaatgatgccgtttctaaaggtgccaccgttgtgacaggtggaaaacgacaccaacttggaaaaaatttctttgagcctaccctgctgtgcaatgtcacccaggacatgctgtgcactcatgaagagactttcgggcctctggcaccagttatcaagttcgatacagaggaggaggctatagcaatcgctaacgcagctgatgttgggttagcaggttatttttactctcaagacccagcccagatctggagagtggcagagcagctggaagtgggcatggttggcgtcaacgaaggattaatttcctctgtggagtgcccttttggtggagtgaagcagtccggccttgggcgagaggggtccaagtatggcattgatgagtatctggaactcaagtatgtgtgttacgggggcttgtaggattctttggttctttaaaaaaatttaaaaggagacttatctacatatataggtacatgccatccattattttaaataaactaataggttttcagaattatgaatttttcagaactcatccagtccttgtaatcttaaacagatgcaaatcctacccctgcccttaatgtaactagggaccaatatgtgccacgtgcctgtggctgcagactcccagagaaccagcactgggtttacagaatgaggccctggctccccaccacagccccagctgcctcagagcaggcacagcacaaggcaggcccagccccatgggccgtcacaaaggcttgatcactgcctgggcagtggcacaaccatcccccatgtcgctacagaacatgggcccagagcaccttgaaggagacccttgactgtgactggcaggcaggtgaggggcacagcacccctccccggcatctgccagctcagcacagaagacaccgaatgtgcatctggaggtgttgcggcagaggtttgagtgaaccctctttcaaagacaataaatagcacagaattgtccgtgcttctgtgaggcacgaaggagcacctctccctattcctgaaccatattttaattgatgcctttattgtcccaaatttaccacttaaagaattctattttcatttctgtcctgtttgccacttcatttcatttccttgagtaaatgagctgaagtgtaaagcaaagaatagcagaagcagcttggtaggatggaaggcacgcagtggcatggcctggctccttccctgagtggccttgttgccttgggcgtgtgttcagcacctcccatcccatggatacagtggagattccatacaggccttacttagctccttgcgatactgtgagccagagagaaagtaaaagcacttcacaaaaaaatgaaaattctaaggacatacaagagccattgttacgagcagcaccgcccagcccttccttgcctactgtcagtggctttgccaagatgggaggaggccagtgcccacttgcccaccgacctgagcctgagtaagtggctgtcacctgagcctgttctttctgtcctggtgtggtgctgctccctcacctccaaaagagcaaaagtactttcaccacagtcaacccaaaagggaaagaatttctgtaattgccaacccactttgtagaagaggcatgagcccttgaatttcaggcaccttttatctaatgagagtttttacagctcatcattcaaataacgcacaaaaaacaaaagccgctatgaccggcgttgcctctcactttgaaagaaagactccgtaatcttaaacagatgcaaatccaattaggcggccaagtaggtggagacgaagcaccttcctttccccatctctgtctgtgtagactccacttacatcttgtggttattctgggttgtggaaggaaaatgtgaatgaaagtagtgctggatgcaattactcctgaaccccacctaggatttaacatccctcattgagccactgggaagctatggttgagtaactaaaggtctggcaagaccctgggcacacagggagctgcctagcatctggcctggagtgtactagccacattcccaaggtcccaaggagaaggaagagctgaaattcatctcctagtgacagtgccccggccctgtcaagaatcacatactcagcattttgacagttaatgtcttctctttatttgtgtagtttttaggtggttttatataacattttaattacttgtgatttagatgtatccatcctttttctattaagaatacaaatgctgggctgggcacagtggctcacgcctgtaatcccaacaccttgggaggccaaggcaggcagatcacgacatcaggagatcgagaccatcctggctaacacggtgaaaccccgtctctactaaaaatacaaaaaaaattagtcggatgtggtggcaggtgcctgtagtcccagctactctggaggctgaggcaggagaatggcgtgaacccaggaggcggagcttgcagtgagcagagatcacgccactgcactccagcctggatgacagagcgagactccgcctcaaaaaaagaatacaaatgctccaacattattttttataactctggattaccgatgctgagatgtgtgcaggaatacttccaaataaatttttaacattgtaagccagtagattctttggctgggtggcaaattttgagtcttcttgcatatttggctcatgggttcataaattgaggccagagactcattgtatatccttgatcaattttctaattaaaggaaatagcttattgtttagtaaaatggcccttggttgtgggaagaaagagaattatttttaactgaacgtttttgttgttttttaaataaagtagccatatgtaacgggattttaaaaatatatacattttacaacatggactagaaaaggaccattagatcaggggttggcaaactatggcccacgaatcaaacctggcctgccacctgtttttatacaacctgtgagctaagaatggtttatatgttttcaaatgattgggcagaaaatcaaaagaagaacaatatttcatgacacctgaaaattctatgaaattcagatttcagtgtccataaacaaaatgttattagagcatagccacacccattcatttatggtattgtctgggactgctttcttggcagagttgaatagttgggacagggacagtatagcctgcaaagcctaaaagatttactacttgtctccttaaagaaaaagtttgccagctcctgatctagaccaagagggagatattgaccttacttgcatttatccggcattatttcaacacctcctgtgaagaaagtacttttctggcatagctaccgtgagttctcagcaggaacttcccagcgatgataatgtacatgaaattagccacgtaacaagagtctatttgccttgaaaaaacaattatccttgaacttcctccagctatgcagggattctcattaaagagctgatctgcatctgtttatccattttagtagcttttaaatatgattttatgtgaagtgccatttctttattctactaaagagagacagcagaaataaagatcagaagcaaatgtgagcaaatctgttttactgttaacttcaattatgaacttgaaattgtgccacatgactttttcctctaaaaactggatcctagtgttttaattacctgtgtgcagctattttaaatagcattttacttgaataatatgtatgttgtcattgtttcatgctatactttgtgggataaaacttgggaatgagtgtggtaagaaatttataaagttttgcttttaaaacgtggacataactcatttttctagtttttgacaattgtgtgttttagtgtctagtctgcagagagctgtgtgattaataaacgtggaattaacagaatttcctctccctgta

SEQ ID NO: 12713 - protein, 535 aa, Homo sapiens; identical to SEQ ID NO: 1260

SEQ ID NO: 12714 - DNA, 5373 bp, Homo sapiens
ggagagaagccgcgcggcgcttagggcaaggtgcagagggcggcgcggcggtgcagcgagaaagacgcggagagagggcgctgctctgtggctctgcaaccttccgccagctcccacgctttccccgcgcgtccccggcgcctcctcgctcctcttgcttccccgcgacccctgcgttcccgtgcgcgcgcgcccgcttgcctgtttcctgtcgccgtcgttgcccgggccatggcgacctgcatttggctgcggagctgtggggcccggcgcctcgggtcgacgtttccaggctgccgcctccgcccccgcgccggcggcctggtccctgcctccgggcctgcgcccggcccggcccagctccgctgctacgctgggcgcctggcgggcctctctgcggcgctgctgcgcaccgacagcttcgtgggcggccgctggctcccggccgccgccaccttccccgtgcaagacccggccagcggcgccgctctgggcatggtagccgactgcggggtgcgagaggcccgcgccgccgtgcgcgctgcctacgaggctttctgccgctggagggaggtctccgccaaggagaggagttcattacttcggaagtggtacaatttaatgatacaaaataaggatgaccttgccagaataatcacagctgaaagtggaaagccactgaaggaggcacatggagaaattctctattccgcctttttcctagagtggttctctgaggaagcccgccgtgtttacggagacattatccacaccccggcaaaggacaggcgggccctggtcctcaagcagcccataggcgtggctgcagtcatcaccccgtggaatttccccagtgccatgatcacccggaaggtgggggccgccctggcagccggctgtactgtcgtggtgaagcctgccgaagacacgcccttctccgccctggccctggctgaggtaaatcagggatttcttcttgatttggatccattgttgcttgcaagccaggctgggattccttcaggtgtatacaatgttattccctgttctcgaaagaatgccaaggaagtaggggaggcaatttgtactgatcctctggtgtccaaaatttcctttactggttcaacaactacaggaaagatcctgttgcaccacgcagcaaactctgtgaaaagggtctctatggagctgggcggccttgctccatttatagtatttgacagtgccaacgtggaccaggctgtagcaggggccatggcatctaaatttaggaacactggacagacttgtgtttgctcaaaccaattcttggtgcaaaggggcatccatgatgcctttgtaaaagcattcgccgaggccatgaagaagaacctgcgcgtaggtaatggatttgaggaaggaactactcagggcccattaattaatgaaaaagcggtagaaaaggtggagaaacaggtgaatgatgccgtttctaaaggtgccaccgttgtgacaggtggaaaacgacaccaacttggaaaaaatttctttgagcctaccctgctgtgcaatgtcacccaggacatgctgtgcactcatgaagagactttcgggcctctggcaccagttatcaagttcgatacagaggaggaggctatagcaatcgctaacgcagctgatgttgggttagcaggttatttttactctcaagacccagcccagatctggagagtggcagagcagctggaagtgggcatggttggcgtcaacgaaggattaatttcctctgtggagtgcccttttggtggagtgaagcagtccggccttgggcgagaggggtccaagtatggcattgatgagtatctggaactcaagtatgtgtgttacgggggcttgtaggattctttggttctttaaaaaaatttaaaaggagacttatctacatatataggtacatgccatccattattttaaataaactaataggttttcagaattatgaatttttcagaactcatccagtccttgtaatcttaaacagatgcaaatcctacccctgcccttaatgtaactagggaccaatatgtgccacgtgcctgtggctgcagactcccagagaaccagcactgggtttacagaatgaggccctggctccccaccacagccccagctgcctcagagcaggcacagcacaaggcaggcccagccccatgggccgtcacaaaggcttgatcactgcctgggcagtggcacaaccatcccccatgtcgctacagaacatgggcccagagcaccttgaaggagacccttgactgtgactggcaggcaggtgaggggcacagcacccctccccggcatctgccagctcagcacagaagacaccgaatgtgcatctggaggtgttgcggcagaggtttgagtgaaccctctttcaaagacaataaatagcacagaattgtccgtgcttctgtgaggcacgaaggagcacctctccctattcctgaaccatattttaattgatgcctttattgtcccaaatttaccacttaaagaattctattttcatttctgtcctgtttgccacttcatttcatttccttgagtaaatgagctgaagtgtaaagcaaagaatagcagaagcagcttggtaggatggaaggcacgcagtggcatggcctggctccttccctgagtggccttgttgccttgggcgtgtgttcagcacctcccatcccatggatacagtggagattccatacaggccttacttagctccttgcgatactgtgagccagagagaaagtaaaagcacttcacaaaaaaatgaaaattctaaggacatacaagagccattgttacgagcagcaccgcccagcccttccttgcctactgtcagtggctttgccaagatgggaggaggccagtgcccacttgcccaccgacctgagcctgagtaagtggctgtcacctgagcctgttctttctgtcctggtgtggtgctgctccctcacctccaaaagagcaaaagtactttcaccacagtcaacccaaaagggaaagaatttctgtaattgccaacccactttgtagaagaggcatgagcccttgaatttcaggcaccttttatctaatgagagtttttacagctcatcattcaaataacgcacaaaaaacaaaagccgctatgaccggcgttgcctctcactttgaaagaaagactccgtaatcttaaacagatgcaaatccaattaggcggccaagtaggtggagacgaagcaccttcctttccccatctctgtctgtgtagactccacttacatcttgtggttattctgggttgtggaaggaaaatgtgaatgaaagtagtgctggatgcaattactcctgaaccccacctaggatttaacatccctcattgagccactgggaagctatggttgagtaactaaaggtctggcaagaccctgggcacacagggagctgcctagcatctggcctggagtgtactagccacattcccaaggtcccaaggagaaggaagagctgaaattcatctcctagtgacagtgccccggccctgtcaagaatcacatactcagcattttgacagttaatgtcttctctttatttgtgtagtttttaggtggttttatataacattttaattacttgtgatttagatgtatccatcctttttctattaagaatacaaatgctgggctgggcacagtggctcacgcctgtaatcccaacaccttgggaggccaaggcaggcagatcacgacatcaggagatcgagaccatcctggctaacacggtgaaaccccgtctctactaaaaatacaaaaaaaattagtcggatgtggtggcaggtgcctgtagtcccagctactctggaggctgaggcaggagaatggcgtgaacccaggaggcggagcttgcagtgagcagagatcacgccactgcactccagcctggatgacagagcgagactccgcctcaaaaaaagaatacaaatgctccaacattattttttataactctggattaccgatgctgagatgtgtgcaggaatacttccaaataaatttttaacattgtaagccagtagattctttggctgggtggcaaattttgagtcttcttgcatatttggctcatgggttcataaattgaggccagagactcattgtatatccttgatcaattttctaattaaaggaaatagcttattgtttagtaaaatggcccttggttgtgggaagaaagagaattatttttaactgaacgtttttgttgttttttaaataaagtagccatatgtaacgggattttaaaaatatatacattttacaacatggactagaaaaggaccattagatcaggggttggcaaactatggcccacgaatcaaacctggcctgccacctgtttttatacaacctgtgagctaagaatggtttatatgttttcaaatgattgggcagaaaatcaaaagaagaacaatatttcatgacacctgaaaattctatgaaattcagatttcagtgtccataaacaaaatgttattagagcatagccacacccattcatttatggtattgtctgggactgctttcttggcagagttgaatagttgggacagggacagtatagcctgcaaagcctaaaagatttactacttgtctccttaaagaaaaagtttgccagctcctgatctagaccaagagggagatattgaccttacttgcatttatccggcattatttcaacacctcctgtgaagaaagtacttttctggcatagctaccgtgagttctcagcaggaacttcccagcgatgataatgtacatgaaattagccacgtaacaagagtctatttgccttgaaaaaacaattatccttgaacttcctccagctatgcagggattctcattaaagagctgatctgcatctgtttatccattttagtagcttttaaatatgattttatgtgaagtgccatttctttattctactaaagagagacagcagaaataaagatcagaagcaaatgtgagcaaatctgttttactgttaacttcaattatgaacttgaaattgtgccacatgactttttcctctaaaaactggatcctagtgttttaattacctgtgtgcagctattttaaatagcattttacttgaataatatgtatgttgtcattgtttcatgctatactttgtgggataaaacttgggaatgagtgtggtaagaaatttataaagttttgcttttaaaacgtggacataactcatttttctagtttttgacaattgtgtgttttagtgtctagtctgcagagagctgtgtgattaataaacgtggaattaacagaatttcctctccctgta

SEQ ID NO: 12715 - protein, 548 aa, Homo sapiens; identical to SEQ ID NO: 1262

SEQ ID NO: 12716 - DNA, 2455 bp, Homo sapiens
gtttgagcacatgacaaccaccgagggaagtgttttcacagagaggcggtagcagccacacgttcactggtcaggtctgcagcttctgacagactgtgtgggtttgtttttgtctcctgtccagacttgtgtttgctcaaaccaattcttggtgcaaaggggcatccatgatgcctttgtaaaagcattcgccgaggccatgaagaagaacctgcgcgtaggtaatggatttgaggaaggaactactcagggcccattaattaatgaaaaagcggtagaaaaggtggagaaacaggtgaatgatgccgtttctaaaggtgccaccgttgtgacaggtggaaaacgacaccaacttggaaaaaatttctttgagcctaccctgctgtgcaatgtcacccaggacatgctgtgcactcatgaagagactttcgggcctctggcaccagttatcaagttcgatacagaggaggaggctatagcaatcgctaacgcagctgatgttgggttagcaggttatttttactctcaagacccagcccagatctggagagtggcagagcagctggaagtgggcatggttggcgtcaacgaaggattaatttcctctgtggagtgcccttttggtggagtgaagcagtccggccttgggcgagaggggtccaagtatggcattgatgagtatctggaactcaagtatgtgtgttacgggggcttgtaggattctttggttctttaaaaaaatttaaaaggagacttatctacatatataggtacatgccatccattattttaaataaactaataggttttcagaattatgaatttttcagaactcatccagtccttgtaatcttaaacagatgcaaatcctacccctgcccttaatgtaactagggaccaatatgtgccacgtgcctgtggctgcagactcccagagaaccagcactgggtttacagaatgaggccctggctccccaccacagccccagctgcctcagagcaggcacagcacaaggcaggcccagccccatgggccgtcacaaaggcttgatcactgcctgggcagtggcacaaccatcccccatgtcgctacagaacatgggcccagagcaccttgaaggagacccttgactgtgactggcaggcaggtgaggggcacagcacccctccccggcatctgccagctcagcacagaagacaccgaatgtgcatctggaggtgttgcggcagaggtttgagtgaaccctctttcaaagacaataaatagcacagaattgtccgtgcttctgtgaggcacgaaggagcacctctccctattcctgaaccatattttaattgatgcctttattgtcccaaatttaccacttaaagaattctattttcatttctgtcctgtttgccacttcatttcatttccttgagtaaatgagctgaagtgtaaagcaaagaatagcagaagcagcttggtaggatggaaggcacgcagtggcatggcctggctccttccctgagtggccttgttgccttgggcgtgtgttcagcacctcccatcccatggatacagtggagattccatacaggccttacttagctccttgcgatactgtgagccagagagaaagtaaaagcacttcacaaaaaaatgaaaattctaaggacatacaagagccattgttacgagcagcaccgcccagcccttccttgcctactgtcagtggctttgccaagatgggaggaggccagtgcccacttgcccaccgacctgagcctgagtaagtggctgtcacctgagcctgttctttctgtcctggtgtggtgctgctccctcacctccaaaagagcaaaagtactttcaccacagtcaacccaaaagggaaagaatttctgtaattgccaacccactttgtagaagaggcatgagcccttgaatttcaggcaccttttatctaatgagagtttttacagctcatcattcaaataacgcacaaaaaacaaaagccgctatgaccggcgttgcctctcactttgaaagaaagactccgtaatcttaaacagatgcaaatccaattaggcggccaagtaggtggagacgaagcaccttcctttccccatctctgtctgtgtagactccacttacatcttgtggttattctgggttgtggaaggaaaatgtgaatgaaagtagtgctggatgcaattactcctgaaccccacctaggatttaacatccctcattgagccactgggaagctatggttgagtaactaaaggtctggcaagaccctgggcacacagggagctgcctagcatctggcctggagtgtactagccacattcccaaggtcccaaggagaaggaagagctgaaattcatctcctagtgacagtgccccggccctgtcaagaatcacatactcagcattttgacagttaatgtcttctctttatttgtgtag

SEQ ID NO: 12717 - protein, 172 aa, Homo sapiens [sequence omitted]

SEQ ID NO: 12718 - DNA, 758 bp, Homo sapiens
acgttcactggtcaggtctgcagcttctgacagactgtgtgggtttgtttttgtctcctgtccagacttgtgtttgctcaaaccaattcttggtgcaaaggggcatccatgatgcctttgtaaaagcattcgccgaggccatgaagaagaacctgcgcgtaggtaatggatttgaggaaggaactactcagggcccattaattaatgaaaaagcggtagaaaaggtggagaaacaggtgaatgatgccgtttctaaaggtgccaccgttgtgacaggtggaaaacgacaccaacttggaaaaaatttctttgagcctaccctgctgtgcaatgtcacccaggacatgctgtgcactcatgaagagactttcgggcctctggcaccagttatcaagttcgatacagaggaggaggctatagcaatcgctaacgcagctgatgttgggttagcaggttatttttactctcaagacccagcccagatctggagagtggcagagcagctggaagtgggcatggttggcgtcaacgaaggattaatttcctctgtggagtgcccttttggtggagtgaagcagtccggccttgggcgagaggggtccaagtatggcattgatgagtatctggaactcaagtatgtgtgttacgggggcttgtaggattctttggttctttaaaaaaatttaaaaggagacttatctacatatataggtacatgccatccattattttaaataaactaataggttttcagaatt

SEQ ID NO: 12719 - protein, 172 aa, Homo sapiens [sequence omitted]

SEQ ID NO: 12720 - DNA, 2151 bp, Homo sapiens
gctcaaaccaattcttggtgcaaaggggcatccatgatgcctttgtaaaagcattcgccgaggccatgaagaagaacctgcgcgtaggtaatggatttgaggaaggaactactcagggcccattaattaatgaaaaagcggtagaaaaggttcgatacagaggaggaggctatagcaatcgctaacgcagctgatgttgggttagcaggttatttttactctcaagacccagcccagatctggagagtggcagagcagctggaagtgggcatggttggcgtcaacgaaggattaatttcctctgtggagtgcccttttggtggagtgaagcagtccggccttgggcgagaggggtccaagtatggcattgatgagtatctggaactcaagtatgtgtgttacgggggcttgtaggattctttggttctttaaaaaaatttaaaaggagacttatctacatatataggtacatgccatccattattttaaataaactaataggttttcagaattatgaatttttcagaactcatccagtccttgtaatcttaaacagatgcaaatcctacccctgcccttaatgtaactagggaccaatatgtgccacgtgcctgtggctgcagactcccagagaaccagcactgggtttacagaatgaggccctggctccccaccacagccccagctgcctcagagcaggcacagcacaaggcaggcccagccccatgggccgtcacaaaggcttgatcactgcctgggcagtggcacaaccatcccccatgtcgctacagaacatgggcccagagcaccttgaaggagacccttgactgtgactggcaggcaggtgaggggcacagcacccctccccggcatctgccagctcagcacagaagacaccgaatgtgcatctggaggtgttgcggcagaggtttgagtgaaccctctttcaaagacaataaatagcacagaattgtccgtgcttctgtgaggcacgaaggagcacctctccctattcctgaaccatattttaattgatgcctttattgtcccaaatttaccacttaaagaattctattttcatttctgtcctgtttgccacttcatttcatttccttgagtaaatgagctgaagtgtaaagcaaagaatagcagaagcagcttggtaggatggaaggcacgcagtggcatggcctggctccttccctgagtggccttgttgccttgggcgtgtgttcagcacctcccatcccatggatacagtggagattccatacaggccttacttagctccttgcgatactgtgagccagagagaaagtaaaagcacttcacaaaaaaatgaaaattctaaggacatacaagagccattgttacgagcagcaccgcccagcccttccttgcctactgtcagtggctttgccaagatgggaggaggccagtgcccacttgcccaccgacctgagcctgagtaagtggctgtcacctgagcctgttctttctgtcctggtgtggtgctgctccctcacctccaaaagagcaaaagtactttcaccacagtcaacccaaaagggaaagaatttctgtaattgccaacccactttgtagaagaggcatgagcccttgaatttcaggcaccttttatctaatgagagtttttacagctcatcattcaaataacgcacaaaaaacaaaagccgctatgaccggcgttgcctctcactttgaaagaaagactccgtaatcttaaacagatgcaaatccaattaggcggccaagtaggtggagacgaagcaccttcctttccccatctctgtctgtgtagactccacttacatcttgtggttattctgggttgtggaaggaaaatgtgaatgaaagtagtgctggatgcaattactcctgaaccccacctaggatttaacatccctcattgagccactgggaagctatggttgagtaactaaaggtctggcaagaccctgggcacacagggagctgcctagcatctggcctggagtgtactagccacattcccaaggtcccaaggagaaggaagagctgaaattcatctcctagtgacagtgccccggccctgtcaagaatcacatactcagcattttgacagttaatgtcttctctttatttgtgtag

SEQ ID NO: 12721 - protein, 39 aa, Homo sapiens
MKKNLRVGNGFEEGTTQGPLINEKAVEKVRYRGGGYSNR

SEQ ID NO: 12722 - DNA, 2111 bp, Homo sapiens
actctgatttactccttgtgattatttgggaaacaaatcagaagaaaacaaaactggtttcctttcctctcccccttacattttttatgacctatcttaactttggcaggttcgatacagaggaggaggctatagcaatcgctaacgcagctgatgttgggttagcaggttatttttactctcaagacccagcccagatctggagagtggcagagcagctggaagtgggcatggttggcgtcaacgaaggattaatttcctctgtggagtgcccttttggtggagtgaagcagtccggccttgggcgagaggggtccaagtatggcattgatgagtatctggaactcaagtatgtgtgttacgggggcttgtaggattctttggttctttaaaaaaatttaaaaggagacttatctacatatataggtacatgccatccattattttaaataaactaataggttttcagaattatgaatttttcagaactcatccagtccttgtaatcttaaacagatgcaaatcctacccctgcccttaatgtaactagggaccaatatgtgccacgtgcctgtggctgcagactcccagagaaccagcactgggtttacagaatgaggccctggctccccaccacagccccagctgcctcagagcaggcacagcacaaggcaggcccagccccatgggccgtcacaaaggcttgatcactgcctgggcagtggcacaaccatcccccatgtcgctacagaacatgggcccagagcaccttgaaggagacccttgactgtgactggcaggcaggtgaggggcacagcacccctccccggcatctgccagctcagcacagaagacaccgaatgtgcatctggaggtgttgcggcagaggtttgagtgaaccctctttcaaagacaataaatagcacagaattgtccgtgcttctgtgaggcacgaaggagcacctctccctattcctgaaccatattttaattgatgcctttattgtcccaaatttaccacttaaagaattctattttcatttctgtcctgtttgccacttcatttcatttccttgagtaaatgagctgaagtgtaaagcaaagaatagcagaagcagcttggtaggatggaaggcacgcagtggcatggcctggctccttccctgagtggccttgttgccttgggcgtgtgttcagcacctcccatcccatggatacagtggagattccatacaggccttacttagctccttgcgatactgtgagccagagagaaagtaaaagcacttcacaaaaaaatgaaaattctaaggacatacaagagccattgttacgagcagcaccgcccagcccttccttgcctactgtcagtggctttgccaagatgggaggaggccagtgcccacttgcccaccgacctgagcctgagtaagtggctgtcacctgagcctgttctttctgtcctggtgtggtgctgctccctcacctccaaaagagcaaaagtactttcaccacagtcaacccaaaagggaaagaatttctgtaattgccaacccactttgtagaagaggcatgagcccttgaatttcaggcaccttttatctaatgagagtttttacagctcatcattcaaataacgcacaaaaaacaaaagccgctatgaccggcgttgcctctcactttgaaagaaagactccgtaatcttaaacagatgcaaatccaattaggcggccaagtaggtggagacgaagcaccttcctttccccatctctgtctgtgtagactccacttacatcttgtggttattctgggttgtggaaggaaaatgtgaatgaaagtagtgctggatgcaattactcctgaaccccacctaggatttaacatccctcattgagccactgggaagctatggttgagtaactaaaggtctggcaagaccctgggcacacagggagctgcctagcatctggcctggagtgtactagccacattcccaaggtcccaaggagaaggaagagctgaaattcatctcctagtgacagtgccccggccctgtcaagaatcacatactcagcattttgacagttaatgtcttctctttatttgtgtag

SEQ ID NO: 12723 - protein, 95 aa, Homo sapiens
MTYLNFGRFDTEEEAIAIANAADVGLAGYFYSQDPAQIWRVAEQLEVGMVGVNEGLISSVECPFGGVKQSGLGREGSKYGIDEYLELKYVCYGGL

SEQ ID NO: 12724 - DNA, 6805 bp, Homo sapiens
gctgccgcgggcggtgggcggggatcccccgggggtgcaaccttgctccacctgtgctgccctcggcgggcctggctggccccgcgcagagcggcggcggcgctcgctgtcactgccggaggtgagagcgcagcagtagcttcagcctgtcttgggcttggtccagattcgctcctctggggctacgtcccggggaagaggaagcgaggattttgctggggtggggctgtacctcttaacagcaggtgcgcgcgcgagggtgtgaacgtgtgtgtgtgtgtgtgtgtgtgtgtgtgtgtgtgtgtgtgtgtgtgtaagacctgcgatgacgacgaggaggaacaagtgggacggcgagtgatgctcagggccagcagcaacgcatggggcgagcttcagtgtcgccagcagtgaccacagttcttgaggccaaatctggctcctaaaaaacatcaaaggaagcttgcaccaaactctcttcagggccgcctcagaagcctgccatcacccactgtgtggtgcacaatggcgccccccacaggtgtgctctcttcattgctgctgctggtgacaattgcaggttgtgcccgtaagcagtgcagcgaggggaggacatattccaatgcagtcatttcacctaacttggaaaccaccagaatcatgcgggtgtctcacaccttccctgtcgtagactgcacggccgcttgctgtgacctgtccagctgtgacctggcctggtggttcgagggccgctgctacctggtgagctgcccccacaaagagaactgtgagcccaagaagatgggccccatcaggtcttatctcacttttgtgctccggcctgttcagaggcctgcacagctgctggactatggggacatgatgctgaacaggggctccccctcggggatctggggggactcacctgaggatatcagaaaggacttgacctttctaggcaaagattggggcctagaggagatgtctgagtactcagatgactaccgggagctggagaaggacctcttgcaacccagtggcaagcaggagcccagagggagtgccgagtacacggactggggcctactgccgggcagcgagggggccttcaactcctctgttggagacagtcctgcggtgccagcggagacgcagcaggaccctgagctccattacctgaatgagtcggcttcaacccctgccccaaaactccctgagagaagtgtgttgcttcccttgccgactactccatcttcaggagaggtgttggagaaagaaaaggcttctcagctccaggaacaatccagcaacagctctggaaaagaggttctaatgccttcccatagtcttcctccggcaagcctggagctcagctcagtcaccgtggagaaaagcccagtgctcacagtcaccccggggagtacagagcacagcatcccaacacctcccactagcgcagccccctctgagtccaccccatctgagctacccatatctcctaccactgctcccaggacagtgaaagaacttacggtatcggctggagataacctaattataactttacccgacaatgaagttgaactgaaggcctttgttgcgccagcgccacctgtagaaacaacctacaactatgaatggaatttaataagccaccccacagactaccaaggtgaaataaaacaaggacacaagcaaactcttaacctctctcaattgtccgtcggactttatgtcttcaaagtcactgtttctagtgaaaacgcctttggagaaggatttgtcaatgtcactgttaagcctgccagaagagtcaacctgccacctgtagcagttgtttctccccaactgcaagagctcactttgcctttgacgtcagccctcattgatggcagccaaagtacagatgatactgaaatagtgagttatcattgggaagaaataaacgggcccttcatagaagagaagacttcagttgactctcccgtcttacgcttgtctaaccttgatcctggtaactatagtttcaggttgactgttacagactcggacggagccactaactctacaactgcagccctaatagtgaacaatgctgtggactacccaccagttgctaatgcaggaccaaatcacaccataactttgccccaaaactccatcactttgaatggaaaccagagcagtgacgatcaccagattgtcctctatgagtggtccctgggtcctgggagtgagggcaaacatgtggtcatgcaggcaatacagacgccataccttcatttatctgcaatgcaggaaggagattatacatttcagctgaaggtgacagattcttcaaggcaacagtctactgctgtggtgactgtgattgtccagcctgaaaacaatagacctccagtggctgtggccggccctgataaagagctgatcttcccagtggaaagtgctaccctggatgggagcagcagcagcgatgaccacggcattgtcttctaccactgggagcacgtcagaggccccagtgcagtggagatggaaaatattgacaaagcaatagccactgtgactggtctccaggtggggacctaccacttccgtttgacagtgaaagaccagcagggactgagcagcacgtccaccctcactgtggctgtgaagaaggaaaataatagtcctcccagagcccgggctggtggcagacatgttcttgtgcttcccaataattccattactttggatggttcaaggtctactgatgaccaaagaattgtgtcctatctgtggatccgggatggccagagtccagcagctggagatgtcatcgatggctctgaccacagtgtggctctgcagcttacgaatctggtggagggggtgtacactttccacttgcgagtcaccgacagtcagggggcctcggacacagacactgccactgtggaagtgcagccagaccctaggaagagtggcctggtggagctgaccctgcaggttggtgttgggcagctgacagagcagcggaaggacacccttgtgaggcagctggctgtgctgctgaacgtgctggactcggacattaaggtccagaagattcgggcccactcggatctcagcaccgtgattgtgttttatgtacagagcaggccgcctttcaaggttctcaaagctgctgaagtggcccgaaatctgcacatgcggctctcaaaggagaaggctgacttcttgcttttcaaggtcttgagggttgatacagcaggttgccttctgaagtgttctggccatggtcactgcgaccccctcacaaagcgctgcatttgctctcacttatggatggagaaccttatacagcgttatatctgggatggagagagcaactgtgagtggagtatattctatgtgacagtgttggcttttactcttattgtgctaacaggaggtttcacttggctttgcatctgctgctgcaaaagacaaaaaaggactaaaatcaggaaaaaaacaaagtacaccatcctggataacatggatgaacaggaaagaatggaactgaggcccaaatatggtatcaagcaccgaagcacagagcacaactccagcctgatggtatccgagtctgagtttgacagtgaccaggacacaatcttcagccgagaaaagatggagagagggaatccaaaggtttccatgaatggttccatcagaaatggagcttccttcagttattgctcaaaggacagataatggcgcagttcattgtaaagtggaaggaccccttgaatccaagaccagtcagtgggagttacagcacaaaacccactcttttagaatagttcattgaccttcttccccagtgggttagatgtgtatccccacgtactaaaagaccggtttttgaaggcacaaaacaaaaactttgctcttttaactgagatgcttgttaatagaaataaaggctgggtaaaactctaaggtatatacttaaaagagttttgagtttttgtagctggcacaatctcatattaaagatgaacaacgatttctatctgtagaaccttagagaaggtgaatgaaacaaggttttaaaaagggatgatttctgtcttagctgctgtgattgcctctaaggaacagcattctaaacacggtttctcttgtaggacctgcagtcagatggctgtgtatgttaaaatagcttgtctaagaggcacgggccatctgtggaggtacggagtcttgcatgtagcaagctttctgtgctgacggcaacactcgcacagtgccaagccctcctggtttttaattctgtgctatgtcaatggcagttttcatctctctcaagaaagcagctgttggccattcaagagctaaggaagaatcgtattctaaggactgaggcaatagaaaggggaggaggagcttaatgccgtgcaggttgaaggtagcattgtaacattatcttttctttctctaagaaaaactacactgactcctctcggtgttgtttagcagtatagttctctaatgtaaacggatccccagtttacattaaatgcaatagaagtgattaattcattaagcatttattatgttctgtaggctgtgcgtttggactgccatagatagggataacgactcagcaattgtgtatatattccaaaactctgaaatacagtcagtcttaacttggatggcgtggttatgatactctggtccccgacaggtactttccaaaataacttgacatagatgtattcacttcatatgtttaaaaatacatttaagtttttctaccgaataaatcttatttcaaacatgaaagacaattaaaacattcccacccacaaagcagtactcccgagcaattaactggagttaattgtagcctgctacgttgactggttcagggtagttccccatccacccttggtcctgaggctggtggccttggtggtgcccttggcattttttgtgggaagattagaatgagagatagaaccagtgttgtggtaccaagtgtgagcacacctaaacaatatcctgttgcacaatgcttttttaacacatgggaaaactaggaatgcattgctgatgaagaagcaaggtatttaaacaccagggcaggagtgccagagaaaatgtttccccatgggttcttaaaaaaaattcagcttttaggtgcttttgtcatctcccgcagtattcatcctcatgggaccatcttatttttacttattgtaatttactggggaaaggcagaactaaaaagtgtgtcattttatttttaaaataattgctttgcttatgcctacactttctgtataactagccaattcaatactgtctatagtgttagaaggaaaatgtgatttttttttttaaccagtattgagcttcataagcctagaatctgccttatcaggtgaccagggttatggttgtttgcatgcaaatgtgaatttctggcataggggacagcagcccaaatgtaaagtcatcgggcgtaatgaggaagaagggagtgaacatttaccgctttatgtacataacatatgcagtttacatactcatttgatccttataatcaaccttgaagaggagatactatcattcttatgttgcagatagccctctgaaggcccagagaggttaaataacttcccagaggtcatggccaagaagtagtggctccaagaactgaatgcaaattttttaaactgtagagttctgctttccactaaacaaagaactcctgccttgatggatggagggcaaattctggtggaacttttgggccacctgaaagttctattcccaggactaagaggaatttcttttaatggatccagagagccaaggtcagagggagagatggcctgcatagtctcctgtggatcacacccgggccacccctccctctaggtttacagtggacttcttctgcccctcctccttttctgtccttggccatctcagcctggcctctctgatccttccatcacagaaggatcttgaatctctgggaaatcaaacatcacagtagtgatcagaaagtgagtcctgtcttgtcaccccatttctcatcagaacaaagcacgagatggaatgaccaaccagcattcttcatggtggactgcttatcattgaggatctttgggagataaagcacgctaagagctctggacagagaaaaacaggccctagaatatgggagtgggtgtttgtagggctcacaggctaacaagcactttagttgctggtttacattcaatgaaggaggattcatacccatggcattacaaggctaagcatgtgtatgactaaggaactatctgaaaaacatgcagcaaggtaagaaaatgtaccactcaacaagccagtgatgccaccttttgtgcgcggggaggagagtgactaccattgttttttgtgtgacaaagctatcatggactattttaatcttggttttattgcttaaaatatattatttttccctatgtgttgacaaggtatttctaatatcacactattaaatatatgcactaatctaaataaaggtgtctgtattttctgtaatgcttatttttagggggaaatttgttttctttatgcttcagggtagagggatttcccttgagtataggtcagcaaactgtggcctacagcctgtgtgtgcacgccccatgagccgaaaagtgggtcttatgttttcaaatggttaaaaataaataaaaaaatttgaaacatgtgaactatatgacattcagatttgtgttcataaataaagttttattggaacatatcc

SEQ ID NO: 12725 - protein, 1072 aa, Homo sapiens
MAPPTGVLSSLLLLVTIAGCARKQCSEGRTYSNAVISPNLETTRIMRVSHTFPVVDCTAACCDLSSCDLAWWFEGRCYLVSCPHKENCEPKKMGPIRSYLTFVLRPVQRPAQLLDYGDMMLNRGSPSGIWGDSPEDIRKDLTFLGKDWGLEEMSEYSDDYRELEKDLLQPSGKQEPRGSAEYTDWGLLPGSEGAFNSSVGDSPAVPAETQQDPELHYLNESASTPAPKLPERSVLLPLPTTPSSGEVLEKEKASQLQEQSSNSSGKEVLMPSHSLPPASLELSSVTVEKSPVLTVTPGSTEHSIPTPPTSAAPSESTPSELPISPTTAPRTVKELTVSAGDNLIITLPDNEVELKAFVAPAPPVETTYNYEWNLISHPTDYQGEIKQGHKQTLNLSQLSVGLYVFKVTVSSENAFGEGFVNVTVKPARRVNLPPVAVVSPQLQELTLPLTSALIDGSQSTDDTEIVSYHWEEINGPFIEEKTSVDSPVLRLSNLDPGNYSFRLTVTDSDGATNSTTAALIVNNAVDYPPVANAGPNHTITLPQNSITLNGNQSSDDHQIVLYEWSLGPGSEGKHVVMQAIQTPYLHLSAMQEGDYTFQLKVTDSSRQQSTAVVTVIVQPENNRPPVAVAGPDKELIFPVESATLDGSSSSDDHGIVFYHWEHVRGPSAVEMENIDKAIATVTGLQVGTYHFRLTVKDQQGLSSTSTLTVAVKKENNSPPRARAGGRHVLVLPNNSITLDGSRSTDDQRIVSYLWIRDGQSPAAGDVIDGSDHSVALQLTNLVEGVYTFHLRVTDSQGASDTDTATVEVQPDPRKSGLVELTLQVGVGQLTEQRKDTLVRQLAVLLNVLDSDIKVQKIRAHSDLSTVIVFYVQSRPPFKVLKAAEVARNLHMRLSKEKADFLLFKVLRVDTAGCLLKCSGHGHCDPLTKRCICSHLWMENLIQRYIWDGESNCEWSIFYVTVLAFTLIVLTGGFTWLCICCCKRQKRTKIRKKTKYTILDNMDEQERMELRPKYGIKHRSTEHNSSLMVSESEFDSDQDTIFSREKMERGNPKVSMNGSIRNGASFSYCSKDR

SEQ ID NO: 12726 - DNA, 1036 bp, Homo sapiens
acaacgatttctatctgtagaaccttagagaaggtgaatgaaacaaggttttaaaaagggatgatttctgtcttagctgctgtgattgcctctaaggaacagcattctaaacacggtttctcttgtaggacctgcagtcagatggctgtgtatgttaaaatagcttgtctaagaggcacgggccatctgtggaggtacggagtcttgcatgtagcaagctttctgtgctgacggcaacactcgcacagtgccaagccctcctggtttttaattctgtgctatgtcaatggcagttttcatctctctcaagaaagcagctgttggccattcaagagctaaggaagaatcgtattctaaggactgaggcaatagaaaggggaggaggagcttaatgccgtgcaggttgaaggtagcattgtaacattatcttttctttctctaagaaaaactacactgactcctctcggtgttgtttagcagtatagttctctaatgtaaacggatccccagtttacattaaatgcaatagaagtgattaattcattaagcatttattatgttctgtaggctgtgcgtttggactgccatagatagggataacgactcagcaattgtgtatatattccaaaactctgaaatacagtcagtcttaacattgttttttgtgtgacaaagctatcatggactattttaatcttggttttattgcttaaaatatattatttttccctatgtgttgacaaggtatttctaatatcacactattaaatatatgcactaatctaaataaaggtgtctgtattttctgtaatgcttatttttagggggaaatttgttttctttatgcttcagggtagagggatttcccttgagtataggtcagcaaactgtggcctacagcctgtgtgtgcacgccccatgagccgaaaagtgggtcttatgttttcaaatggttaaaaataaataaaaaaatttgaaacatgtgaactatatgacattcagatttgtgttcataaataaagttttattggaacat

SEQ ID NO: 12727 - protein, 37 aa, Homo sapiens [sequence omitted]

SEQ ID NO: 12728 - DNA, 578 bp, Homo sapiens
gcacatgcggctctcaaaggagaaggctgacttcttgcttttcaaggtcttgagggttgatacagcagacaaaaaaggactaaaatcaggaaaaaaacaaagtacaccatcctggataacatggatgaacaggaaagaatggaactgaggcccaaatatggtatcaagcaccgaagcacagagcacaactccagcctgatggtatccgagtctgagtttgacagtgaccaggacacaatcttcagccgagaaaagatggagagagggaatccaaaggtttccatgaatggttccatcagaaatggagcttccttcagttattgctcaaaggacagataatggcgcagttcattgtaaagtggaaggaccccttgaatccaagaccagtcagtgggagttacagcacaaaacccactcttttagaatagttcattgaccttcttccccagtgggttagatgtgtatccccacgtactaaaagaccggtttttgaaggcacaaaacaaaaactttgctcttttaactgagatgcttgttaatagaaataaaggctgggtaaaactctaaggtatatactt

SEQ ID NO: 12729 - protein, 72 aa, Homo sapiens [sequence omitted]

SEQ ID NO: 12730 - DNA, 1562 bp, Homo sapiens
aaaggttcacagtggaggtgacatctgggggtaggtcgtgcttgctaaaccgtcgtctttggggacagggttactgctttaatacttcttttgatccggagggataggcatagtgctgattttacagtttcagtttagtaaatatataccatttgacagaacaatctgctgattttattattaaagttcagtattaatagtcagtggacagttttaatgactgtttgtcctgctgcaggtgaacgtgtcaggaaatgagctttgccttatgacatcccatttggagagcaccagagggcatgctgcggaacgaatgaatcagttaaaaatggttttaaagaaaatgcaagaggctccagagtcagctacagttatatttgcaggagatacaaatctaagggatcgagaggttaccagatgtggtggtttacccaacaacattgtggatgtctgggagtttttgggcaaacctaaacattgccagtatacatgggatacacaaatgaactctaatcttggaataactgctgcttgtaaacttcgttttgatcgaatatttttcagagcagcagcagaagagggacacattattccccgaagtttggaccttcttggattagaaaaactggactgtggtagatttcctagtgatcactggggtcttctgtgcaacttagatataatattgtaaaatgcttttcaagtgtgggttttgccctgattgttgcaaatacaatttccaccttctggaaaggtaggtttgctgtggaggaaataatgtactagatcattgtcacagaaaaaccaactatgatttatggttgtgttttcagaattcaacattaaagattaatgtttatttaaacgaacacattcctgcattcaggatgtgaggccatttaataaaaagggcacaaagcctgtcagagttttcaacggtgcttatagctgccagctggattccaaacaggtaccacattgtctctgagctaatgtttatatttttccattcaggcaccgaaatagttaatatttgaaataagtcttcaaaagaaaacataagagattattgagttcttgggactggatcctttatttcataagttcagatcatcttaaatgaaaatgccatgattatctgcagttaagtagatgacagctattctacatcagacttgatttttgtcagctaattacataattggtaagctataattgaaaccttatggcttaaaattccttaactcctttttgattcatgtttgtagtcatgttgtcaacagaggcaaagttaagcttgatgatggttaaaatcggtttgatagcaccatgggacatttttctaacaaaaataaatgcatgaagagacatagccttttagttttgctaattgtgaaatggaaatgctttacaggaagtaaatgcaaattacttttaagtgtgctttaaagaaaaatattttccccacaagagaaatttaaataaagaattttatttgtttatggtttgttttagtatgtttttgtgtccatgatgagattaaattttttatctgcttcctg

SEQ ID NO: 12731 - protein, 140 aa, Homo sapiens [sequence omitted]

SEQ ID NO: 12732 - DNA, 2196 bp, Homo sapiens
ctgaactcctacttcgagcctccggtggaggagagcgccttggaacgccgacctgaaaccatctctgagcccaagacctagtaagtgatgaggggagcgggagccagtccgcacggaggcagtttgataccaggtagccctgcgcgtcctgggacctgccgtggagctgggcggacgatgctgaggcagatctccaagctgcgtagccagaggagcagggcttgcgttgctgctgctgcgcggagttgcgccccagcagcggatctaacactgcaccagactgtcgcttcgaacgtgatttggggtccagggaggaaaagatggaaatgtaatgtttaactcaaatgaaaggaaataagtaagcgagaggtttgaaacaaatgaacgaaggctaaaccttctatcgaaaaatggcaacttggaagtctccttgcttcctgtattgtttatttattctaggccctaggctgaccggccagaataacagtgttgacctaaccaatgaagaaacaactgattccaccacttctaaaatcagcccatctgaagatactcagcaagaaaatggcagcatgttctctctcattacctggaatattgatggattagatctaaacaatctgtcagagagggctcgaggggtgtgttcctacttagctttgtacagcccagatgtgatatttctacaggaagttattcccccatattatagctacctaaagaagagatcaagtaattatgagattattacaggtcatgaagaaggatatttcacagctataatgttgaagaaatcaagagtgaaattaaaaagccaagagattattccttttccaagtaccaaaatgatgagaaaccttttatgtgtgcatgtgaacgtgtcaggaaatgagctttgccttatgacatcccatttggagagcaccagagggcatgctgcggaacgaatgaatcagttaaaaatggttttaaagaaaatgcaagaggctccagagtcagctacagttatatttgcaggagatacaaatctaagggatcgagaggttaccagatgtggtggtttacccaacaacattgtggatgtctgggagtttttgggcaaacctaaacattgccagtatacatgggatacacaaatgaactctaatcttggaataactgctgcttgtaaacttcgttttgatcgaatatttttcagagcagcagcagaagagggacacattattccccgaagtttggaccttcttggattagaaaaactggactgtggtagatttcctagtgatcactggggtcttctgtgcaacttagatataatattgtaaaatgcttttcaagtgtgggttttgccctgattgttgcaaatacaatttccaccttctggaaaggtaggtttgctgtggaggaaataatgtactagatcattgtcacagaaaaaccaactatgatttatggttgtgttttcagaattcaacattaaagattaatgtttatttaaacgaacacattcctgcattcaggatgtgaggccatttaataaaaagggcacaaagcctgtcagagttttcaacggtgcttatagctgccagctggattccaaacaggtaccacattgtctctgagctaatgtttatatttttccattcaggcaccgaaatagttaatatttgaaataagtcttcaaaagaaaacataagagattattgagttcttgggactggatcctttatttcataagttcagatcatcttaaatgaaaatgccatgattatctgcagttaagtagatgacagctattctacatcagacttgatttttgtcagctaattacataattggtaagctataattgaaaccttatggcttaaaattccttaactcctttttgattcatgtttgtagtcatgttgtcaacagaggcaaagttaagcttgatgatggttaaaatcggtttgatagcaccatgggacatttttctaacaaaaataaatgcatgaagagacatagccttttagttttgctaattgtgaaatggaaatgctttacaggaagtaaatgcaaattacttttaagtgtgctttaaagaaaaatattttccccacaagagaaatttaaataaagaattttatttgtttatggtttgttttagtatgtttttgtgtccatgatgagattaaattttttatctgcttcctg

SEQ ID NO: 12733 - protein, 304 aa, Homo sapiens
MATWKSPCFLYCLFILGPRLTGQNNSVDLTNEETTDSTTSKISPSEDTQQENGSMFSLITWNIDGLDLNNLSERARGVCSYLALYSPDVIFLQEVIPPYYSYLKKRSSNYEIITGHEEGYFTAIMLKKSRVKLKSQEIIPFPSTKMMRNLLCVHVNVSGNELCLMTSHLESTRGHAAERMNQLKMVLKKMQEAPESATVIFAGDTNLRDREVTRCGGLPNNIVDVWEFLGKPKHCQYTWDTQMNSNLGITAACKLRFDRIFFRAAAEEGHIIPRSLDLLGLEKLDCGRFPSDHWGLLCNLDIIL

SEQ ID NO: 12734 - DNA, 2131 bp, Homo sapiens
gcacccaccgccccggcggctcccttgcggcgcagctgcaccagttttccgagagcagcgcatttccccgccgggcggttgatgcgggagcgccatgacacaggcgcctgcgcagagccgcgcgttggcctcctgttccgcttaaaggggcggtgcagaggcggcaggaagatggagttggggagttgcctggagggcgggagggaggcggcggaggaagagggcgagcctgaggtgaaaaagcggcgacttctgtgtgtggagtttgcctcggtcgcaagctgcgatgccgcagtggctcagtgcttcctggccgagaacgactgggagatggaaagggctctgaactcctacttcgagcctccggtggaggagagcgccttggaacgccgacctgaaaccatctctgagcccaagacctatgttgacctaaccaatgaagaaacaactgattccaccacttctaaaatcagcccatctgaagatactcagcaagaaaatggcagcatgttctctctcattacctggaatattgatggattagatctaaacaatctgtcagagagggctcgaggggtgtgttcctacttagctttgtacagcccagatgtgatatttctacaggaagttattcccccatattatagctacctaaagaagagatcaagtaattatgagattattacaggtcatgaagaaggatatttcacagctataatgttgaagaaatcaagagtgaaattaaaaagccaagagattattccttttccaagtaccaaaatgatgagaaaccttttatgtgtgcatgtgaacgtgtcaggaaatgagctttgccttatgacatcccatttggagagcaccagagggcatgctgcggaacgaatgaatcagttaaaaatggttttaaagaaaatgcaagaggctccagagtcagctacagttatatttgcaggagatacaaatctaagggatcgagaggttaccagatgtggtggtttacccaacaacattgtggatgtctgggagtttttgggcaaacctaaacattgccagtatacatgggatacacaaatgaactctaatcttggaataactgctgcttgtaaacttcgttttgatcgaatatttttcagagcagcagcagaagagggacacattattccccgaagtttggaccttcttggattagaaaaactggactgtggtagatttcctagtgatcactggggtcttctgtgcaacttagatataatattgtaaaatgcttttcaagtgtgggttttgccctgattgttgcaaatacaatttccaccttctggaaaggtaggtttgctgtggaggaaataatgtactagatcattgtcacagaaaaaccaactatgatttatggttgtgttttcagaattcaacattaaagattaatgtttatttaaacgaacacattcctgcattcaggatgtgaggccatttaataaaaagggcacaaagcctgtcagagttttcaacggtgcttatagctgccagctggattccaaacaggtaccacattgtctctgagctaatgtttatatttttccattcaggcaccgaaatagttaatatttgaaataagtcttcaaaagaaaacataagagattattgagttcttgggactggatcctttatttcataagttcagatcatcttaaatgaaaatgccatgattatctgcagttaagtagatgacagctattctacatcagacttgatttttgtcagctaattacataattggtaagctataattgaaaccttatggcttaaaattccttaactcctttttgattcatgtttgtagtcatgttgtcaacagaggcaaagttaagcttgatgatggttaaaatcggtttgatagcaccatgggacatttttctaacaaaaataaatgcatgaagagacatagccttttagttttgctaattgtgaaatggaaatgctttacaggaagtaaatgcaaattacttttaagtgtgctttaaagaaaaatattttccccacaagagaaatttaaataaagaattttatttgtttatggtttgttttagtatgtttttgtgtccatgatgagattaaattttttatctgcttcctg

SEQ ID NO: 12735 - protein, 392 aa, Homo sapiens
MRERHDTGACAEPRVGLLFRLKGRCRGGRKMELGSCLEGGREAAEEEGEPEVKKRRLLCVEFASVASCDAAVAQCFLAENDWEMERALNSYFEPPVEESALERRPETISEPKTYVDLTNEETTDSTTSKISPSEDTQQENGSMFSLITWNIDGLDLNNLSERARGVCSYLALYSPDVIFLQEVIPPYYSYLKKRSSNYEIITGHEEGYFTAIMLKKSRVKLKSQEIIPFPSTKMMRNLLCVHVNVSGNELCLMTSHLESTRGHAAERMNQLKMVLKKMQEAPESATVIFAGDTNLRDREVTRCGGLPNNIVDVWEFLGKPKHCQYTWDTQMNSNLGITAACKLRFDRIFFRAAAEEGHIIPRSLDLLGLEKLDCGRFPSDHWGLLCNLDIIL

SEQ ID NO: 12736 - DNA, 1507 bp, Homo sapiens
aaaggttcacagtggaggtgacatctgggggtaggtcgtgcttgctaaaccgtcgtctttggggacagggttactgctttaatacttcttttgatccggagggataggcatagtgctgattttacagtttcagtttagtaaatatataccatttgacagaacaatctgctgattttattattaaagttcagtattaatagtcagtggacagttttaatgactgtttgtcctgctgcaggtgaacgtgtcaggaaatgagctttgccttatgacatcccatttggagagcaccagagggcatgctgcggaacgaatgaatcagttaaaaatggttttaaagaaaatgcaagaggctccagagtcagctacagttatatttgcaggagatacaaatctaagggatcgagaggttaccagatgtggtggtttacccaacaacattgtggatgtctgggagtttttgggcaaacctaaacattgccagtatacatgggatacacaaatgaactctaatcttggaataactgctgcttgtaaacttcgttttgatcgaatatttttcagagcagcagcagaagagggacacattattccccgaagtttggaccttcttggattagaaaaactggactgtggtagatttcctagtgatcactggggtcttctgtgcaacttagatataatattgtaaaatgcttttcaagtgtgggttttgccctgattgttgcaaatacaatttccaccttctggaaaggtaggtttgctgtggaggaaataatgtactagatcattgtcacagaaaaaccaactatgatttatggttgtgttttcagaattcaacattaaagattaatgtttatttaaacgaacacattcctgcattcaggatgtgaggccatttaataaaaagggcacaaagcctgtcagagttttcaacggtgcttatagctgccagctggattccaaacaggtaccacattgtctctgagctaatgtttatatttttccattcaggcaccgaaatagttaatatttgaaataagtcttcaaaagaaaacataagagattattgagttcttgggactggatcctttatttcataagttcagatcatcttaaatgaaaatgccatgattatctgcagttaagtagatgacagctattctacatcagacttgatttttgtcagctaattacataattggtaagctataattgaaaccttatggcttaaaattccttaactcctttttgattcatgtttgtagtcatgttgtcaacagaggcaaagttaagcttgatgatggttaaaatcggtttgatagcaccatgggacatttttctaacaaaaataaatgcatgaagagacatagccttttagttttgctaattgtgaaatggaaatgctttacaggaagtaaatgcaaattacttttaagtgtgctttaaagaaaaatattttccccacaagagaaatttaaataaagaattttatttgtttatggtt

SEQ ID NO: 12737 - protein, 140 aa, Homo sapiens [sequence omitted]

SEQ ID NO: 12738 - DNA, 2141 bp, Homo sapiens
ctgaactcctacttcgagcctccggtggaggagagcgccttggaacgccgacctgaaaccatctctgagcccaagacctagtaagtgatgaggggagcgggagccagtccgcacggaggcagtttgataccaggtagccctgcgcgtcctgggacctgccgtggagctgggcggacgatgctgaggcagatctccaagctgcgtagccagaggagcagggcttgcgttgctgctgctgcgcggagttgcgccccagcagcggatctaacactgcaccagactgtcgcttcgaacgtgatttggggtccagggaggaaaagatggaaatgtaatgtttaactcaaatgaaaggaaataagtaagcgagaggtttgaaacaaatgaacgaaggctaaaccttctatcgaaaaatggcaacttggaagtctccttgcttcctgtattgtttatttattctaggccctaggctgaccggccagaataacagtgttgacctaaccaatgaagaaacaactgattccaccacttctaaaatcagcccatctgaagatactcagcaagaaaatggcagcatgttctctctcattacctggaatattgatggattagatctaaacaatctgtcagagagggctcgaggggtgtgttcctacttagctttgtacagcccagatgtgatatttctacaggaagttattcccccatattatagctacctaaagaagagatcaagtaattatgagattattacaggtcatgaagaaggatatttcacagctataatgttgaagaaatcaagagtgaaattaaaaagccaagagattattccttttccaagtaccaaaatgatgagaaaccttttatgtgtgcatgtgaacgtgtcaggaaatgagctttgccttatgacatcccatttggagagcaccagagggcatgctgcggaacgaatgaatcagttaaaaatggttttaaagaaaatgcaagaggctccagagtcagctacagttatatttgcaggagatacaaatctaagggatcgagaggttaccagatgtggtggtttacccaacaacattgtggatgtctgggagtttttgggcaaacctaaacattgccagtatacatgggatacacaaatgaactctaatcttggaataactgctgcttgtaaacttcgttttgatcgaatatttttcagagcagcagcagaagagggacacattattccccgaagtttggaccttcttggattagaaaaactggactgtggtagatttcctagtgatcactggggtcttctgtgcaacttagatataatattgtaaaatgcttttcaagtgtgggttttgccctgattgttgcaaatacaatttccaccttctggaaaggtaggtttgctgtggaggaaataatgtactagatcattgtcacagaaaaaccaactatgatttatggttgtgttttcagaattcaacattaaagattaatgtttatttaaacgaacacattcctgcattcaggatgtgaggccatttaataaaaagggcacaaagcctgtcagagttttcaacggtgcttatagctgccagctggattccaaacaggtaccacattgtctctgagctaatgtttatatttttccattcaggcaccgaaatagttaatatttgaaataagtcttcaaaagaaaacataagagattattgagttcttgggactggatcctttatttcataagttcagatcatcttaaatgaaaatgccatgattatctgcagttaagtagatgacagctattctacatcagacttgatttttgtcagctaattacataattggtaagctataattgaaaccttatggcttaaaattccttaactcctttttgattcatgtttgtagtcatgttgtcaacagaggcaaagttaagcttgatgatggttaaaatcggtttgatagcaccatgggacatttttctaacaaaaataaatgcatgaagagacatagccttttagttttgctaattgtgaaatggaaatgctttacaggaagtaaatgcaaattacttttaagtgtgctttaaagaaaaatattttccccacaagagaaatttaaataaagaattttatttgtttatggtt

SEQ ID NO: 12739 - protein, 304 aa, Homo sapiens; identical to SEQ ID NO: 12733

SEQ ID NO: 12740 - DNA, 2076 bp, Homo sapiens
gcacccaccgccccggcggctcccttgcggcgcagctgcaccagttttccgagagcagcgcatttccccgccgggcggttgatgcgggagcgccatgacacaggcgcctgcgcagagccgcgcgttggcctcctgttccgcttaaaggggcggtgcagaggcggcaggaagatggagttggggagttgcctggagggcgggagggaggcggcggaggaagagggcgagcctgaggtgaaaaagcggcgacttctgtgtgtggagtttgcctcggtcgcaagctgcgatgccgcagtggctcagtgcttcctggccgagaacgactgggagatggaaagggctctgaactcctacttcgagcctccggtggaggagagcgccttggaacgccgacctgaaaccatctctgagcccaagacctatgttgacctaaccaatgaagaaacaactgattccaccacttctaaaatcagcccatctgaagatactcagcaagaaaatggcagcatgttctctctcattacctggaatattgatggattagatctaaacaatctgtcagagagggctcgaggggtgtgttcctacttagctttgtacagcccagatgtgatatttctacaggaagttattcccccatattatagctacctaaagaagagatcaagtaattatgagattattacaggtcatgaagaaggatatttcacagctataatgttgaagaaatcaagagtgaaattaaaaagccaagagattattccttttccaagtaccaaaatgatgagaaaccttttatgtgtgcatgtgaacgtgtcaggaaatgagctttgccttatgacatcccatttggagagcaccagagggcatgctgcggaacgaatgaatcagttaaaaatggttttaaagaaaatgcaagaggctccagagtcagctacagttatatttgcaggagatacaaatctaagggatcgagaggttaccagatgtggtggtttacccaacaacattgtggatgtctgggagtttttgggcaaacctaaacattgccagtatacatgggatacacaaatgaactctaatcttggaataactgctgcttgtaaacttcgttttgatcgaatatttttcagagcagcagcagaagagggacacattattccccgaagtttggaccttcttggattagaaaaactggactgtggtagatttcctagtgatcactggggtcttctgtgcaacttagatataatattgtaaaatgcttttcaagtgtgggttttgccctgattgttgcaaatacaatttccaccttctggaaaggtaggtttgctgtggaggaaataatgtactagatcattgtcacagaaaaaccaactatgatttatggttgtgttttcagaattcaacattaaagattaatgtttatttaaacgaacacattcctgcattcaggatgtgaggccatttaataaaaagggcacaaagcctgtcagagttttcaacggtgcttatagctgccagctggattccaaacaggtaccacattgtctctgagctaatgtttatatttttccattcaggcaccgaaatagttaatatttgaaataagtcttcaaaagaaaacataagagattattgagttcttgggactggatcctttatttcataagttcagatcatcttaaatgaaaatgccatgattatctgcagttaagtagatgacagctattctacatcagacttgatttttgtcagctaattacataattggtaagctataattgaaaccttatggcttaaaattccttaactcctttttgattcatgtttgtagtcatgttgtcaacagaggcaaagttaagcttgatgatggttaaaatcggtttgatagcaccatgggacatttttctaacaaaaataaatgcatgaagagacatagccttttagttttgctaattgtgaaatggaaatgctttacaggaagtaaatgcaaattacttttaagtgtgctttaaagaaaaatattttccccacaagagaaatttaaataaagaattttatttgtttatggtt

SEQ ID NO: 12741 - protein, 392 aa, Homo sapiens; identical to SEQ ID NO: 12735

SEQ ID NO: 12742 - DNA, 2090 bp, Homo sapiens
ggagttggggagttgcctggagggcgggagggaggcggcggaggaagagggcgagcctgaggtgaaaaagcggcgacttctgtgtgtggagtttgcctcggtcgcaagctgcgatgccgcagtggctcagtgcttcctggccgagaacgactgggagatggaaagggctctgaactcctacttcgagcctccggtggaggagagcgccttggaacgccgacctgaaaccatctctgagcccaagacctagtaagtgatgaggggagcgggagccagtccgcacggaggcagtttgataccaggtagccctgcgcgtcctgggacctgccgtggagctgggcggacgatgctgaggcagatctccaagctgcgtagccagaggagcagggcttgcgttgctgctgctgcgcggagttgcgccccagcagcggatctaacactgcaccagactgtcgcttcgaacgtgatttggggtccagggaggaaaagatggaaatgtaatgtttaactcaaatgaaaggaaataagtaagcgagaggtttgaaacaaatgaacgaaggctaaaccttctatcgaaaaatggcaacttggaagtctccttgcttcctgtattgtttatttattctaggccctaggctgaccggccagaataacaggtttgttgttgttgttatttttttttaatgcacacctactcctgttatttcagtgcccctctccagttcctgcacttaaaaagtgtagctgccttacaaggccctctactatttggctccataacttagaacctgcctttccaggttccaggcctatcaaacttttacttttttccaacgggtcattttctcctgtctttgaaacttcgtaaagatctttattacctgtgcctggaatttttttcttttcccttccttgctaatatttgtcttaaagccccaagctgagacatgatttatctctaggaagcttttcctgatgtcctaagtctgggtaagagtccccttttaggtactcttatagcatcctgcatgacccctgttacaataccttagtccgtattataattgctgttcattattttatgtctcctactagactgcacatctagtaaggagtatctgttttgtacattgttaatttcccaaagtctgacacaacatttgacacataataagctcccaataaatatttactgaatgtataaaattctcccagctatatgtacaacctgtaaaattgactgttcatagtggagactttattttccctttggtcttttcagctacactggcttacagatgtgataagatattttctttaggttcctttctctgtcttgcctcttgttggggaattgtttactcacccacagtgatttgtctctggctcccgttttactaaccagagcaagttggactaggaggtgtttgcctagctcaaactggccagtcagatcctctccttggtttcagaattaggaccaagagagtcaagtctgagtcttcctatggagctggaactgtaacatgttaacttagcacctgtgaggattcatacatatctttttttgtgtacagagaagctgagaacagaggtctgcagagagacaatgaagcagagggaagttgaagtgtaggattgagagaaagcccttaactgcccttccttaaacatggctgtatttctgtaccaggctctgtgacatgtttgtttccttataaattctcctgttttggtcaaaccaacctgagttaatgtctgttggttgcaacagactatattgtaaccaataaatagtaacaaaataagtggatttcctgtaataggccctcagaaaagatgcggatcaagctgatcaatggtgtcatggctattaggattctcttaccccggaatggtaaattggcaaaaacaagcaaaggtgttgattaggctgtggtctcttgtctctcagaactcaggtcaagtatgaatgagagtgaggttttaaagtttagtttgctcaagagagaaaaatggggaaggggcaaacttcagcgtgtttctaaggcctgtgacctgattagatttttgatgttggctttagcaaa

SEQ ID NO: 12743 - protein, 30 aa, Homo sapiens
MERALNSYFEPPVEESALERRPETISEPKT

SEQ ID NO: 12744 - DNA, 743 bp, Homo sapiens
gcatgcgcgcttcgtcacaagggtgcgaggaaagtcagtgagcaaatcgcggaccaccggggctgccagctcgcctgactcccggcctcttgcgctcctaggggcggagaagggtgcgggctcttcgccctttgtgtcctccttctttcactaacttctggactttccagctcttccgaagttcgttcttgcgcaaagcccaaaggctggaaaaccgtccacgatgaccagcatgactcagtctctgcgggaggtgataaaggccatgaccaaggctcgcaattttgagagagttttgggaaagattactcttgtctctgctgctcctgggaaagtgatttgtgaaatgaaagtagaagaagagcataccaatgcaataggcactctccacggcggtttgacagccacgttagtagataacatatcaacaatggctctgctatgcacggaaaggggagcacccggagtcagtgtcgatatgaacataacgtacatgtcacctgcaaaattaggagaagatatagtgattacagcacatgttctgaagcaaggaaaaacacttgcatttacctctgtggatctgaccaacaaggccacaggaaaattaatagcacaaggaagacacacaaaacacctgggaaactgagagaacagcagaatgacctaaagaaacccaacaatgaatatcaagtatagatttgactcaaacaattgtaatttttgaaataaactagcaaaaccag

SEQ ID NO: 12745 - protein, 140 aa, Homo sapiens; identical to SEQ ID NO: 1268

SEQ ID NO: 12746 - DNA, 1869 bp, Homo sapiens
gcatgcgcgcttcgtcacaagggtgcgaggaaagtcagtgagcaaatcgcggaccaccggggctgccagctcgcctgactcccggcctcttgcgctcctaggggcggagaagggtgcgggctcttcgccctttgtgtcctccttctttcactaacttctggactttccagctcttccgaagttcgttcttgcgcaaagcccaaaggctggaaaaccgtccacgatgaccagcatgactcagtctctgcgggaggtgataaaggccatgaccaaggctcgcaattttgagagagttttgggaaagattactcttgtctctgctgctcctgggaaagtgatttgtgaaatgaaagtagaagaagagcataccaatgcaataggcactctccacggcggtttgacagccacgttagtagataacatatcaacaatggctctgctatgcacggaaaggggagcacccggagtcagtgtcgatatgaacataacgtacatgtcacctgcaaaattaggagaagatatagtgattacagcacatgttctgaagcaaggaaaaacacttgcatttacctctgtggatctgaccaacaaggccacaggaaaattaatagcacaaggaagacacacaaaacacctgggaaactgagagaacagcagaatgacctaaagaaacccaacaatgaatatcaagtatagatttgactcaaacaattgtaatttttgaaataaactagcaaaaccagaagcagctagaaatattcttggaggaaaaggacctggatatcaagtagggtaaaggtgggggtgtcttttttcactttaagcatcttgttttctaatcatgtgtgataattgggtgaaaaattcttagctcaaagtgttttaaaaacaggtaaagcaaagaaactagcaggaccactctcagttaagattaaaactaaagtccagtgttaagctaaaggagaaatagaaattaatggttctaattctgtttgggctgctaggaacaacagaaatttttcatggttctagaagctggaaagtcctgggtcaaggcccagcagatcctgttaggtgagggcccgcttcctggctcatagatggtgccttctcactgtgtggtggaaggggcaagtgagccctctgggttctcgtttttgaaatggagtctcgctctgttgcccaggctggagtacagcagcacgatctcggctcactgcaatctctgccccctgggttcaagtgattctcctgcctcagcctcccaagtagctgggactataggcatgtgccatcacacctagctaatttttgtagttttttgtagaaacagggttcaccatgttggccaggctggtctcgaactcgtgacctcaggtgatccgcctgccttggccccccaaagtgctgggattacaggtgtgagccaatgtgcccagcctgggttctcttttgtaagggcacttactccaatcttgagggttctgccctcgtgatctaataacttcccaaagacccccacctgctaatatcaccttgggggttgggattttaacatacaaatttaggggaaacacatggagaccacagcaatggccaatccttagcgaatcttaggtccttcccagatctaaaatgccaagctacacttgcatttcctttttttaagattatgaaacttcaaaatatatgaactacagcccatattgaaaaataaaatagattgagccatatgcctaaaaaagacctcaagaaaagtttgaggctaagcatgttagtgttacaggaaatggtccaatagagggggaagaaaaaaagcatgctactagccccttttcttgtaccgagaataaaaccatgcagatctca

SEQ ID NO: 12747 - protein, 140 aa, Homo sapiens; identical to SEQ ID NO: 1268

SEQ ID NO: 12748 - DNA, 1637 bp, Homo sapiens
aagggtgcgaggaaagtcagtgagcaaatcgcggaccaccggggctgccagctcgcctgactcccggcctcttgcgctcctaggggcggagaagggtgcgggctcttcgccctttgtgtcctccttctttcactaacttctggactttccagctcttccgaagttcgttcttgcgcaaagcccaaaggctggaaaaccgtccacgatgaccagcatgactcagtctctgcgggaggtgataaaggccatgaccaaggctcgcaattttgagagagttttgggaaagatatagtgattacagcacatgttctgaagcaaggaaaaacacttgcatttacctctgtggatctgaccaacaaggccacaggaaaattaatagcacaaggaagacacacaaaacacctgggaaactgagagaacagcagaatgacctaaagaaacccaacaatgaatatcaagtatagatttgactcaaacaattgtaatttttgaaataaactagcaaaaccagaagcagctagaaatattcttggaggaaaaggacctggatatcaagtagggtaaaggtgggggtgtcttttttcactttaagcatcttgttttctaatcatgtgtgataattgggtgaaaaattcttagctcaaagtgttttaaaaacaggtaaagcaaagaaactagcaggaccactctcagttaagattaaaactaaagtccagtgttaagctaaaggagaaatagaaattaatggttctaattctgtttgggctgctaggaacaacagaaatttttcatggttctagaagctggaaagtcctgggtcaaggcccagcagatcctgttaggtgagggcccgcttcctggctcatagatggtgccttctcactgtgtggtggaaggggcaagtgagccctctgggttctcgtttttgaaatggagtctcgctctgttgcccaggctggagtacagcagcacgatctcggctcactgcaatctctgccccctgggttcaagtgattctcctgcctcagcctcccaagtagctgggactataggcatgtgccatcacacctagctaatttttgtagttttttgtagaaacagggttcaccatgttggccaggctggtctcgaactcgtgacctcaggtgatccgcctgccttggccccccaaagtgctgggattacaggtgtgagccaatgtgcccagcctgggttctcttttgtaagggcacttactccaatcttgagggttctgccctcgtgatctaataacttcccaaagacccccacctgctaatatcaccttgggggttgggattttaacatacaaatttaggggaaacacatggagaccacagcaatggccaatccttagcgaatcttaggtccttcccagatctaaaatgccaagctacacttgcatttcctttttttaagattatgaaacttcaaaatatatgaactacagcccatattgaaaaataaaatagattgagccatatgcctaaaaaagacctcaagaaaagtttgaggctaagcatgttagtgttacaggaaatggtccaatagagggggaagaaaaaaagcatgctactagccccttttcttgtaccgagaataaaaccatgcagatctca

SEQ ID NO: 12749 - protein, 67 aa, Homo sapiens
MVPSHCVVEGASEPSGFSFLKWSLALLPRLEYSSTISAHCNLCPLGSSDSPASASQVAGTIGMCHHT

SEQ ID NO: 12750 - DNA, 3257 bp, Homo sapiens
tactaggatttagtcattttgatgcagagcatttcctgatcaactgctgttgtggagtgtactgtccaatagaattctctacaattaaggaaatgttctgtatctcaagagattgttcttaatggtggccagtagtcatgtgaccgttgagcatttgaaatgtggctagtgctactgaagaatggaattgtaaattgcttttaatctaaattttgcctgtgatattattggctgtgggtttgccaaaatttgtttttttaaagaggaaaagataacggactgttggctgctttattggacagcacagctagcatatagatgcagataggtagtataacttgtttgtagtttaatataaatgttgtattttgtaattaggccaaatttgagtttcatcatggtgactatgaaaaacagtttctgcatgtactgagccgcaaggacaagactggaatcgttgtcaacaatcctaaccagtcagtgtttctcttcattgacagacagcacttgcagactccaaaaaacaaagctacaatcttcaagttatgcagcatctgcctctacctgccacaggaacagctcacccactgggcagttggcaccatagaggatcacctccgtccttatatgccagagtagagtactgaccagcaaaatggagaagatcagagaatgcagcagcagttttttttcttgttttcttaccactttattctttcagagtttaaagaaaatggactcatgcacagaacactatgcattttgaaacttgttcatcctggatttttttaaatcatttttatctcagaacttaaacaaaaattagatgtcgtgcacggactgtgtgaaagaagatgctttgcatatttgctgcactgcatcagtatcttactaaaaatgtgaaatgaaaggactattgtacactgaaatgcttaaatgtatctgaaagcacaaggtgatactcatttttatggtcttcccatttgtgctggtttttgcctctttgacatctgtcatcagtatttagagggtgagaagtgaatgtaacaggtataaataacatttttaaaaacaataactttgctataatcacagttgttccagagcactgtcagatacattctaatgaccagaactggtttaaaaaaagaaaatacaaccatgggaaagaaatcttaaatgaaaaacgcatctcattgtaggcatttttgcctcatattttactgggccatgtttgtttcctggtactcatgtattttttttttccagatctctttccccaagttgctattgtaagagtattctgctgcgtgtggatgcagttatacacattaaagcagatctggagtctgaagtagctataaagcagctataaaacagaaatacatgcatagctgcagaaaccatgataggtagaggacttttcttttggttttgttttgttttgttttgttttgtttttggttttacagagaagagatttttattacaaagaaaaaaattccagtgaattgtgcagaaatgctggtttttacaccatcctaaagaaaaactttacaagggtgttttggagtagaaaaaaggttataaagttggaatcttaaattgtaaaattaaccattgagtgtcaaagttctaaaagcagaactcattttgtgcaatgaacataaggaaagactactgtataggtttttttttttttctccttttaaatgaagaaaagctttgcttaagggttgcatacttttattggagtaaatctgaatgatcctactcctttggagtaaaactagtgcttaccagtttccaattgtatttagcttctggttggaatttgaaaaaaaaagaaaaaaagaaaaagaaaacctaaataaaataggtgaaagttccctgactattcaggtgaatacacaaagtttgaagtgttaactttttctttccatttcactgatgttactggtcaccttagagaattatttcatagtctgtggctaaatagtaaattcagaagaaaaatacctggcaattgagtgtgtaacttcaacaagaacaggaatcaagaacatactgtcagctttcaacagttagcaacctggccttatgccttgcttcatgggaaagggccattcttaaatttcaaaatgctttcatgtgtcctcttatttaaaaattagaatctatttgaaataacattttgaatgtttattataaccaggtactcttctaagctcttgtcttaacctctcaacctttggtggaaatagatgcagaggttaagtaacttgctcaagctcagatcataagtagtggaggatttaaaaccaggctggctggctcttaaggcctatgctcttaatttaccatgttgaattaatttaccatattgaattacacttatgttcaccaagttaggcattttggcagccattgtttacgtttttattttggaataatttagaaaagttaccagagtaatatgaaagctgttgtgtaatctttaccctcatttttattattttgccacatttttttcattttctctgtacacttatacctgtgagctatttgagtttgttgcacactttgtgcttccttaccccttccttagtacttcggcatatgttccaagtacaagaatatttcatataactagagtaaaattaccaaactcagggaatgttgatactctttatcatccatattcgttttgttgtcccagtatccttggtagcttgttttagatccccccctctagagtacaggatcattgaatttagttgttctcagttgtctttaatgtggaacagttccttagcctttatgtgttccatgacctctatgttttttggagtacagggcaatttttcttgtaaattgttactcattttgcatttgaattgtttattcatgcttaacgcccttctcaagtatactctccatctgctcttcattgatgttacttttgagcgcctggtcaaggtgtcctggttttgccctatgtgtggtacttactactagcaatctctgggaagcaatgtgcaaataccctgttcctttatcaggagctcccttggcgattctttccagactaaaacccaaaccagtctttaactatgatggttacaaaatagtgattttccaaatctaatgctttgtccatttacagcatttgttgtaagagagtgttctatctctgccatttattatctacctaaacactatggcctcatattttttccctccaaatcataatttgc

SEQ ID NO: 12751 - protein, 113 aa, Homo sapiens [sequence omitted]

SEQ ID NO: 12752 - DNA, 3785 bp, Homo sapiens
ggatcacctgaggtcaggagttcgagaccagcctggctgacgtggtgaaaccccgtctctattaaaaatacaaaaaatattagcggggcatggtggcacacacttgtaatcccagccattcgggaggctaagtcacgagaatcgcttgaacctggtaggcggaatttgcagtaagcggagattgcaccattgcactccagtgtgggccacagagagggactctgtctccaaaaataaaaaattacatcatgagctattcagattataaactattatgtttacttcctaagatataaaatgatatatggtagatcttttgtacttataaaatgtttttataggggaaccctataatttgtgacatggcttgatgtagctgtttctttaaaagtaaacttttttttttttaatcattttataggatgtaattggctgtactcaggagatggatttcattctttggcctcggaatgatattgaaaaaatcgtctgtctcctgttttctaggtggaaagaatctgatgagccttttaggcctgttcaggtattttggtctaaagtgtgatgagtatttcaatatgtgaaaactactagaatataatagggtctaacttgagaaattctttgggaaaatggtttctgatagttttatttcacgagtctcccctatttagaatattgtgatgcaagagaagaaagcgtttggattatagaatctcttgacagtgtggtggttccacctgcccagtgtggctttgaaattatgactagagaaaatcttttaaagtggacatttactgatttatagaggggcccacagatgagcttctgagatctgtaactcttgaagccttcaccacacatccttctaaaaccgtatatttaactgctgcttcccaaaggaatgccaaatttgagtttcatcatggtgactatgaaaaacagtttctgcatgtactgagccgcaaggacaagactggaatcgttgtcaacaatcctaaccagtcagtgtttctcttcattgacagacagcacttgcagactccaaaaaacaaagctacaatcttcaagttatgcagcatctgcctctacctgccacaggaacagctcacccactgggcagttggcaccatagaggatcacctccgtccttatatgccagagtagagtactgaccagcaaaatggagaagatcagagaatgcagcagcagttttttttcttgttttcttaccactttattctttcagagtttaaagaaaatggactcatgcacagaacactatgcattttgaaacttgttcatcctggatttttttaaatcatttttatctcagaacttaaacaaaaattagatgtcgtgcacggactgtgtgaaagaagatgctttgcatatttgctgcactgcatcagtatcttactaaaaatgtgaaatgaaaggactattgtacactgaaatgcttaaatgtatctgaaagcacaaggtgatactcatttttatggtcttcccatttgtgctggtttttgcctctttgacatctgtcatcagtatttagagggtgagaagtgaatgtaacaggtataaataacatttttaaaaacaataactttgctataatcacagttgttccagagcactgtcagatacattctaatgaccagaactggtttaaaaaaagaaaatacaaccatgggaaagaaatcttaaatgaaaaacgcatctcattgtaggcatttttgcctcatattttactgggccatgtttgtttcctggtactcatgtattttttttttccagatctctttccccaagttgctattgtaagagtattctgctgcgtgtggatgcagttatacacattaaagcagatctggagtctgaagtagctataaagcagctataaaacagaaatacatgcatagctgcagaaaccatgataggtagaggacttttcttttggttttgttttgttttgttttgttttgtttttggttttacagagaagagatttttattacaaagaaaaaaattccagtgaattgtgcagaaatgctggtttttacaccatcctaaagaaaaactttacaagggtgttttggagtagaaaaaaggttataaagttggaatcttaaattgtaaaattaaccattgagtgtcaaagttctaaaagcagaactcattttgtgcaatgaacataaggaaagactactgtataggtttttttttttttctccttttaaatgaagaaaagctttgcttaagggttgcatacttttattggagtaaatctgaatgatcctactcctttggagtaaaactagtgcttaccagtttccaattgtatttagcttctggttggaatttgaaaaaaaaagaaaaaaagaaaaagaaaacctaaataaaataggtgaaagttccctgactattcaggtgaatacacaaagtttgaagtgttaactttttctttccatttcactgatgttactggtcaccttagagaattatttcatagtctgtggctaaatagtaaattcagaagaaaaatacctggcaattgagtgtgtaacttcaacaagaacaggaatcaagaacatactgtcagctttcaacagttagcaacctggccttatgccttgcttcatgggaaagggccattcttaaatttcaaaatgctttcatgtgtcctcttatttaaaaattagaatctatttgaaataacattttgaatgtttattataaccaggtactcttctaagctcttgtcttaacctctcaacctttggtggaaatagatgcagaggttaagtaacttgctcaagctcagatcataagtagtggaggatttaaaaccaggctggctggctcttaaggcctatgctcttaatttaccatgttgaattaatttaccatattgaattacacttatgttcaccaagttaggcattttggcagccattgtttacgtttttattttggaataatttagaaaagttaccagagtaatatgaaagctgttgtgtaatctttaccctcatttttattattttgccacatttttttcattttctctgtacacttatacctgtgagctatttgagtttgttgcacactttgtgcttccttaccccttccttagtacttcggcatatgttccaagtacaagaatatttcatataactagagtaaaattaccaaactcagggaatgttgatactctttatcatccatattcgttttgttgtcccagtatccttggtagcttgttttagatccccccctctagagtacaggatcattgaatttagttgttctcagttgtctttaatgtggaacagttccttagcctttatgtgttccatgacctctatgttttttggagtacagggcaatttttcttgtaaattgttactcattttgcatttgaattgtttattcatgcttaacgcccttctcaagtatactctccatctgctcttcattgatgttacttttgagcgcctggtcaaggtgtcctggttttgccctatgtgtggtacttactactagcaatctctgggaagcaatgtgcaaataccctgttcctttatcaggagctcccttggcgattctttccagactaaaacccaaaccagtctttaactatgatggttacaaaatagtgattttccaaatctaatgctttgtccatttacagcatttgttgtaagagagtgttctatctctgccatttattatctacctaaacactatggcctcatattttttccctccaaatcataatttgc

SEQ ID NO: 12753 - protein, 113 aa, Homo sapiens [sequence omitted]

SEQ ID NO: 12754 - DNA, 3971 bp, Homo sapiens
aacaagcactgacaatacatagcaatagtgaaatctgaaataactaagaattaggtactacagccatggagctggctgggtaaaatctaattggatatttcagtttcattcacctaccctgttttggtgtttggttttggttttggttttggtgagttttttttttttttttttttggaaagcaaggatcacacttccccctccctgttccttaatcccttttctaaaaaggggggaaaatccggatggattttagggattggtctggtgtcagctgtgttttattgcacacctaaatcctgattataggcttttcatttctccgcaaagcctttattttggcagttaagccaaatgtgttttccagaaagttagttattttctcctctttctttcctttctttcctccctttttcccgtctgaccccaaacgttattgtccaaacatgactggacagcagcttttgtttcttgaccctgtaatatgacagtctgctaatattgacagaaggtgcagtttttgggttatagtcgtgattttcgctaatcaatcatattagcaggaaaaaaaatgacttgtttctgttgtacttgagtcttaagaaaaagtgcccatagtttagtgacaatttccaaaggctttagtaccacctgtatttcaaaatgggggacccaaactcccggaagaaacaagctctgaacagactacgtgctcagcttagaaagaaaaaagaatctctagctgaccagtttgacttcaagatgtatattgcctttgtattcaaggagaagaagaaaaagtcagcactttttgaagtgtctgaggttataccagtcatgacaaataattatgaagaaaatatcctgaaaggtgtgcgagattccagctattccttggaaagttccctagagcttttacagaaggatgtggtacagctccatgctcctcgatatcagtctatgagaagggatgtaattggctgtactcaggagatggatttcattctttggcctcggaatgatattgaaaaaatcgtctgtctcctgttttctaggtggaaagaatctgatgagccttttaggcctgttcaggccaaatttgagtttcatcatggtgactatgaaaaacagtttctgcatgtactgagccgcaaggacaagactggaatcgttgtcaacaatcctaaccagtcagtgtttctcttcattgacagacagcacttgcagactccaaaaaacaaagctacaatcttcaagttatgcagcatctgcctctacctgccacaggaacagctcacccactgggcagttggcaccatagaggatcacctccgtccttatatgccagagtagagtactgaccagcaaaatggagaagatcagagaatgcagcagcagttttttttcttgttttcttaccactttattctttcagagtttaaagaaaatggactcatgcacagaacactatgcattttgaaacttgttcatcctggatttttttaaatcatttttatctcagaacttaaacaaaaattagatgtcgtgcacggactgtgtgaaagaagatgctttgcatatttgctgcactgcatcagtatcttactaaaaatgtgaaatgaaaggactattgtacactgaaatgcttaaatgtatctgaaagcacaaggtgatactcatttttatggtcttcccatttgtgctggtttttgcctctttgacatctgtcatcagtatttagagggtgagaagtgaatgtaacaggtataaataacatttttaaaaacaataactttgctataatcacagttgttccagagcactgtcagatacattctaatgaccagaactggtttaaaaaaagaaaatacaaccatgggaaagaaatcttaaatgaaaaacgcatctcattgtaggcatttttgcctcatattttactgggccatgtttgtttcctggtactcatgtattttttttttccagatctctttccccaagttgctattgtaagagtattctgctgcgtgtggatgcagttatacacattaaagcagatctggagtctgaagtagctataaagcagctataaaacagaaatacatgcatagctgcagaaaccatgataggtagaggacttttcttttggttttgttttgttttgttttgttttgtttttggttttacagagaagagatttttattacaaagaaaaaaattccagtgaattgtgcagaaatgctggtttttacaccatcctaaagaaaaactttacaagggtgttttggagtagaaaaaaggttataaagttggaatcttaaattgtaaaattaaccattgagtgtcaaagttctaaaagcagaactcattttgtgcaatgaacataaggaaagactactgtataggtttttttttttttctccttttaaatgaagaaaagctttgcttaagggttgcatacttttattggagtaaatctgaatgatcctactcctttggagtaaaactagtgcttaccagtttccaattgtatttagcttctggttggaatttgaaaaaaaaagaaaaaaagaaaaagaaaacctaaataaaataggtgaaagttccctgactattcaggtgaatacacaaagtttgaagtgttaactttttctttccatttcactgatgttactggtcaccttagagaattatttcatagtctgtggctaaatagtaaattcagaagaaaaatacctggcaattgagtgtgtaacttcaacaagaacaggaatcaagaacatactgtcagctttcaacagttagcaacctggccttatgccttgcttcatgggaaagggccattcttaaatttcaaaatgctttcatgtgtcctcttatttaaaaattagaatctatttgaaataacattttgaatgtttattataaccaggtactcttctaagctcttgtcttaacctctcaacctttggtggaaatagatgcagaggttaagtaacttgctcaagctcagatcataagtagtggaggatttaaaaccaggctggctggctcttaaggcctatgctcttaatttaccatgttgaattaatttaccatattgaattacacttatgttcaccaagttaggcattttggcagccattgtttacgtttttattttggaataatttagaaaagttaccagagtaatatgaaagctgttgtgtaatctttaccctcatttttattattttgccacatttttttcattttctctgtacacttatacctgtgagctatttgagtttgttgcacactttgtgcttccttaccccttccttagtacttcggcatatgttccaagtacaagaatatttcatataactagagtaaaattaccaaactcagggaatgttgatactctttatcatccatattcgttttgttgtcccagtatccttggtagcttgttttagatccccccctctagagtacaggatcattgaatttagttgttctcagttgtctttaatgtggaacagttccttagcctttatgtgttccatgacctctatgttttttggagtacagggcaatttttcttgtaaattgttactcattttgcatttgaattgtttattcatgcttaacgcccttctcaagtatactctccatctgctcttcattgatgttacttttgagcgcctggtcaaggtgtcctggttttgccctatgtgtggtacttactactagcaatctctgggaagcaatgtgcaaataccctgttcctttatcaggagctcccttggcgattctttccagactaaaacccaaaccagtctttaactatgatggttacaaaatagtgattttccaaatctaatgctttgtccatttacagcatttgttgtaagagagtgttctatctctgccatttattatctacctaaacactatggcctcatattttttccctccaaatcataatttgc

SEQ ID NO: 12755 - protein, 229 aa, Homo sapiens; identical to SEQ ID NO: 1270

SEQ ID NO: 12756 - DNA, 3848 bp, Homo sapiens
aacaagcactgacaatacatagcaatagtgaaatctgaaataactaagaattaggtactacagccatggagctggctgggtaaaatctaattggatatttcagtttcattcacctaccctgttttggtgtttggttttggttttggttttggtgagttttttttttttttttttttggaaagcaaggatcacacttccccctccctgttccttaatcccttttctaaaaaggggggaaaatccggatggattttagggattggtctggtgtcagctgtgttttattgcacacctaaatcctgattataggcttttcatttctccgcaaagcctttattttggcagttaagccaaatgtgttttccagaaagttagttattttctcctctttctttcctttctttcctccctttttcccgtctgaccccaaacgttattgtccaaacatgactggacagcagcttttgtttcttgaccctgtaatatgacagtctgctaatattgacagaaggtgcagtttttgggttatagtcgtgattttcgctaatcaatcatattagcaggaaaaaaaatgacttgtttctgttgtacttgagtcttaagaaaaagtgcccatagtttagtgacaatttccaaaggctttagtaccacctgtatttcaaaatgggggacccaaactcccggaagaaacaagctctgaacagactacgtgctcagcttagaaagaaaaaagaatctctagctgaccagtttgacttcaagatgtatattgcctttgtattcaaggagaagaagaaaaagtcagcactttttgaagtgtctgaggttataccagtcatgacaaataattatgaagaaaatatcctgaaaggtgtgcgagattccagctattccttggaaagttccctagagcttttacagaaggatgtggtacagctccatgctcctcgatatcagtctatgagaagggccaaatttgagtttcatcatggtgactatgaaaaacagtttctgcatgtactgagccgcaaggacaagactggaatcgttgtcaacaatcctaaccagtcagtgtttctcttcattgacagacagcacttgcagactccaaaaaacaaagctacaatcttcaagttatgcagcatctgcctctacctgccacaggaacagctcacccactgggcagttggcaccatagaggatcacctccgtccttatatgccagagtagagtactgaccagcaaaatggagaagatcagagaatgcagcagcagttttttttcttgttttcttaccactttattctttcagagtttaaagaaaatggactcatgcacagaacactatgcattttgaaacttgttcatcctggatttttttaaatcatttttatctcagaacttaaacaaaaattagatgtcgtgcacggactgtgtgaaagaagatgctttgcatatttgctgcactgcatcagtatcttactaaaaatgtgaaatgaaaggactattgtacactgaaatgcttaaatgtatctgaaagcacaaggtgatactcatttttatggtcttcccatttgtgctggtttttgcctctttgacatctgtcatcagtatttagagggtgagaagtgaatgtaacaggtataaataacatttttaaaaacaataactttgctataatcacagttgttccagagcactgtcagatacattctaatgaccagaactggtttaaaaaaagaaaatacaaccatgggaaagaaatcttaaatgaaaaacgcatctcattgtaggcatttttgcctcatattttactgggccatgtttgtttcctggtactcatgtattttttttttccagatctctttccccaagttgctattgtaagagtattctgctgcgtgtggatgcagttatacacattaaagcagatctggagtctgaagtagctataaagcagctataaaacagaaatacatgcatagctgcagaaaccatgataggtagaggacttttcttttggttttgttttgttttgttttgttttgtttttggttttacagagaagagatttttattacaaagaaaaaaattccagtgaattgtgcagaaatgctggtttttacaccatcctaaagaaaaactttacaagggtgttttggagtagaaaaaaggttataaagttggaatcttaaattgtaaaattaaccattgagtgtcaaagttctaaaagcagaactcattttgtgcaatgaacataaggaaagactactgtataggtttttttttttttctccttttaaatgaagaaaagctttgcttaagggttgcatacttttattggagtaaatctgaatgatcctactcctttggagtaaaactagtgcttaccagtttccaattgtatttagcttctggttggaatttgaaaaaaaaagaaaaaaagaaaaagaaaacctaaataaaataggtgaaagttccctgactattcaggtgaatacacaaagtttgaagtgttaactttttctttccatttcactgatgttactggtcaccttagagaattatttcatagtctgtggctaaatagtaaattcagaagaaaaatacctggcaattgagtgtgtaacttcaacaagaacaggaatcaagaacatactgtcagctttcaacagttagcaacctggccttatgccttgcttcatgggaaagggccattcttaaatttcaaaatgctttcatgtgtcctcttatttaaaaattagaatctatttgaaataacattttgaatgtttattataaccaggtactcttctaagctcttgtcttaacctctcaacctttggtggaaatagatgcagaggttaagtaacttgctcaagctcagatcataagtagtggaggatttaaaaccaggctggctggctcttaaggcctatgctcttaatttaccatgttgaattaatttaccatattgaattacacttatgttcaccaagttaggcattttggcagccattgtttacgtttttattttggaataatttagaaaagttaccagagtaatatgaaagctgttgtgtaatctttaccctcatttttattattttgccacatttttttcattttctctgtacacttatacctgtgagctatttgagtttgttgcacactttgtgcttccttaccccttccttagtacttcggcatatgttccaagtacaagaatatttcatataactagagtaaaattaccaaactcagggaatgttgatactctttatcatccatattcgttttgttgtcccagtatccttggtagcttgttttagatccccccctctagagtacaggatcattgaatttagttgttctcagttgtctttaatgtggaacagttccttagcctttatgtgttccatgacctctatgttttttggagtacagggcaatttttcttgtaaattgttactcattttgcatttgaattgtttattcatgcttaacgcccttctcaagtatactctccatctgctcttcattgatgttacttttgagcgcctggtcaaggtgtcctggttttgccctatgtgtggtacttactactagcaatctctgggaagcaatgtgcaaataccctgttcctttatcaggagctcccttggcgattctttccagactaaaacccaaaccagtctttaactatgatggttacaaaatagtgattttccaaatctaatgctttgtccatttacagcatttgttgtaagagagtgttctatctctgccatttattatctacctaaacactatggcctcatattttttccctccaaatcataatttgc

SEQ ID NO: 12757 - protein, 188 aa, Homo sapiens
MGDPNSRKKQALNRLRAQLRKKKESLADQFDFKMYIAFVFKEKKKKSALFEVSEVIPVMTNNYEENILKGVRDSSYSLESSLELLQKDVVQLHAPRYQSMRRAKFEFHHGDYEKQFLHVLSRKDKTGIVVNNPNQSVFLFIDRQHLQTPKNKATIFKLCSICLYLPQEQLTHWAVGTIEDHLRPYMPE

SEQ ID NO: 12758 - DNA, 1912 bp, Homo sapiens
tactaggatttagtcattttgatgcagagcatttcctgatcaactgctgttgtggagtgtactgtccaatagaattctctacaattaaggaaatgttctgtatctcaagagattgttcttaatggtggccagtagtcatgtgaccgttgagcatttgaaatgtggctagtgctactgaagaatggaattgtaaattgcttttaatctaaattttgcctgtgatattattggctgtgggtttgccaaaatttgtttttttaaagaggaaaagataacggactgttggctgctttattggacagcacagctagcatatagatgcagataggtagtataacttgtttgtagtttaatataaatgttgtattttgtaattaggccaaatttgagtttcatcatggtgactatgaaaaacagtttctgcatgtactgagccgcaaggacaagactggaatcgttgtcaacaatcctaaccagtcagtgtttctcttcattgacagacagcacttgcagactccaaaaaacaaagctacaatcttcaagttatgcagcatctgcctctacctgccacaggaacagctcacccactgggcagttggcaccatagaggatcacctccgtccttatatgccagagtagagtactgaccagcaaaatggagaagatcagagaatgcagcagcagttttttttcttgttttcttaccactttattctttcagagtttaaagaaaatggactcatgcacagaacactatgcattttgaaacttgttcatcctggatttttttaaatcatttttatctcagaacttaaacaaaaattagatgtcgtgcacggactgtgtgaaagaagatgctttgcatatttgctgcactgcatcagtatcttactaaaaatgtgaaatgaaaggactattgtacactgaaatgcttaaatgtatctgaaagcacaaggtgatactcatttttatggtcttcccatttgtgctggtttttgcctctttgacatctgtcatcagtatttagagggtgagaagtgaatgtaacaggtataaataacatttttaaaaacaataactttgctataatcacagttgttccagagcactgtcagatacattctaatgaccagaactggtttaaaaaaagaaaatacaaccatgggaaagaaatcttaaatgaaaaacgcatctcattgtaggcatttttgcctcatattttactgggccatgtttgtttcctggtactcatgtattttttttttccagatctctttccccaagttgctattgtaagagtattctgctgcgtgtggatgcagttatacacattaaagcagatctggagtctgaagtagctataaagcagctataaaacagaaatacatgcatagctgcagaaaccatgataggtagaggacttttcttttggttttgttttgttttgttttgttttgtttttggttttacagagaagagatttttattacaaagaaaaaaattccagtgaattgtgcagaaatgctggtttttacaccatcctaaagaaaaactttacaagggtgttttggagtagaaaaaaggttataaagttggaatcttaaattgtaaaattaaccattgagtgtcaaagttctaaaagcagaactcattttgtgcaatgaacataaggaaagactactgtataggtttttttttttttctccttttaaatgaagaaaagctttgcttaagggttgcatacttttattggagtaaatctgaatgatcctactcctttggagtaaaactagtgcttaccagtttccaattgtatttagcttctggttggaatttgaaaaaaaaagaaaaaaagaaaaagaaaacctaaataaaataggtgaaagttccctgactattcaggtgaatacac

SEQ ID NO: 12759 - protein, 48 aa, Homo sapiens
MILLLWSKTSAYQFPIVFSFWLEFEKKRKKEKENLNKIGESSLTIQVN

SEQ ID NO: 12760 - DNA, 2440 bp, Homo sapiens
ggatcacctgaggtcaggagttcgagaccagcctggctgacgtggtgaaaccccgtctctattaaaaatacaaaaaatattagcggggcatggtggcacacacttgtaatcccagccattcgggaggctaagtcacgagaatcgcttgaacctggtaggcggaatttgcagtaagcggagattgcaccattgcactccagtgtgggccacagagagggactctgtctccaaaaataaaaaattacatcatgagctattcagattataaactattatgtttacttcctaagatataaaatgatatatggtagatcttttgtacttataaaatgtttttataggggaaccctataatttgtgacatggcttgatgtagctgtttctttaaaagtaaacttttttttttttaatcattttataggatgtaattggctgtactcaggagatggatttcattctttggcctcggaatgatattgaaaaaatcgtctgtctcctgttttctaggtggaaagaatctgatgagccttttaggcctgttcaggtattttggtctaaagtgtgatgagtatttcaatatgtgaaaactactagaatataatagggtctaacttgagaaattctttgggaaaatggtttctgatagttttatttcacgagtctcccctatttagaatattgtgatgcaagagaagaaagcgtttggattatagaatctcttgacagtgtggtggttccacctgcccagtgtggctttgaaattatgactagagaaaatcttttaaagtggacatttactgatttatagaggggcccacagatgagcttctgagatctgtaactcttgaagccttcaccacacatccttctaaaaccgtatatttaactgctgcttcccaaaggaatgccaaatttgagtttcatcatggtgactatgaaaaacagtttctgcatgtactgagccgcaaggacaagactggaatcgttgtcaacaatcctaaccagtcagtgtttctcttcattgacagacagcacttgcagactccaaaaaacaaagctacaatcttcaagttatgcagcatctgcctctacctgccacaggaacagctcacccactgggcagttggcaccatagaggatcacctccgtccttatatgccagagtagagtactgaccagcaaaatggagaagatcagagaatgcagcagcagttttttttcttgttttcttaccactttattctttcagagtttaaagaaaatggactcatgcacagaacactatgcattttgaaacttgttcatcctggatttttttaaatcatttttatctcagaacttaaacaaaaattagatgtcgtgcacggactgtgtgaaagaagatgctttgcatatttgctgcactgcatcagtatcttactaaaaatgtgaaatgaaaggactattgtacactgaaatgcttaaatgtatctgaaagcacaaggtgatactcatttttatggtcttcccatttgtgctggtttttgcctctttgacatctgtcatcagtatttagagggtgagaagtgaatgtaacaggtataaataacatttttaaaaacaataactttgctataatcacagttgttccagagcactgtcagatacattctaatgaccagaactggtttaaaaaaagaaaatacaaccatgggaaagaaatcttaaatgaaaaacgcatctcattgtaggcatttttgcctcatattttactgggccatgtttgtttcctggtactcatgtattttttttttccagatctctttccccaagttgctattgtaagagtattctgctgcgtgtggatgcagttatacacattaaagcagatctggagtctgaagtagctataaagcagctataaaacagaaatacatgcatagctgcagaaaccatgataggtagaggacttttcttttggttttgttttgttttgttttgttttgtttttggttttacagagaagagatttttattacaaagaaaaaaattccagtgaattgtgcagaaatgctggtttttacaccatcctaaagaaaaactttacaagggtgttttggagtagaaaaaaggttataaagttggaatcttaaattgtaaaattaaccattgagtgtcaaagttctaaaagcagaactcattttgtgcaatgaacataaggaaagactactgtataggtttttttttttttctccttttaaatgaagaaaagctttgcttaagggttgcatacttttattggagtaaatctgaatgatcctactcctttggagtaaaactagtgcttaccagtttccaattgtatttagcttctggttggaatttgaaaaaaaaagaaaaaaagaaaaagaaaacctaaataaaataggtgaaagttccctgactattcaggtgaatacac

SEQ ID NO: 12761 - protein, 48 aa, Homo sapiens; identical to SEQ ID NO: 12759

SEQ ID NO: 12762 - DNA, 2626 bp, Homo sapiens
aacaagcactgacaatacatagcaatagtgaaatctgaaataactaagaattaggtactacagccatggagctggctgggtaaaatctaattggatatttcagtttcattcacctaccctgttttggtgtttggttttggttttggttttggtgagttttttttttttttttttttggaaagcaaggatcacacttccccctccctgttccttaatcccttttctaaaaaggggggaaaatccggatggattttagggattggtctggtgtcagctgtgttttattgcacacctaaatcctgattataggcttttcatttctccgcaaagcctttattttggcagttaagccaaatgtgttttccagaaagttagttattttctcctctttctttcctttctttcctccctttttcccgtctgaccccaaacgttattgtccaaacatgactggacagcagcttttgtttcttgaccctgtaatatgacagtctgctaatattgacagaaggtgcagtttttgggttatagtcgtgattttcgctaatcaatcatattagcaggaaaaaaaatgacttgtttctgttgtacttgagtcttaagaaaaagtgcccatagtttagtgacaatttccaaaggctttagtaccacctgtatttcaaaatgggggacccaaactcccggaagaaacaagctctgaacagactacgtgctcagcttagaaagaaaaaagaatctctagctgaccagtttgacttcaagatgtatattgcctttgtattcaaggagaagaagaaaaagtcagcactttttgaagtgtctgaggttataccagtcatgacaaataattatgaagaaaatatcctgaaaggtgtgcgagattccagctattccttggaaagttccctagagcttttacagaaggatgtggtacagctccatgctcctcgatatcagtctatgagaagggatgtaattggctgtactcaggagatggatttcattctttggcctcggaatgatattgaaaaaatcgtctgtctcctgttttctaggtggaaagaatctgatgagccttttaggcctgttcaggccaaatttgagtttcatcatggtgactatgaaaaacagtttctgcatgtactgagccgcaaggacaagactggaatcgttgtcaacaatcctaaccagtcagtgtttctcttcattgacagacagcacttgcagactccaaaaaacaaagctacaatcttcaagttatgcagcatctgcctctacctgccacaggaacagctcacccactgggcagttggcaccatagaggatcacctccgtccttatatgccagagtagagtactgaccagcaaaatggagaagatcagagaatgcagcagcagttttttttcttgttttcttaccactttattctttcagagtttaaagaaaatggactcatgcacagaacactatgcattttgaaacttgttcatcctggatttttttaaatcatttttatctcagaacttaaacaaaaattagatgtcgtgcacggactgtgtgaaagaagatgctttgcatatttgctgcactgcatcagtatcttactaaaaatgtgaaatgaaaggactattgtacactgaaatgcttaaatgtatctgaaagcacaaggtgatactcatttttatggtcttcccatttgtgctggtttttgcctctttgacatctgtcatcagtatttagagggtgagaagtgaatgtaacaggtataaataacatttttaaaaacaataactttgctataatcacagttgttccagagcactgtcagatacattctaatgaccagaactggtttaaaaaaagaaaatacaaccatgggaaagaaatcttaaatgaaaaacgcatctcattgtaggcatttttgcctcatattttactgggccatgtttgtttcctggtactcatgtattttttttttccagatctctttccccaagttgctattgtaagagtattctgctgcgtgtggatgcagttatacacattaaagcagatctggagtctgaagtagctataaagcagctataaaacagaaatacatgcatagctgcagaaaccatgataggtagaggacttttcttttggttttgttttgttttgttttgttttgtttttggttttacagagaagagatttttattacaaagaaaaaaattccagtgaattgtgcagaaatgctggtttttacaccatcctaaagaaaaactttacaagggtgttttggagtagaaaaaaggttataaagttggaatcttaaattgtaaaattaaccattgagtgtcaaagttctaaaagcagaactcattttgtgcaatgaacataaggaaagactactgtataggtttttttttttttctccttttaaatgaagaaaagctttgcttaagggttgcatacttttattggagtaaatctgaatgatcctactcctttggagtaaaactagtgcttaccagtttccaattgtatttagcttctggttggaatttgaaaaaaaaagaaaaaaagaaaaagaaaacctaaataaaataggtgaaagttccctgactattcaggtgaatacac

SEQ ID NO: 12763 - protein, 229 aa, Homo sapiens; identical to SEQ ID NO: 1270

SEQ ID NO: 12764 - DNA, 2503 bp, Homo sapiens
aacaagcactgacaatacatagcaatagtgaaatctgaaataactaagaattaggtactacagccatggagctggctgggtaaaatctaattggatatttcagtttcattcacctaccctgttttggtgtttggttttggttttggttttggtgagttttttttttttttttttttggaaagcaaggatcacacttccccctccctgttccttaatcccttttctaaaaaggggggaaaatccggatggattttagggattggtctggtgtcagctgtgttttattgcacacctaaatcctgattataggcttttcatttctccgcaaagcctttattttggcagttaagccaaatgtgttttccagaaagttagttattttctcctctttctttcctttctttcctccctttttcccgtctgaccccaaacgttattgtccaaacatgactggacagcagcttttgtttcttgaccctgtaatatgacagtctgctaatattgacagaaggtgcagtttttgggttatagtcgtgattttcgctaatcaatcatattagcaggaaaaaaaatgacttgtttctgttgtacttgagtcttaagaaaaagtgcccatagtttagtgacaatttccaaaggctttagtaccacctgtatttcaaaatgggggacccaaactcccggaagaaacaagctctgaacagactacgtgctcagcttagaaagaaaaaagaatctctagctgaccagtttgacttcaagatgtatattgcctttgtattcaaggagaagaagaaaaagtcagcactttttgaagtgtctgaggttataccagtcatgacaaataattatgaagaaaatatcctgaaaggtgtgcgagattccagctattccttggaaagttccctagagcttttacagaaggatgtggtacagctccatgctcctcgatatcagtctatgagaagggccaaatttgagtttcatcatggtgactatgaaaaacagtttctgcatgtactgagccgcaaggacaagactggaatcgttgtcaacaatcctaaccagtcagtgtttctcttcattgacagacagcacttgcagactccaaaaaacaaagctacaatcttcaagttatgcagcatctgcctctacctgccacaggaacagctcacccactgggcagttggcaccatagaggatcacctccgtccttatatgccagagtagagtactgaccagcaaaatggagaagatcagagaatgcagcagcagttttttttcttgttttcttaccactttattctttcagagtttaaagaaaatggactcatgcacagaacactatgcattttgaaacttgttcatcctggatttttttaaatcatttttatctcagaacttaaacaaaaattagatgtcgtgcacggactgtgtgaaagaagatgctttgcatatttgctgcactgcatcagtatcttactaaaaatgtgaaatgaaaggactattgtacactgaaatgcttaaatgtatctgaaagcacaaggtgatactcatttttatggtcttcccatttgtgctggtttttgcctctttgacatctgtcatcagtatttagagggtgagaagtgaatgtaacaggtataaataacatttttaaaaacaataactttgctataatcacagttgttccagagcactgtcagatacattctaatgaccagaactggtttaaaaaaagaaaatacaaccatgggaaagaaatcttaaatgaaaaacgcatctcattgtaggcatttttgcctcatattttactgggccatgtttgtttcctggtactcatgtattttttttttccagatctctttccccaagttgctattgtaagagtattctgctgcgtgtggatgcagttatacacattaaagcagatctggagtctgaagtagctataaagcagctataaaacagaaatacatgcatagctgcagaaaccatgataggtagaggacttttcttttggttttgttttgttttgttttgttttgtttttggttttacagagaagagatttttattacaaagaaaaaaattccagtgaattgtgcagaaatgctggtttttacaccatcctaaagaaaaactttacaagggtgttttggagtagaaaaaaggttataaagttggaatcttaaattgtaaaattaaccattgagtgtcaaagttctaaaagcagaactcattttgtgcaatgaacataaggaaagactactgtataggtttttttttttttctccttttaaatgaagaaaagctttgcttaagggttgcatacttttattggagtaaatctgaatgatcctactcctttggagtaaaactagtgcttaccagtttccaattgtatttagcttctggttggaatttgaaaaaaaaagaaaaaaagaaaaagaaaacctaaataaaataggtgaaagttccctgactattcaggtgaatacac

SEQ ID NO: 12765 - protein, 188 aa, Homo sapiens; identical to SEQ ID NO: 12757

SEQ ID NO: 12766 - DNA, 1492 bp, Homo sapiens
ggatcacctgaggtcaggagttcgagaccagcctggctgacgtggtgaaaccccgtctctattaaaaatacaaaaaatattagcggggcatggtggcacacacttgtaatcccagccattcgggaggctaagtcacgagaatcgcttgaacctggtaggcggaatttgcagtaagcggagattgcaccattgcactccagtgtgggccacagagagggactctgtctccaaaaataaaaaattacatcatgagctattcagattataaactattatgtttacttcctaagatataaaatgatatatggtagatcttttgtacttataaaatgtttttataggggaaccctataatttgtgacatggcttgatgtagctgtttctttaaaagtaaacttttttttttttaatcattttataggatgtaattggctgtactcaggagatggatttcattctttggcctcggaatgatattgaaaaaatcgtctgtctcctgttttctaggtggaaagaatctgatgagccttttaggcctgttcaggtattttggtctaaagtgtgatgagtatttcaatatgtgaaaactactagaatataatagggtctaacttgagaaattctttgggaaaatggtttctgatagttttatttcacgagtctcccctatttagaatattgtgatgcaagagaagaaagcgtttggattatagaatctcttgacagtgtggtggttccacctgcccagtgtggctttgaaattatgactagagaaaatcttttaaagtggacatttactgatttatagaggggcccacagatgagcttctgagatctgtaactcttgaagccttcaccacacatccttctaaaaccgtatatttaactgctgcttcccaaaggaatgccaaatttgagtttcatcatggtgactatgaaaaacagtttctgcatgtactgagccgcaaggacaagactggaatcgttgtcaacaatcctaaccagtcagtgtttctcttcattgacagacagcacttgcagactccaaaaaacaaagctacaatcttcaagttatgcagcatctgcctctacctgccacaggaacagctcacccactgggcagttggcaccatagaggatcacctccgtccttatatgccagagtagagtactgaccagcaaaatggagaagatcagagaatgcagcagcagttttttttcttgttttcttaccactttattctttcagagtttaaagaaaatggactcatgcacagaacactatgcattttgaaacttgttcatcctggatttttttaaatcatttttatctcagaacttaaacaaaaattagatgtcgtgcacggactgtgtgaaagaagatgctttgcatatttgctgcactgcatcagtatcttactaaaaatgtgaaatgaaaggactattgtacactgaaatgcttaaatgtatctgaaagcacaaggtgatactc

SEQ ID NO: 12767 - protein, 39 aa, Homo sapiens
MQQQFFFLFSYHFILSEFKENGLMHRTLCILKLVHPGFF

SEQ ID NO: 12768 - DNA, 1678 bp, Homo sapiens
aacaagcactgacaatacatagcaatagtgaaatctgaaataactaagaattaggtactacagccatggagctggctgggtaaaatctaattggatatttcagtttcattcacctaccctgttttggtgtttggttttggttttggttttggtgagttttttttttttttttttttggaaagcaaggatcacacttccccctccctgttccttaatcccttttctaaaaaggggggaaaatccggatggattttagggattggtctggtgtcagctgtgttttattgcacacctaaatcctgattataggcttttcatttctccgcaaagcctttattttggcagttaagccaaatgtgttttccagaaagttagttattttctcctctttctttcctttctttcctccctttttcccgtctgaccccaaacgttattgtccaaacatgactggacagcagcttttgtttcttgaccctgtaatatgacagtctgctaatattgacagaaggtgcagtttttgggttatagtcgtgattttcgctaatcaatcatattagcaggaaaaaaaatgacttgtttctgttgtacttgagtcttaagaaaaagtgcccatagtttagtgacaatttccaaaggctttagtaccacctgtatttcaaaatgggggacccaaactcccggaagaaacaagctctgaacagactacgtgctcagcttagaaagaaaaaagaatctctagctgaccagtttgacttcaagatgtatattgcctttgtattcaaggagaagaagaaaaagtcagcactttttgaagtgtctgaggttataccagtcatgacaaataattatgaagaaaatatcctgaaaggtgtgcgagattccagctattccttggaaagttccctagagcttttacagaaggatgtggtacagctccatgctcctcgatatcagtctatgagaagggatgtaattggctgtactcaggagatggatttcattctttggcctcggaatgatattgaaaaaatcgtctgtctcctgttttctaggtggaaagaatctgatgagccttttaggcctgttcaggccaaatttgagtttcatcatggtgactatgaaaaacagtttctgcatgtactgagccgcaaggacaagactggaatcgttgtcaacaatcctaaccagtcagtgtttctcttcattgacagacagcacttgcagactccaaaaaacaaagctacaatcttcaagttatgcagcatctgcctctacctgccacaggaacagctcacccactgggcagttggcaccatagaggatcacctccgtccttatatgccagagtagagtactgaccagcaaaatggagaagatcagagaatgcagcagcagttttttttcttgttttcttaccactttattctttcagagtttaaagaaaatggactcatgcacagaacactatgcattttgaaacttgttcatcctggatttttttaaatcatttttatctcagaacttaaacaaaaattagatgtcgtgcacggactgtgtgaaagaagatgctttgcatatttgctgcactgcatcagtatcttactaaaaatgtgaaatgaaaggactattgtacactgaaatgcttaaatgtatctgaaagcacaaggtgatactc

SEQ ID NO: 12769 - protein, 229 aa, Homo sapiens; identical to SEQ ID NO: 1270

SEQ ID NO: 12770 - DNA, 1555 bp, Homo sapiens
aacaagcactgacaatacatagcaatagtgaaatctgaaataactaagaattaggtactacagccatggagctggctgggtaaaatctaattggatatttcagtttcattcacctaccctgttttggtgtttggttttggttttggttttggtgagttttttttttttttttttttggaaagcaaggatcacacttccccctccctgttccttaatcccttttctaaaaaggggggaaaatccggatggattttagggattggtctggtgtcagctgtgttttattgcacacctaaatcctgattataggcttttcatttctccgcaaagcctttattttggcagttaagccaaatgtgttttccagaaagttagttattttctcctctttctttcctttctttcctccctttttcccgtctgaccccaaacgttattgtccaaacatgactggacagcagcttttgtttcttgaccctgtaatatgacagtctgctaatattgacagaaggtgcagtttttgggttatagtcgtgattttcgctaatcaatcatattagcaggaaaaaaaatgacttgtttctgttgtacttgagtcttaagaaaaagtgcccatagtttagtgacaatttccaaaggctttagtaccacctgtatttcaaaatgggggacccaaactcccggaagaaacaagctctgaacagactacgtgctcagcttagaaagaaaaaagaatctctagctgaccagtttgacttcaagatgtatattgcctttgtattcaaggagaagaagaaaaagtcagcactttttgaagtgtctgaggttataccagtcatgacaaataattatgaagaaaatatcctgaaaggtgtgcgagattccagctattccttggaaagttccctagagcttttacagaaggatgtggtacagctccatgctcctcgatatcagtctatgagaagggccaaatttgagtttcatcatggtgactatgaaaaacagtttctgcatgtactgagccgcaaggacaagactggaatcgttgtcaacaatcctaaccagtcagtgtttctcttcattgacagacagcacttgcagactccaaaaaacaaagctacaatcttcaagttatgcagcatctgcctctacctgccacaggaacagctcacccactgggcagttggcaccatagaggatcacctccgtccttatatgccagagtagagtactgaccagcaaaatggagaagatcagagaatgcagcagcagttttttttcttgttttcttaccactttattctttcagagtttaaagaaaatggactcatgcacagaacactatgcattttgaaacttgttcatcctggatttttttaaatcatttttatctcagaacttaaacaaaaattagatgtcgtgcacggactgtgtgaaagaagatgctttgcatatttgctgcactgcatcagtatcttactaaaaatgtgaaatgaaaggactattgtacactgaaatgcttaaatgtatctgaaagcacaaggtgatactc

SEQ ID NO: 12771 - protein, 188 aa, Homo sapiens; identical to SEQ ID NO: 12757

SEQ ID NO: 12772 - DNA, 2905 bp, Homo sapiens
aacaagcactgacaatacatagcaatagtgaaatctgaaataactaagaattaggtactacagccatggagctggctgggtaaaatctaattggatatttcagtttcattcacctaccctgttttggtgtttggttttggttttggttttggtgagttttttttttttttttttttggaaagcaaggatcacacttccccctccctgttccttaatcccttttctaaaaaggggggaaaatccggatggattttagggattggtctggtgtcagctgtgttttattgcacacctaaatcctgattataggcttttcatttctccgcaaagcctttattttggcagttaagccaaatgtgttttccagaaagttagttattttctcctctttctttcctttctttcctccctttttcccgtctgaccccaaacgttattgtccaaacatgactggacagcagcttttgtttcttgaccctgtaatatgacagtctgctaatattgacagaaggtgcagtttttgggttatagtcgtgattttcgctaatcaatcatattagcaggaaaaaaaatgacttgtttctgttgtacttgagtcttaagaaaaagtgcccatagtttagtgacaatttccaaaggctttagtaccacctgtatttcaaaatgggggacccaaactcccggaagaaacaagctctgaacagactacgtgctcagcttagaaagaaaaaagaatctctagctgaccagtttgacttcaagatgtatattgcctttgtattcaaggagaagaagaaaaagtcagcactttttgaagtgtctgaggttataccagtcatgacaaataattatgaagaaaatatcctgaaaggtgtgcgagattccagctattccttggaaagttccctagagcttttacagaaggatgtggtacagctccatgctcctcgatatcagtctatgagaagggatgtaattggctgtactcaggagatggatttcattctttggcctcggaatgatattgaaaaaatcgtctgtctcctgttttctaggtggaaagaatctgatgagccttttaggcctgttcagtggtttgatgataagaacccaatttgggccgggcgcggttgctcacgcctgtaatcccaacactttgggaggctaagccagatggatcacctgaggtcgggagtttgagaccatcctgaccaacataaagaagtcctatctctactaaaaacacaaaattagctgggcgtggtggtgcatgcctgtattccagctacttgggaggctgaggcagaagaatcgcttgaacccaggaggcggaggttgcagtgagccgagatcgcgccattgcactccagcctgggcaacaagagcgaaattccgtctcaaaaaaaaaaaaaaaattggagttttacagataaccacatcttattctgggaaaggatttgaagcaagttgggttttatatttggctgtacttgtcctcttcagcagtataataagccccttaaggctgaagtaaccttattcctattgtttagtagctaatagcatgcttttgatatgcttatgatcatactaataatttaatatttgaattgtatggaagtacaattcagtatcattttacatatggtatattgtgatgctgtatcatattttatgttacggtttataagaaaagctcctaggtataaaatgctacatagcaggaacttggtttttcaatgttattatttcctactgtttttgacgtaacggcaataaaatttgtttgaaccaaaatggactaacaattatttgtacaactcagtattgtctaaatatcatattgttaaatctaggtttcttgaattctccatcaagcctggtcatgtcatgtagcatttggtgtctcaccatgcccaacagatattttgtgggaggatggagttgatcttcctcatgttaaaagattgaagggagtgttctgacttaattgataacagtctttcataacttcacaaatttttgagaatgacccaaggctaactgtgggaaaaattcacataaaaacatagcctatctatgaggagcaaaactatatttcagttgtgggctttacatttcatttaaccctcttaactgtcctgtgaaatgggttacagccttattttatagatgaggaagctgaagtttaagggatttgcatacggtcacgtaactagtgagttgtgcagctagggttagaataaacagatttattttttttttttcttagaaacagcaattaacaatgtgactcctaatcaaaagaaaagagatgtccttggggcttaaagtactatggtgggagtcttggactgagtaggtttgaaaatacaattttatgatcgtggagtactaggatttagtcattttgatgcagagcatttcctgatcaactgctgttgtggagtgtactgtccaatagaattctctacaattaaggaaatgttctgtatctcaagagattgttcttaatggtggccagtagtcatgtgaccgttgagcatttgaaatgtggctagtgctactgaagaatggaattgtaaattgcttttaatctaaattttgcctgtgatattattggctgtgggtttgccaaaatttgtttttttaaagaggaaaagataacggactgttggctgctttattggacagcacagctagcatatagatgcagataggtagtataacttgtttgtagtttaatataaatgttgtattttgtaattaggccaaatttgagtttcatcatggtgactatgaaaaacagtttctgcatgtactgagccgcaaggacaagactggaatcgttgtcaacaatcctaaccagtcagtgtttctcttcattgacagacagcacttgcag

SEQ ID NO: 12773 - protein, 160 aa, Homo sapiens
MGDPNSRKKQALNRLRAQLRKKKESLADQFDFKMYIAFVFKEKKKKSALFEVSEVIPVMTNNYEENILKGVRDSSYSLESSLELLQKDVVQLHAPRYQSMRRDVIGCTQEMDFILWPRNDIEKIVCLLFSRWKESDEPFRPVQWFDDKNPIWAGRGCSRL

SEQ ID NO: 12774 - DNA, 1086 bp, Homo sapiens
gtctgcgtcagttggtcacgtggttgttcggagcgggcgagcggagttagcagggctttactgcagagcgcgccgggcactccagcgaccgtggggatcagcgtaggtgagctgtggccttttgcgaggtgctgcagccatagctacgtgcgttcgctacgaggattgagcgtctccacccatcttctgtgcttcaccatctacataatgaatcccagtatgaagcagaaacaagaagaaatcaaagagaatataaagaatagttctgtcccaagaagaactctgaagatgattcagccttctgcatctggatctcttgttggaagagaaaatgagctgtccgcaggcttgtccaaaaggaaacatcggaatgaccacttaacatctacaacttccagccctggggttattgtcccagaatctagtgaaaataaaaatcttggaggagtcacccaggagtcatttgatcttatgattaaagaaaatccatcctctcagtattggaaggaagtggcagaaaaacggagaaaggcgctgtatgaagcacttaaggaaaatgagaaacttcataaagaaattgaacaaaaggacaatgaaattgcccgcctgaaaaaggagaataaagaactggcagaagtagcagaacatgtacagtatatggcagagctaatagagagactgaatggtgaacctctggataattttgaatcactggataatcaggaatttgattctgaagaagaaactgttgaggattctctagtggaagactcagaaattggcacgtgtgctgaaggaactgtatcttcctctacggatgcaaagccatgtatatgaaatgcattaatatttgactgttgagaattttactgccgaagtttacctccactagttctttgtagcagagtacataactacataatgccaactctggaatcaaatttccttgtttgaatcctgggaccctattgcattaaagtacaaatactatgtatttttaatctatgatggtttatgtgaataggattttctcagttgtcagccatgacttatgtttattactaaataaacttcaaactcctgttg

SEQ ID NO: 12775 - protein, 209 aa, Homo sapiens; identical to SEQ ID NO: 1272

SEQ ID NO: 12776 - DNA, 1136 bp, Homo sapiens
gtctgcgtcagttggtcacgtggttgttcggagcgggcgagcggagttagcagggctttactgcagagcgcgccgggcactccagcgaccgtggggatcagcgtaggtgagctgtggccttttgcgaggtgctgcagccatagctacgtgcgttcgctacgaggattgagcgtctccacccatcttctgtgcttcaccatctacataatgaatcccagtatgaagcagaaacaagaagaaatcaaagagaatataaagaatagttctgtcccaagaagaactctgaagatgattcagccttctgcatctggatctcttgttggaagagaaaatgagctgtccgcaggcttgtccaaaaggaaacatcggaatgaccacttaacatctacaacttccagccctggggttattgtcccagaatctagtgaaaataaaaatcttggaggagtcacccaggagtcatttgatcttatgattaaagaaaatccatcctctcagtattggaaggaagtggcagaaaaacggagaaaggcgctgtatgaagcacttaaggaaaatgagaaacttcataaagaaattgaacaaaaggacaatgaaattgcccgcctgaaaaaggagaataaagaactggcagaagtagcagaacatgtacagtatatggcagagctaatagagagactgaatggtgaacctctggataattttgaatcactggataatcaggaatttgattctgaagaagaaactgttgaggattctctagtggaagactcagaaattggcacgtgtgctgaaggaactgtatcttcctctacggatgcaaagccatgtatatgaaatgcattaatatttgactgttgagaattttactgccgaagtttacctccactagttctttgtagcagagtacataactacataatgccaactctggaatcaaatttccttgtttgaatcctgggaccctattgcattaaagtacaaatactatgtatttttaatctatgatggtttatgtgaataggattttctcagttgtcagccatgacttatgtttattactaaataaacttcaaactcctgttgaacattgtgtataacttagaataatgaaatataaggagtatgtgtagaaa

SEQ ID NO: 12777 - protein, 209 aa, Homo sapiens; identical to SEQ ID NO: 1272

SEQ ID NO: 12778 - DNA, 1263 bp, Homo sapiens
cgtcagttggtcacgtggttgttcggagcgggcgagcggagttagcagggctttactgcagagcgcgccgggcactccagcgaccgtggggatcagcgtaggtgagctgtggccttttgcgaggtgctgcagccatagctacgtgcgttcgctacgaggattgagcgtctccacccagtaagtgggcaagaggcggcaggaagtgggtacgcaggggcgcaaggcgcacagcctctagacgactcgctttccctccggccaacctctgaagccgcgtcctactttgacagctgcagggccgcggcctggtcttctgtgcttcaccatctacataatgaatcccagtatgaagcagaaacaagaagaaatcaaagagaatataaagaatagttctgtcccaagaagaactctgaagatgattcagccttctgcatctggatctcttgttggaagagaaaatgagctgtccgcaggcttgtccaaaaggaaacatcggaatgaccacttaacatctacaacttccagccctggggttattgtcccagaatctagtgaaaataaaaatcttggaggagtcacccaggagtcatttgatcttatgattaaagaaaatccatcctctcagtattggaaggaagtggcagaaaaacggagaaaggcgctgtatgaagcacttaaggaaaatgagaaacttcataaagaaattgaacaaaaggacaatgaaattgcccgcctgaaaaaggagaataaagaactggcagaagtagcagaacatgtacagtatatggcagagctaatagagagactgaatggtgaacctctggataattttgaatcactggataatcaggaatttgattctgaagaagaaactgttgaggattctctagtggaagactcagaaattggcacgtgtgctgaaggaactgtatcttcctctacggatgcaaagccatgtatatgaaatgcattaatatttgactgttgagaattttactgccgaagtttacctccactagttctttgtagcagagtacataactacataatgccaactctggaatcaaatttccttgtttgaatcctgggaccctattgcattaaagtacaaatactatgtatttttaatctatgatggtttatgtgaataggattttctcagttgtcagccatgacttatgtttattactaaataaacttcaaactcctgttgaacattgtgtataacttagaataatgaaatataaggagtatgtgtagaaa

SEQ ID NO: 12779 - protein, 209 aa, Homo sapiens; identical to SEQ ID NO: 1272

SEQ ID NO: 12780 - DNA, 691 bp, Homo sapiens
gtcagttggtcacgtggttgttcggagcgggcgagcggagttagcagggctttactgcagagcgcgccgggcactccagcgaccgtggggatcagcgtaggtgagctgtggccttttgcgaggtgctgcagccatagctacgtgcgttcgctacgaggattgagcgtctccacccatcttctgtgcttcaccatctacataatgaatcccagtatgaagcagaaacaagaagaaatcaaagagaatataaaggtatgtgattgaataactttaatttttttttgtagaaagcatggggctaaaagtattttgacataatttatccaaatttagcctggctataatttctgtaagccttgagttagtcagaggatgagtaacaatagagaacatttttaaaaaactaattacggttgaatattaagtctgacccaagaatatgggttgtctctcttattttggtctttcaacagtattttgtagttttcagagcatgaattttacactatttatgttaaattttttcctaagtattctttttgaggttactgtgaatggaattgtttccttaatttcattctcatttggtcattgctactgtataggaaaataattgacttttgtgtcttgattttgtgtcctgaaaccttgctgaacttaatagttctaattgttttttagtagattcttc

SEQ ID NO: 12781 - protein, 57 aa, Homo sapiens
MGCLSYFGLSTVFCSFQSMNFTLFMLNFFLSILFEVTVNGIVSLISFSFGHCYCIGK

SEQ ID NO: 12782 - DNA, 680 bp, Homo sapiens
gtcagttggtcacgtggttgttcggagcgggcgagcggagttagcagggctttactgcagagcgcgccgggcactccagcgaccgtggggatcagcgtaggtgagctgtggccttttgcgaggtgctgcagccatagctacgtgcgttcgctacgaggattgagcgtctccacccagtaagtgggcaagaggcggcaggaagtgggtacgcaggggcgcaaggcgcacagcctctagacgactcgctttccctccggccaacctctgaagccgcgtcctactttgacagctgcagggccgcggcctggtcttctgtgcttcaccatctacataatgaatcccagtatgaagcagaaacaagaagaaatcaaagagaatataaagaatagttctgtcccaagaagaactctgaagatgattcagccttctgcatctggatctcttgttggaagagaaaatgagctgtccgcaggcttgtccaaaaggaaacatcggaatgaccacttaacatctacaacttccagccctggggttattgtcccagaatctagtgaaaataaaaatcttggaggagtcacccaggagtcatttgatcttatgattaaagaaaatccatcctctcagtattggaaggaagtggcagaaaaacggagaaaggcgctgtatgaagcacttaagga

SEQ ID NO: 12783 - protein, 114 aa, Homo sapiens
MNPSMKQKQEEIKENIKNSSVPRRTLKMIQPSASGSLVGRENELSAGLSKRKHRNDHLTSTTSSPGVIVPESSENKNLGGVTQESFDLMIKENPSSQYWKEVAEKRRKALYEAL

SEQ ID NO: 12784 - DNA, 969 bp, Homo sapiens
gtcagttggtcacgtggttgttcggagcgggcgagcggagttagcagggctttactgcagagcgcgccgggcactccagcgaccgtggggatcagcgtaggtgagctgtggccttttgcgaggtgctgcagccatagctacgtgcgttcgctacgaggattgagcgtctccacccatcttctgtgcttcaccatctacataatgaatcccagtatgaagcagaaacaagaagaaatcaaagagaatataaagaatagttctgtcccaagaagaactctgaagatgattcagccttctgcatctggatctcttgttggaagagaaaatgagctgtccgcaggcttgtccaaaaggaaacatcggaatgaccacttaacatctacaacttccagccctggggttattgtcccagaatctagtgaaaataaaaatcttggaggagtcacccaggagtcatttgatcttatgattaaagaaaatccatcctctcagtattggaaggaagtggcagaaaaacggagaaaggcgctgtatgaagcacttaaggaaaatgagaaaagactgaatggtgaacctctggataattttgaatcactggataatcaggaatttgattctgaagaagaaactgttgaggattctctagtggaagactcagaaattggcacgtgtgctgaaggaactgtatcttcctctacggatgcaaagccatgtatatgaaatgcattaatatttgactgttgagaattttactgccgaagtttacctccactagttctttgtagcagagtacataactacataatgccaactctggaatcaaatttccttgtttgaatcctgggaccctattgcattaaagtacaaatactatgtatttttaatctatgatggtttatgtgaataggattttctcagttgtcagccatgacttatgtttattactaaataaacttcaaactcctgttg

SEQ ID NO: 12785 - protein, 172 aa, Homo sapiens
MNPSMKQKQEEIKENIKNSSVPRRTLKMIQPSASGSLVGRENELSAGLSKRKHRNDHLTSTTSSPGVIVPESSENKNLGGVTQESFDLMIKENPSSQYWKEVAEKRRKALYEALKENEKRLNGEPLDNFESLDNQEFDSEEETVEDSLVEDSEIGTCAEGTVSSSTDAKPCI

SEQ ID NO: 12786 - DNA, 1023 bp, Homo sapiens
gtcagttggtcacgtggttgttcggagcgggcgagcggagttagcagggctttactgcagagcgcgccgggcactccagcgaccgtggggatcagcgtaggtgagctgtggccttttgcgaggtgctgcagccatagctacgtgcgttcgctacgaggattgagcgtctccacccatcttctgtgcttcaccatctacataatgaatcccagtatgaagcagaaacaagaagaaatcaaagagaatataaagaatagttctgtcccaagaagaactctgaagatgattcagccttctgcatctggatctcttgttggaagagaaaatgagctgtccgcaggcttgtccaaaaggaaacatcggaatgaccacttaacatctacaacttccagccctggggttattgtcccagaatctagtgaaaataaaaatcttggaggagtcacccaggagtcatttgatcttatgattaaagaaaatccatcctctcagtattggaaggaagtggcagaaaaacggagaaaggcgctgtatgaagcacttaaggaaaaggagaataaagaactggcagaagtagcagaacatgtacagtatatggcagagctaatagagagactgaatggtgaacctctggataattttgaatcactggataatcaggaatttgattctgaagaagaaactgttgaggattctctagtggaagactcagaaattggcacgtgtgctgaaggaactgtatcttcctctacggatgcaaagccatgtatatgaaatgcattaatatttgactgttgagaattttactgccgaagtttacctccactagttctttgtagcagagtacataactacataatgccaactctggaatcaaatttccttgtttgaatcctgggaccctattgcattaaagtacaaatactatgtatttttaatctatgatggtttatgtgaataggattttctcagttgtcagccatgacttatgtttattactaaataaacttcaaactcctgttg

SEQ ID NO: 12787 - protein, 190 aa, Homo sapiens
MNPSMKQKQEEIKENIKNSSVPRRTLKMIQPSASGSLVGRENELSAGLSKRKHRNDHLTSTTSSPGVIVPESSENKNLGGVTQESFDLMIKENPSSQYWKEVAEKRRKALYEALKEKENKELAEVAEHVQYMAELIERLNGEPLDNFESLDNQEFDSEEETVEDSLVEDSEIGTCAEGTVSSSTDAKPCI

SEQ ID NO: 12788 - DNA, 1212 bp, Homo sapiens
gtcagttggtcacgtggttgttcggagcgggcgagcggagttagcagggctttactgcagagcgcgccgggcactccagcgaccgtggggatcagcgtaggtgagctgtggccttttgcgaggtgctgcagccatagctacgtgcgttcgctacgaggattgagcgtctccacccagtaagtgggcaagaggcggcaggaagtgggtacgcaggggcgcaaggcgcacagcctctagacgactcgctttccctccggccaacctctgaagccgcgtcctactttgacagctgcagggccgcggcctggtcttctgtgcttcaccatctacataatgaatcccagtatgaagcagaaacaagaagaaatcaaagagaatataaagaatagttctgtcccaagaagaactctgaagatgattcagccttctgcatctggatctcttgttggaagagaaaatgagctgtccgcaggcttgtccaaaaggaaacatcggaatgaccacttaacatctacaacttccagccctggggttattgtcccagaatctagtgaaaataaaaatcttggaggagtcacccaggagtcatttgatcttatgattaaagaaaatccatcctctcagtattggaaggaagtggcagaaaaacggagaaaggcgctgtatgaagcacttaaggaaaatgagaaacttcataaagaaattgaacaaaaggacaatgaaattgcccgcctgaaaaaggagaataaagaactggcagaagtagcagaacatgtacagtatatggcagagctaatagagagactgaatggtgaacctctggataattttgaatcactggataatcaggaatttgattctgaagaagaaactgttgaggattctctagtggaagactcagaaattggcacgtgtgctgaaggaactgtatcttcctctacggatgcaaagccatgtatatgaaatgcattaatatttgactgttgagaattttactgccgaagtttacctccactagttctttgtagcagagtacataactacataatgccaactctggaatcaaatttccttgtttgaatcctgggaccctattgcattaaagtacaaatactatgtatttttaatctatgatggtttatgtgaataggattttctcagttgtcagccatgacttatgtttattactaaataaacttcaaactcctgttg

SEQ ID NO: 12789 - protein, 209 aa, Homo sapiens; identical to SEQ ID NO: 1272

SEQ ID NO: 12790 - DNA, 1071 bp, Homo sapiens
gtcagttggtcacgtggttgttcggagcgggcgagcggagttagcagggctttactgcagagcgcgccgggcactccagcgaccgtggggatcagcgtaggtgagctgtggccttttgcgaggtgctgcagccatagctacgtgcgttcgctacgaggattgagcgtctccacccatcttctgtgcttcaccatctacataatgaatcccagtatgaagcagaaacaagaagaaatcaaagagaatataaagaatagttctgtcccaagaagaactctgaagatgattcagccttctgcatctggatctcttgttggaagagaaaatgagctgtccgcaggcttgtccaaaaggaaacatcggaatgaccacttaacatctacaacttccagccctggggttattgtcccagaatctagtgaaaataaaaatcttggaggagtcacccaggagtcatttgatcttatgattaaagaaaatccatcctctcagtattggaaggaagtggcagaaaaacggagaaaggcgctgtatgaagcacttaaggaaaaggagaataaagaactggcagaagtagcagaacatgtacagtatatggcagagctaatagagagactgaatggtgaacctctggataattttgaatcactggataatcaggaatttgattctgaagaagaaactgttgaggattctctagtggaagactcagaaattggcacgtgtgctgaaggaactgtatcttcctctacggatgcaaagccatgtatatgaaatgcattaatatttgactgttgagaattttactgccgaagtttacctccactagttctttgtagcagagtacataactacataatgccaactctggaatcaaatttccttgtttgaatcctgggaccctattgcattaaagtacaaatactatgtatttttaatctatgatggtttatgtgaataggattttctcagttgtcagccatgacttatgtttattactaaataaacttcaaactcctgttgaacattgtgtataacttagaataatgaaatataaggagtatgtgtaga

SEQ ID NO: 12791 - protein, 190 aa, Homo sapiens; identical to SEQ ID NO: 12787

SEQ ID NO: 12792 - DNA, 1017 bp, Homo sapiens
gtcagttggtcacgtggttgttcggagcgggcgagcggagttagcagggctttactgcagagcgcgccgggcactccagcgaccgtggggatcagcgtaggtgagctgtggccttttgcgaggtgctgcagccatagctacgtgcgttcgctacgaggattgagcgtctccacccatcttctgtgcttcaccatctacataatgaatcccagtatgaagcagaaacaagaagaaatcaaagagaatataaagaatagttctgtcccaagaagaactctgaagatgattcagccttctgcatctggatctcttgttggaagagaaaatgagctgtccgcaggcttgtccaaaaggaaacatcggaatgaccacttaacatctacaacttccagccctggggttattgtcccagaatctagtgaaaataaaaatcttggaggagtcacccaggagtcatttgatcttatgattaaagaaaatccatcctctcagtattggaaggaagtggcagaaaaacggagaaaggcgctgtatgaagcacttaaggaaaatgagaaaagactgaatggtgaacctctggataattttgaatcactggataatcaggaatttgattctgaagaagaaactgttgaggattctctagtggaagactcagaaattggcacgtgtgctgaaggaactgtatcttcctctacggatgcaaagccatgtatatgaaatgcattaatatttgactgttgagaattttactgccgaagtttacctccactagttctttgtagcagagtacataactacataatgccaactctggaatcaaatttccttgtttgaatcctgggaccctattgcattaaagtacaaatactatgtatttttaatctatgatggtttatgtgaataggattttctcagttgtcagccatgacttatgtttattactaaataaacttcaaactcctgttgaacattgtgtataacttagaataatgaaatataaggagtatgtgtaga

SEQ ID NO: 12793 - protein, 172 aa, Homo sapiens; identical to SEQ ID NO: 12785

SEQ ID NO: 12794 - DNA, 994 bp, Homo sapiens
gacgcgcggggccacactgcccgccccctagcctggcgctgggcctccgggacaagttggctgggtccgggcttggggactgcaacgcggtcttctgtgcttcaccatctacataatgaatcccagtatgaagcagaaacaagaagaaatcaaagagaatataaagaatagttctgtcccaagaagaactctgaagatgattcagccttctgcatctggatctcttgttggaagagaaaatgagctgtccgcaggcttgtccaaaaggaaacatcggaatgaccacttaacatctacaacttccagccctggggttattgtcccagaatctagtgaaaataaaaatcttggaggagtcacccaggagtcatttgatcttatgattaaagaaaatccatcctctcagtattggaaggaagtggcagaaaaacggagaaaggcgctgtatgaagcacttaaggaaaatgagaaacttcataaagaaattgaacaaaaggacaatgaaattgcccgcctgaaaaaggagaataaagaactggcagaagtagcagaacatgtacagtatatggcagagctaatagagagactgaatggtgaacctctggataattttgaatcactggataatcaggaatttgattctgaagaagaaactgttgaggattctctagtggaagactcagaaattggcacgtgtgctgaaggaactgtatcttcctctacggatgcaaagccatgtatatgaaatgcattaatatttgactgttgagaattttactgccgaagtttacctccactagttctttgtagcagagtacataactacataatgccaactctggaatcaaatttccttgtttgaatcctgggaccctattgcattaaagtacaaatactatgtatttttaatctatgatggtttatgtgaataggattttctcagttgtcagccatgacttatgtttattactaaataaacttcaaactcctgttg

SEQ ID NO: 12795 - protein, 209 aa, Homo sapiens; identical to SEQ ID NO: 1272

SEQ ID NO: 12796 - DNA, 1044 bp, Homo sapiens
gacgcgcggggccacactgcccgccccctagcctggcgctgggcctccgggacaagttggctgggtccgggcttggggactgcaacgcggtcttctgtgcttcaccatctacataatgaatcccagtatgaagcagaaacaagaagaaatcaaagagaatataaagaatagttctgtcccaagaagaactctgaagatgattcagccttctgcatctggatctcttgttggaagagaaaatgagctgtccgcaggcttgtccaaaaggaaacatcggaatgaccacttaacatctacaacttccagccctggggttattgtcccagaatctagtgaaaataaaaatcttggaggagtcacccaggagtcatttgatcttatgattaaagaaaatccatcctctcagtattggaaggaagtggcagaaaaacggagaaaggcgctgtatgaagcacttaaggaaaatgagaaacttcataaagaaattgaacaaaaggacaatgaaattgcccgcctgaaaaaggagaataaagaactggcagaagtagcagaacatgtacagtatatggcagagctaatagagagactgaatggtgaacctctggataattttgaatcactggataatcaggaatttgattctgaagaagaaactgttgaggattctctagtggaagactcagaaattggcacgtgtgctgaaggaactgtatcttcctctacggatgcaaagccatgtatatgaaatgcattaatatttgactgttgagaattttactgccgaagtttacctccactagttctttgtagcagagtacataactacataatgccaactctggaatcaaatttccttgtttgaatcctgggaccctattgcattaaagtacaaatactatgtatttttaatctatgatggtttatgtgaataggattttctcagttgtcagccatgacttatgtttattactaaataaacttcaaactcctgttgaacattgtgtataacttagaataatgaaatataaggagtatgtgtagaaa

SEQ ID NO: 12797 - protein, 209 aa, Homo sapiens; identical to SEQ ID NO: 1272

SEQ ID NO: 12798 - DNA, 726 bp, Homo sapiens
attataccttaaatctgtctttgaatcaggaaagttaagatgctgctctttaggatggacctgggcataccctagtatctgtttattttgctttttctggtgactatttaatccaggacaatatgtttagaaattttaaaccagttttagaaattggtttaaaatacattaatttcattttttcagctataattattatgtgtgtatatatgtaaaatatagatatcaagagtcattaactttagtcaccttagtcattgacagggctgagtttggattaagagagaaaaaataatagttctactgtacaatagtataatttttatgattgtaagtattttaaacctagactccaccttcgggggtgcaaaccatattgttttttaattactagtcttctgtgcttcaccatctacataatgaatcccagtatgaagcagaaacaagaagaaatcaaagagaatataaagaatagttctgtcccaagaagaactctgaagatgattcagccttctgcatctggatctcttgttggaagagaaaatgagctgtccgcaggcttgtccaaaaggaaacatcggaatgaccacttaacatctacaacttccagccctggggttattgtcccagaatctagtgaaaataaaaatcttggaggagtcacccaggagtcatttgatcttatgattaaagaaaatccatcctctcagtattggaaggaagtgg

SEQ ID NO: 12799 - protein, 101 aa, Homo sapiens
MNPSMKQKQEEIKENIKNSSVPRRTLKMIQPSASGSLVGRENELSAGLSKRKHRNDHLTSTTSSPGVIVPESSENKNLGGVTQESFDLMIKENPSSQYWKE

SEQ ID NO: 12800 - DNA, 462 bp, Homo sapiens
aaagaaaaaagaaaaattatctaaattttaaaagcagaagatagccaaagaaaatttatattacctcccgaagagctgtgactacaggtgtgcaccaccacgcccaactaatcttttgtatttttagtagacaaagcattttgccatgttagccaggctgatgttgaactcctgtcctcaagtgatctgcctgcctcagcctcccaaagtgtagggattacaggcgtagccatcacacccggctgacatgctatactaacatttgatacctaattaaaaatcagactcatcttccacaggaaattcctacaaattctccatcactagggtcagttcccagggactagaagcttaaaatatgtcccccaaaacagcccctacatgacccttaggcaactactaatctgctttctcattatactttgtagttttgtgattttaaataaatagaagcatacagta

SEQ ID NO: 12801 - protein, 35 aa, Homo sapiens
PKKIYITSRRAVTTGVHHHAQLIFCIFSRQSILPC

SEQ ID NO: 12802 - DNA, 2357 bp, Homo sapiens
ttgtgaaatgccaagtctcgtggtactctagacctaaatgtcaaaacacgatttaacctatttttcccccataggctactgaaagcattaaaatgctggtgacattgtgtcaatctgatactgaagaaatcagaaatgtggcctcagaaaccctcttgtctctgggagaagatgggcggctggcatatgaacaattggacaaatttcctcgagactgtgttaaagtcggaggtcgtcatggaactgaagttgccacagccttttaattacaggttaactgcctaacagctgtcttaatatctggcccttttcatcaggatggtgctgtggtttgggctggaaattgtttagagcctgagagacacgacaactgaaataaaaatgtaggccaggtgcagtggctcatgcctgtaatcccagtactttgggaggccaacgcaggagaattgcttaagcccaggaggttcaagaccaacctgggcaacatagcaaggccctgtctctacaaaaaaaatagtttaattagtcaggcgtggtggcatgcacctgtagtcccagctacttgggaggctaaggtgggaggattgcttgagcccagaagattcaggctgcagtgagccataattgccccactgcactccagactgggtgacagagcaaaaccctgtctcaaaaaacaaaacaacaacaacaactaaaaaaacatgttatagaaagaattcagagtctcgtttcacagtacctatctacttttcctttggccaatatagaatagggctatggtataattcaaatatattacatcgtcgattgtgtctaataatactcagtgaaagagtccatcttatcttaatatgtatgaaatttaaaaatagccatctttgtacttttttgcaagtttctctataagcttgaaatagtcatgtgatacttcgacaaacatcatatgccttgcagtttttctcggtcgtgttctcagggttgagtagtccccttagctacctaactttactttcaatacaaagcacaaaaaagaatatcttcaaataaaagtttgcctgcagaacctggcaaaatgacccattaggagagtttagatgttttaattttatgtgctcccagctactctggagtctgaggtgggaggatcacttgaggcagaggttgcagtaagctgagattacactactgcactccagcccatgtgacagaggaatgagagccagtctcaaaaaaaaaaacaaaaaactcccataatttattttgtttcttttccccatcctgaaaattcccaaatcatgtttccattatggaaaaatgataagtaaatgactaagaactacattaagattatgcctatacacttaaacaaaaaactcaaagcttatgcttttttttttttaattaatgagagctattttttatgatattcttaccataggggtgttttgctgctaagacaaatcaaaaccaaaagctgtagattcacaaacctgtgatgctctttgaggtggaggaacctagaagtcagagaaatcctaatggagtaggagtggaggaacatttaaagtggtccctccttctgtaaaaatgaccgtgggattagaaagaaggacatcctgaggggtggttactgcccccagggaaatcactcactggtaggattccctggccaaatagttcaaacatcaggtcccattattgcttcagtatcagagatgcaagttcattaagcaaagtacaagaccattcagtagctcttattaaaatatcttttcttcctctaaagagtgtacaaggtggggtatgccaaggtatcaaaacaatatatgtgagtgtaatttaaactgtggaatatcaactgtactatggacgtgtttgtatcatttagatgtcattttaaatatttacattttagcaagacttttaaaaaggactcatttcatttcaaagtgcaaattgtttgccaggcttctggcaaatggttctttcaactgtgaacttatcgtgtacatatctgtatatttataaatattatatatattcatacatccttcactttaaaggtacattgtacagtctgtagttaggaggtatagcctatagcttatgttaaatggttgaaatggttctttttatagaaagtcaaacacagatgttacaggattttgtgtttggtttgtcatttttttattttttattttgactattgcatgagtaattaattccagatcttttgtattcacttctgtattttatgtttggttgaggggtgcttttagttgtgtggcatttgtattcattgatctttcagtcatgtaagttaaaataaaaattatttttgaattactagcatc

SEQ ID NO: 12803 - protein, 57 aa, Homo sapiens
MLVTLCQSDTEEIRNVASETLLSLGEDGRLAYEQLDKFPRDCVKVGGRHGTEVATAF

SEQ ID NO: 12804 - DNA, 5597 bp, Homo sapiens
tccgcgctccgccaccctcgcgcccgccagccccgcaacttcaccccgcgcgccgcagctgctgcgagcggacgcggcagggcagccggcgctggggacagctcgcgtccacccgacttcctcccggggtccccttcacccaagtgagccagctcaggctgtctgcaaagccggaggtgcgggcagctccgggcattgcattggtgcggaggcttttatatgccagagaaccctgagtgtgcccctgacatgacaaggagccgtcgtcgttaggactaccgaccagactcccggaaatcatgttggtaggatcccagtctttttcgcctggagggcccaatgggatcattagaagccagtcctttgcgggtttcagcggcctccaggaaaggcgatccaggtgtaactccttcattgaaaattcctccgctctcaagaagcctcaggccaaactgaagaaaatgcacaatttaggccacaaaaacaacaatccccccaaagagcctcagcctaaaagggtggaagaagtctacagggccttgaaaaatggacttgatgaatatctggaggttcaccagacggagctggacaagttgacagctcagttaaaagatatgaaaagaaactctcgcctgggtgtactgtatgacctagacaagcaaattaaaacaattgaaagatacatgagacgcctggagtttcatataagtaaggtagatgaactctatgaagcttattgtatccagcgacgcctccaggatggtgccagcaaaatgaagcaagccttcgcaacatcccctgccagcaaagctgcccgggagagtctgacagagatcaatcggagcttcaaggagtacacagagaatatgtgcaccattgaagtggagctagagaatctgctgggagaattctccatcaagatgaaaggtctggctggctttgcacgcctctgtcctggagatcaatatgaaattttcatgaagtatggccggcagcggtggaaactgaaaggcaaaatagaagtaaatggcaagcagagctgggatggagaagaaacagtttttctgcccctgatagttgggttcatctccatcaaggtcacggagctcaaagggctagcaactcacatcctggtaggtagcgtgacctgtgagaccaaagagctgtttgcagcccgacctcaggtagtggctgtcgacatcaatgaccttggtaccatcaaactgaacctggaaatcacctggtatccatttgacgtggaggacatgaccgcatcctcaggcgctgggaacaaggcagcagcccttcagaggagaatgtccatgtacagccagggtaccccggaaacgcccaccttcaaagaccactccttctttaggtggctgcatccttccccagacaagcccaggcggctgtctgtcttgagtgccttgcaagacactttctttgccaagctgcaccgcagccgctccttcagtgacctgccctccctcaggccgagtcccaaggccgtgctagagctctattcaaatctacctgatgacatctttgaaaatggaaaggcagccgaggagaaaatgccactgtcgctcagcttcagtgacctgcccaacggggactgcgccctcacctcccactcaacaggctccccttccaactcaacaaatccagaaattaccatcacccctgcggagtttaacctcagcagcttggcctcccagaatgagggtatggatgacaccagctcagcatcttccaggaactccctgggagaaggccaagagccaaagtcacacctgaaggaggaagacccagaggagcccagaaaacctgcctcggccccatctgaggcttgccgccgacagtcctcaggtgctggggctgagcacctgttccttgagaatgatgttgcagaagcacttctgcaagagtctgaggaggcctctgagctcaagcctgtggaactggacacttcggaaggaaacatcacaaagcagctggtcaagaggctcacatctgcagaggtgccaatggccacagacaggctgctctctgagggttctgttggtggagaatctgaaggctgcagatcctttctagatggaagcttagaggatgcttttaatgggcttttacttgcattagaaccacataaagagcagtataaagagtttcaggatctgaaccaagaagtcatgaatttggatgatattctaaaatgcaagccagcagtaagccgcagcaggtcttccagtttaagtctcacagttgaaagtgctttagaaagctttgatttcctgaacacctctgattttgacgaggaggaggatggtgatgaggtttgtaatgttggcggaggtgctgactcagtattttcagacactgagactgagaaacacagttacaggtcggttcacccagaagccagggggcatctcagtgaagcgctcactgaagacacaggagttgggaccagtgtggcaggaagtcctctcccactgaccacaggcaacgagagcctggacatcaccatcgtcaggcacctccagtactgcacccaactcgtgcagcaaattgttttctcaagcaaaaccccatttgtggcaagaagtctcttagagaagctttctaggcagatccaagtgatggagaaactcgcagctgtcagtgatgagaacataggaaatatcagttctgttgtggaagccataccagaatttcacaaaaagctgtctttgctgtcattctggaccaagtgctgcagccctgttggtgtctaccacagcccagcggacagagtgatgaagcagctggaggccagctttgccagaactgtcaacaaagaatatccaggacttgcagacccagtgtttcgaaccctggtgtcccaaattctggaccgggctgagcctctgctttcctccagcctgtcctcggaagtcgtcactgttttccagtattacagttacttcaccagccacggcgtcagtgacctggagagttacctgagccagctggccaggcaagtttccatggttcagactctgcaatcactaagagatgaaaaactgctacaaaccatgagtgaccttgctcccagcaacctcctggcccagcaggaagtactcaggactctggctctgctattaaccagagaggacaacgaagttagtgaggctgtgacgctttacttggcagcagcctccaaaaatcagcatttcagggaaaaggccttgctctattactgtgaagcactaacaaagacaaacctccagctccagaaagcagcttgcctggctctgaaaatccttgaggctactgaaagcattaaaatgctggtgacattgtgtcaatctgatactgaagaaatcagaaatgtggcctcagaaaccctcttgtctctgggagaagatgggcggctggcatatgaacaattggacaaatttcctcgagactgtgttaaagtcggaggtcgtcatggaactgaagttgccacagccttttaattacaggttaactgcctaacagctgtcttaatatctggcccttttcatcaggatggtgctgtggtttgggctggaaattgtttagagcctgagagacacgacaactgaaataaaaatgtaggccaggtgcagtggctcatgcctgtaatcccagtactttgggaggccaacgcaggagaattgcttaagcccaggaggttcaagaccaacctgggcaacatagcaaggccctgtctctacaaaaaaaatagtttaattagtcaggcgtggtggcatgcacctgtagtcccagctacttgggaggctaaggtgggaggattgcttgagcccagaagattcaggctgcagtgagccataattgccccactgcactccagactgggtgacagagcaaaaccctgtctcaaaaaacaaaacaacaacaacaactaaaaaaacatgttatagaaagaattcagagtctcgtttcacagtacctatctacttttcctttggccaatatagaatagggctatggtataattcaaatatattacatcgtcgattgtgtctaataatactcagtgaaagagtccatcttatcttaatatgtatgaaatttaaaaatagccatctttgtacttttttgcaagtttctctataagcttgaaatagtcatgtgatacttcgacaaacatcatatgccttgcagtttttctcggtcgtgttctcagggttgagtagtccccttagctacctaactttactttcaatacaaagcacaaaaaagaatatcttcaaataaaagtttgcctgcagaacctggcaaaatgacccattaggagagtttagatgttttaattttatgtgctcccagctactctggagtctgaggtgggaggatcacttgaggcagaggttgcagtaagctgagattacactactgcactccagcccatgtgacagaggaatgagagccagtctcaaaaaaaaaaacaaaaaactcccataatttattttgtttcttttccccatcctgaaaattcccaaatcatgtttccattatggaaaaatgataagtaaatgactaagaactacattaagattatgcctatacacttaaacaaaaaactcaaagcttatgcttttttttttttaattaatgagagctattttttatgatattcttaccataggggtgttttgctgctaagacaaatcaaaaccaaaagctgtagattcacaaacctgtgatgctctttgaggtggaggaacctagaagtcagagaaatcctaatggagtaggagtggaggaacatttaaagtggtccctccttctgtaaaaatgaccgtgggattagaaagaaggacatcctgaggggtggttactgcccccagggaaatcactcactggtaggattccctggccaaatagttcaaacatcaggtcccattattgcttcagtatcagagatgcaagttcattaagcaaagtacaagaccattcagtagctcttattaaaatatcttttcttcctctaaagagtgtacaaggtggggtatgccaaggtatcaaaacaatatatgtgagtgtaatttaaactgtggaatatcaactgtactatggacgtgtttgtatcatttagatgtcattttaaatatttacattttagcaagacttttaaaaaggactcatttcatttcaaagtgcaaattgtttgccaggcttctggcaaatggttctttcaactgtgaacttatcgtgtacatatctgtatatttataaatattatatatattcatacatccttcactttaaaggtacattgtacagtctgtagttaggaggtatagcctatagcttatgttaaatggttgaaatggttctttttatagaaagtcaaacacagatgttacaggattttgtgtttggtttgtcatttttttattttttattttgactattgcatgagtaattaattccagatcttttgtattcacttctgtattttatgtttggttgaggggtgcttttagttgtgtggcatttgtattcattgatctttcagtcatgtaagttaaaataaaaattatttttgaattactagcatc

SEQ ID NO: 12805 - protein, 1068 aa, Homo sapiens
MLVGSQSFSPGGPNGIIRSQSFAGFSGLQERRSRCNSFIENSSALKKPQAKLKKMHNLGHKNNNPPKEPQPKRVEEVYRALKNGLDEYLEVHQTELDKLTAQLKDMKRNSRLGVLYDLDKQIKTIERYMRRLEFHISKVDELYEAYCIQRRLQDGASKMKQAFATSPASKAARESLTEINRSFKEYTENMCTIEVELENLLGEFSIKMKGLAGFARLCPGDQYEIFMKYGRQRWKLKGKIEVNGKQSWDGEETVFLPLIVGFISIKVTELKGLATHILVGSVTCETKELFAARPQVVAVDINDLGTIKLNLEITWYPFDVEDMTASSGAGNKAAALQRRMSMYSQGTPETPTFKDHSFFRWLHPSPDKPRRLSVLSALQDTFFAKLHRSRSFSDLPSLRPSPKAVLELYSNLPDDIFENGKAAEEKMPLSLSFSDLPNGDCALTSHSTGSPSNSTNPEITITPAEFNLSSLASQNEGMDDTSSASSRNSLGEGQEPKSHLKEEDPEEPRKPASAPSEACRRQSSGAGAEHLFLENDVAEALLQESEEASELKPVELDTSEGNITKQLVKRLTSAEVPMATDRLLSEGSVGGESEGCRSFLDGSLEDAFNGLLLALEPHKEQYKEFQDLNQEVMNLDDILKCKPAVSRSRSSSLSLTVESALESFDFLNTSDFDEEEDGDEVCNVGGGADSVFSDTETEKHSYRSVHPEARGHLSEALTEDTGVGTSVAGSPLPLTTGNESLDITIVRHLQYCTQLVQQIVFSSKTPFVARSLLEKLSRQIQVMEKLAAVSDENIGNISSVVEAIPEFHKKLSLLSFWTKCCSPVGVYHSPADRVMKQLEASFARTVNKEYPGLADPVFRTLVSQILDRAEPLLSSSLSSEVVTVFQYYSYFTSHGVSDLESYLSQLARQVSMVQTLQSLRDEKLLQTMSDLAPSNLLAQQEVLRTLALLLTREDNEVSEAVTLYLAAASKNQHFREKALLYYCEALTKTNLQLQKAACLALKILEATESIKMLVTLCQSDTEEIRNVASETLLSLGEDGRLAYEQLDKFPRDCVKVGGRHGTEVATAF

SEQ ID NO: 12806 - DNA, 1398 bp, Homo sapiens
ctgtctcaaaaaacaaaacaacaacaacaactaaaaaaacatgttatagaaagaattcagagtctcgtttcacagtacctatctacttttcctttggccaatatagaatagggctatggtataattcaaatatattacatcgtcgattgtgtctaataatactcagtgaaagagtccatcttatcttaatatgtatgaaatttaaaaatagccatctttgtacttttttgcaagtttctctataagcttgaaatagtcatgtgatacttcgacaaacatcatatgccttgcagtttttctcggtcgtgttctcagggttgagtagtccccttagctacctaactttactttcaatacaaagcacaaaaaagaatatcttcaaataaaagtttgcctgcagaacctggcaaaatgacccattaggagagtttagatgttttaattttatgtgctcccagctactctggagtctgaggtgggaggatcacttgaggcagaggttgcagtaagctgagattacactactgcactccagcccatgtgacagaggaatgagagccagtctcaaaaaaaaaaacaaaaaactcccataatttattttgtttcttttccccatcctgaaaattcccaaatcatgtttccattatggaaaaatgataagtaaatgactaagaactacattaagattatgcctatacacttaaacaaaaaactcaaagcttatgcttttttttttttaattaatgagagctattttttatgatattcttaccataggggtgttttgctgctaagacaaatcaaaaccaaaagctgtagattcacaaacctgtgatgctctttgaggtggaggaacctagaagtcagagaaatcctaatggagtaggagtggaggaacatttaaagtggtccctccttctgtaaaaatgaccgtgggattagaaagaaggacatcctgaggggtggttactgcccccagggaaatcactcactggtaggattccctggccaaatagttcaaacatcaggtcccattattgcttcagtatcagagatgcaagttcattaagcaaagtacaagaccattcagtagctcttattaaaatatcttttcttcctctaaagagtgtacaaggtggggtatgccaaggtatcaaaacaatatatgtgagtgtaatttaaactgtggaatatcaactgtactatggacgtgtttgtatcatttagattcatttttttattttttattttgactattgcatgagtaattaattccagatcttttgtattcacttctgtattttatgtttggttgaggggtgcttttagttgtgtggcatttgtattcattgatctttcagtcatgtaagttaaaataaaaattatttttgaattact

SEQ ID NO: 12807 - protein, 36 aa, Homo sapiens
MPRYQNNICECNLNCGISTVLWTCLYHLDSFFYFLF

SEQ ID NO: 12808 - DNA, 2433 bp, Homo sapiens
cgcaagaatgcatacaaactccagggctgctctctcctggagagggagggaggggatttaaaaacctgcagcaacatgggggaggaggctgtttgtccttctctctctggggaagtaactcgctcaaactgccttccttgctgagctgcttcgcgtagctttgaggaaggtctagtgaaattggtctttccattacatctggatgtactaccagagagttctgctgctgttgttttttttagcttttctttctttgagtctttaaagggcaattgtcgacactctgcaaacataccgatttgttgtctgcccactttggagtcttcaatctgggcagtaactatttaccctttttcctgctagcctgtccccctctctggattgaagtcacctgctaagacaatggactaccgaccagactcccggaaatcatgttggtaggatcccagtctttttcgcctggagggcccaatgggatcattagaagccagtcctttgcgggtttcagcggcctccaggaaaggcgatccaggtgtaactccttcattgaaaattcctccgctctcaagaagcctcaggccaaactgaagaaaatgcacaatttaggccacaaaaacaacaatccccccaaagagcctcagcctaaaagggtggaagaagtctacagggccttgaaaaatggacttgatgaatatctggaggttcaccagacggagctggacaagttgacagctcagttaaaagatatgaaaagaaactctcgcctgggtgtactgtatgacctagacaagcaaattaaaacaattgaaagatacatgagacgcctggagtttcatataagtaaggtagatgaactctatgaagcttattgtatccagcgacgcctccaggatggtgccagcaaaatgaagcaagccttcgcaacatcccctgccagcaaagctgcccgggagagtctgacagagatcaatcggagcttcaaggagtacacagagaatatgtgcaccattgaagtggagctagagaatctgctgggagaattctccatcaagatgaaaggtctggctggctttgcacgcctctgtcctggagatcaatatgaaattttcatgaagtatggccggcagcggtggaaactgaaaggcaaaatagaagtaaatggcaagcagagctgggatggagaagaaacagtttttctgcccctgatagttgggttcatctccatcaaggtcacggagctcaaagggctagcaactcacatcctggtaggtagcgtgacctgtgagaccaaagagctgtttgcagcccgacctcaggtagtggctgtcgacatcaatgaccttggtaccatcaaactgaacctggaaatcacctggtatccatttgacgtggaggacatgaccgcatcctcaggcgctgggaacaaggcagcagcccttcagaggagaatgtccatgtacagccagggtaccccggaaacgcccaccttcaaagaccactccttcttttcaaatctacctgatgacatctttgaaaatggaaaggcagccgaggagaaaatgccactgtcgctcagcttcagtgacctgcccaacggggactgcgccctcacctcccactcaacaggctccccttccaactcaacaaatccagaaattaccatcacccctgcggagtttaacctcagcagcttggcctcccagaatgagggtatggatgacaccagctcagcatcttccaggaactccctgggagaaggccaagagccaaagtcacacctgaaggaggaagacccagaggagcccagaaaacctgcctcggccccatctgaggcttgccgccgacagtcctcaggtgctggggctgagcacctgttccttgagaatgatgttgcagaagcacttctgcaagagtctgaggaggcctctgagctcaagcctgtggaactggacacttcggaaggaaacatcacaaagcagctggtcaagaggctcacatctgcagaggtgccaatggccacagacaggctgctctctgagggttctgttggtggagaatctgaaggctgcagatcctttctagatggaagcttagaggatgcttttaatgggcttttacttgcattagaaccacataaagagcagtataaagagtttcaggatctgaaccaagaagtcatgaatttggatgatattctaaaaaagtagagaagatcctctaatggatcccagtgtgcccatccctcaacctcctcagtgatcaactcatggccaatcttgtttcctattcttcaacctgctgacttccctctggattcttctgcaaccagtcccagatattgtgccattttatccatggttgtacttcttttttggatataaagatttttaaatgcattttttaaatgctaacaaaaaataaaaacttgaaaca

SEQ ID NO: 12809 - protein, 591 aa, Homo sapiens; identical to SEQ ID NO: 1274

SEQ ID NO: 12810 - DNA, 702 bp, Homo sapiens
gagcacatttttacaaagaaagatctggatgttatttttcttcagtcatggtacttatgatcagccatgatcctggattggcccttggatcaggaaaaaaaaaaaaaaacctgcttacctagtacaatattgggacacctggcaaaatatgaacatagactaattccaggtgacgttagctgaagagccagtgttataaactcactggtgttgagggcttagtaatgcctatgtgacagaatgtctttccattcttagaagaatttagggatgaagagtcctggtgtttgcatcttgctctaaaatggttcaggggctggatgtggtggctcacacctgtaatcccagcacctggaaatttatttttttaatattgaataaatattttgagaagtgaacttgaattagttatcggaatccttgtgtttaacatgaagaaaggccaatccaatggaagtcattagattctgacagaacagtatcatattggagtatatttaaatttctccataataatatattttgtcttctaagattggttttttttcccattcacattttagtgtctttgaaattggggtgcattttacaattgctaccggcagacagctgcctgtacaagctcaaagataatcatagttgttcatgtgtcatctctttgagttgtaattattattatatgcatttatttgccttttaaaa

SEQ ID NO: 12811 - protein, 30 aa, Homo sapiens
MVQGLDVVAHTCNPSTWKFIFLILNKYFEK

SEQ ID NO: 12812 - DNA, 394 bp, Homo sapiens
tgcctgcatctatgtggaacccctgtgtcagggctttcagagctggtgaatgcgcttgaccatcctcagtggctgcaaatatctctcctggaaaacaacagtgaacaaatgcaggggcttctgccaagacctcatgttccgtaaaaatccttcaattagaggatatgaggatagtgcactgattatactatgatactatgagcacacaggaaatgagctggctttaaaaacaatttgagaaaagcttatcacagcctcaagaactcttcttaaggccgggcgtggtggctcacacctgtaatccccagcaagtgctgggattacaggcatgagccactgagcccggcctagaataatgttttttaaatgcataaaataaaatacataggaattg

SEQ ID NO: 12813 - protein, 47 aa, Homo sapiens
MRLTILSGCKYLSWKTTVNKCRGFCQDLMFRKNPSIRGYEDSALIIL

SEQ ID NO: 12814 - DNA, 413 bp, Homo sapiens
aagaaaagaacaaaaaggggggggttaagttttctttttcatttttatacgtctggacttaacttccaggatagctgcaagacccttttgttcctttgccatgagcaggttttaggccgctctgttgggaccatggtgttaccttcgcgattacactggatcagaaacaggccatggagggacaggatccggaggcgccagctcaaccgttgcttagagtccccagaaagctggcccaacctacctatttcacgaaacctgaccctaaagatgtcctgaaaagccctgagacccttcacgtgcagaggctgagagggcaatctaatgactctactgctgaatttgcaaggatacgggtttataaccgttggtaaggactaccgaccagactcccggaaatcatgttggtagga

SEQ ID NO: 12815 - protein, 66 aa, Homo sapiens
MEGQDPEAPAQPLLRVPRKLAQPTYFTKPDPKDVLKSPETLHVQRLRGQSNDSTAEFARIRVYNRW

SEQ ID NO: 12816 - DNA, 747 bp, Homo sapiens
ggctttgcagacgccgccgccgaggaaaaccgtgtgctattagccatggtcaaccccaccatgttcttcgacattgccgtcgacggtgagcccttgggccgcatctcctttgagctgtttgcagacaaggtcccaaagacagcagaaaattttcgtgctctgagcactggagagaaaggatttggttataagggttcctgctttcacagaattattccagggtttatgtgtcagggtggtgacttcacacgccataatggcactggtggcaagtcaccactgggagaaatttgaagatgagaacttcatcctaaagcatacaggtcctgaaatcttgtccatggcaaatgctggacccaacacaaatggttcccagtttttcatctgcactgccaagactgagtggttggatggcaagcatgtggtctttggcaaagtgaaagaaggcatgaatattgtggaggccatggagcgctttgggtccaggaatggcaagaccagcaagaagatcaccattgctgactgtggacaactcgaataagtttgacttgtgttttatcttaaccaccagatcattccttctgtagctcaggagagcacccctccaccccatttgcttgcagtatcccagtatctttgtgctcttgctgcagttccctttgggttccatgttttccttgttccctcccatgcctagctggattgcagagttaagtttatgattatgaaataaaaactaaataacaa

SEQ ID NO: 12817 - protein, 82 aa, Homo sapiens
MVNPTMFFDIAVDGEPLGRISFELFADKVPKTAENFRALSTGEKGFGYKGSCFHRIIPGFMCQGGDFTRHNGTGGKSPLGEI

SEQ ID NO: 12818 - DNA, 818 bp, Homo sapiens
tttgcagacgccgccgccgaggaaaaccgtgtgctattagccatggtcaaccccaccatgttcttcgacattgccgtcgacggtgagcccttgggccgcatctcctttgaggtaaggggcctggaaaccaagaagtgactgctcatctaatccataaagctatgttaacagattggagctgtttgcagacaaggtcccaaagacagcagaaaattttcgtgctctgagcactggagagaaaggatttggttataagggttcctgctttcacagaattattccagggtttatgtgtcagggtggtgacttcacacgccataatggcactggtggcaagtcaccactgggagaaatttgaagatgagaacttcatcctaaagcatacaggtcctgaaatcttgtccatggcaaatgctggacccaacacaaatggttcccagtttttcatctgcactgccaagactgagtggttggatggcaagcatgtggtctttggcaaagtgaaagaaggcatgaatattgtggaggccatggagcgctttgggtccaggaatggcaagaccagcaagaagatcaccattgctgactgtggacaactcgaataagtttgacttgtgttttatcttaaccaccagatcattccttctgtagctcaggagagcacccctccaccccatttgcttgcagtatcccagtatctttgtgctcttgctgcagttccctttgggttccatgttttccttgttccctcccatgcctagctggattgcagagttaagtttatgattatgaaataaaaactaaataacaacaacaac

SEQ ID NO: 12819 - protein, 94 aa, Homo sapiens
MALVASHHWEKFEDENFILKHTGPEILSMANAGPNTNGSQFFICTAKTEWLDGKHVVFGKVKEGMNIVEAMERFGSRNGKTSKKITIADCGQLE

SEQ ID NO: 12820 - DNA, 429 bp, Homo sapiens
gttcatccaatgctatccaggagagatgtcccagtgagacaaatgtgcagtcctctccacaagtaaaaagaagagaagctgccttcgggtggtggagtctttaacccacttctcttctgccgagactgaaaaggatccaaatctcatggcattaaggaacaggaagcagggaaattctgcgcagaagagggcagttccctgggcttggccagcagagaaaggagaagcagctggacaacgaggactatggttggaagttggagagaagcagcttgacttcagagggacagcttgatggcatagcttcagagaggagtctgactggggatagccagacttcaggggaagattaccttcctgctccatcccctctttggctccccttcctgctgagagccacgttcattggcaataaagtcccctgcattt

SEQ ID NO: 12821 - protein, 49 aa, Homo sapiens
MALRNRKQGNSAQKRAVPWAWPAEKGEAAGQRGLWLEVGEKQLDFRGTA

SEQ ID NO: 12822 - DNA, 471 bp, Homo sapiens
ttcctaatatccagtttctcctctaacggagtaagctctgcgataggagtgaagagtgtcactaagtgagaatcagctacggtggcagctcgtcctagaaatgtcacgtctcatcctgcctccgtgtgctggcctatccaagttcaggtttcaggcaggcagctggactcagcaggaagagtctctttttctgaaagctaaaatgactcttcagcttgagagcggctgtcctccttgttttctttgaaagaagatcatttcctgaaggccgagagatccaggctctccaaaagcctctctctgtgggtgagacccgccaaagaatgcaaggatgagaaacaaaaccaaatctcagaggaatgaaagaatccttttcacatggacattagttacattcattaatggctcacacatgagttcaggcccatgttttgatctgtaggattgttttcaattgagctctagaaacag

SEQ ID NO: 12823 - protein, 48 aa, Homo sapiens
MSRLILPPCAGLSKFRFQAGSWTQQEESLFLKAKMTLQLESGCPPCFL

SEQ ID NO: 12824 - DNA, 1046 bp, Homo sapiens
agtataaggcatgtctagaaaagtgacatgccatggtaagtgaacaatagatgttgaccatatcagccccatgaaataaacaggaataccatgtggcccacagtcagttggtaaatccttaagacttgggaggagggtcatattccagttcacattccagttttagattctcgcttatcttaaagcattatagaccttgaactaaataagaataaaaatttgccccagtgcagtaagaaaatgaaaaggcattgaaatgagattcatactgttgttcattaataatatcttcatttcacaggaatgcaaaaccacatgaaaatttcaagaattcactgatctgatgcaaaataaaaatttatcattacatcttgaacccaggaagcttacagcaaagagactatgctttatgacgtcagcaatagataattccacgttgcctttgtgatttgtatatatagcttacatttgtggatcactacatagccagattcaaaaatattttacttgttccatccacagttctctacagaaagaaccaatgaacccaataggaacaaattctctgtggaaaacaaagcatagctgtagtagatacgaatccaatcacagaggaaacaggaagagaaaaacatccaagactacagtgaaaactggaaatggtctgttttcgtgatattcgtatgattaagatgcaaattttttcttaggaaaatgtgattgttaactagcattctgttttacatgttgacatttctaacacacacaccactgatttgaacttcaaaatttattttctgattatatatgctaggtctgattctgaagatacaagaattcaatggtggaatttgtctcctgaaatttctagattcataattagaagtgtttattaccaacttctcacttagattaacatcagtgatgtttgattatttgtgtggtaaattattcagttctcactgcaaataaatataatgtatatcaatgtaatgtaggtcagaatgtctatggtgagcaaataaaagattattttaaaatatgaa

SEQ ID NO: 12825 - protein, 44 aa, Homo sapiens
MNPIGTNSLWKTKHSCSRYESNHRGNRKRKTSKTTVKTGNGLFS

SEQ ID NO: 12826 - DNA, 1280 bp, Homo sapiens
cctctgccaaatcgttcttcgggaagccagttcacctttccaaaaataatgtatgagagaatacatttacctgtaccttcactaatactagattctgttgcttttgtgtacaagatatagatctagattttcacatataaggattccttaaagcaaggaacatcatagtacaataaaaataagacaaaatctcgttcaaggagctgtctgtattcaacaccctgaaagttctgagctacatcaacagctggaacagtacagaaacactatctctcagggaggacagagtaccaggtaccaaatagatcctggcaaaggaacaggcatggaagtttccagagcacattcccatgctttatctctcttacaggttttggaatcattttcaaataaaactccccctcacaccacccaactggaagtcattcctgatgtgctgtgagcagaatgggcctgtgattttgcaagaatgcaaaaccacatgaaaatttcaagaattcactgatctgatgcaaaataaaaatttatcattacatcttgaacccaggaagcttacagcaaagagactatgctttatgacgtcagcaatagataattccacgttgcctttgtgatttgtatatatagcttacatttgtggatcactacatagccagattcaaaaatattttacttgttccatccacagttctctacagaaagaaccaatgaacccaataggaacaaattctctgtggaaaacaaagcatagctgtagtagatacgaatccaatcacagaggaaacaggaagagaaaaacatccaagactacagtgaaaactggaaatggtctgttttcgtgatattcgtatgattaagatgcaaattttttcttaggaaaatgtgattgttaactagcattctgttttacatgttgacatttctaacacacacaccactgatttgaacttcaaaatttattttctgattatatatgctaggtctgattctgaagatacaagaattcaatggtggaatttgtctcctgaaatttctagattcataattagaagtgtttattaccaacttctcacttagattaacatcagtgatgtttgattattctggttaaccgctcacatgcataacaataatgctagaaattcaggaattataattttgtgatttatactgtgtggtaaattattcagttctcactgcaaataaatataatgtatatcaatgtaatgtaggtcagaatgtctatggtgagcaaataaaagattattttaaaatatgaa

SEQ ID NO: 12827 - protein, 44 aa, Homo sapiens
MLYLSYRFWNHFQIKLPLTPPNWKSFLMCCEQNGPVILQECKTT

SEQ ID NO: 12828 - DNA, 1059 bp, Homo sapiens
cctctgccaaatcgttcttcgggaagccagttcacctttccaaaaataatgtatgagagaatacatttacctgtaccttcactaatactagattctgttgcttttgtgtacaagatatagatctagattttcacatataaggattccttaaagcaaggaacatcatagtacaataaaaataagacaaaatctcgttcaaggagctgtctgtattcaacaccctgaaagttctgagctacatcaacagctggaacagtacagaaacactatctctcagggaggacagagtaccaggtaccaaatagatcctggcaaaggaacaggcatggaagtttccagagcacattcccatgctttatctctcttacaggttttggaatcattttcaaataaaactccccctcacaccacccaactggaagtcattcctgatgtgctgtgagcagaatgggcctgtgattttgcaattctctacagaaagaaccaatgaacccaataggaacaaattctctgtggaaaacaaagcatagctgtagtagatacgaatccaatcacagaggaaacaggaagagaaaaacatccaagactacagtgaaaactggaaatggtctgttttcgtgatattcgtatgattaagatgcaaattttttcttaggaaaatgtgattgttaactagcattctgttttacatgttgacatttctaacacacacaccactgatttgaacttcaaaatttattttctgattatatatgctaggtctgattctgaagatacaagaattcaatggtggaatttgtctcctgaaatttctagattcataattagaagtgtttattaccaacttctcacttagattaacatcagtgatgtttgattattctggttaaccgctcacatgcataacaataatgctagaaattcaggaattataattttgtgatttatactgtgtggtaaattattcagttctcactgcaaataaatataatgtatatcaatgtaatgtaggtcagaatgtctatggtgagcaaataaaagattattttaaaatatgaa

SEQ ID NO: 12829 - protein, 59 aa, Homo sapiens
MLYLSYRFWNHFQIKLPLTPPNWKSFLMCCEQNGPVILQFSTERTNEPNRNKFSVENKA

SEQ ID NO: 12830 - DNA, 4263 bp, Homo sapiens
tcatgcactgcttttcatatgaaaagatggccttactgccccaacaatcatttgaatatgagctttgcatgtaatttgcaaaaggtacagggaagtatgttaatccacttttttctgatcctttgggctcaacacctggaaaaagttgacagaagaaagcagtctatctatgagctagagtggaattaagataaaagtcttcatgagacacctagtatccaccaagtcaaatgggatgaatttagtcgcttgaaaattcagaaaatatactattgaaagctttaagttttaaaatcttactgtttgtttttcctttgatataatcaattcttctataatcaaataagttcaattatacagactgtatacagaagtccttgtcttggaattcaaactatgggtgttcaagatttcaccttgaatatctatacctctttgtttctccacaggtcataaaatactcaatatagtagactgcaccagacccaatgggggaaggctgcctatgaaggttgctctaatgatgagtgattttgctggaggagcatcaggctttccaatgactttcagtggtggaaaatttacgggtaatattttgtatgaaagtgataccaagtatcacgcatggcacattgctaaatgctgtaagagtaaatacaaatgtaattgagacatgatccctccccacaagaagcatgcaatcttattgggaaaccagatttgtaagttgcagattaccaactaaggtttctagctcaaaacatgatggagcatgaaggaaatgttgagatctgagagcacctcaggaggagccaagaaagagaatcatctggattcaccatgtagaccgtagagcagaacaggaaaggcctgaagtgggtcatccaggcttaggtgctcttggaatatggttcctaatggggtgtgtgcagcctcaatgtagacacatccccttggcactgtggatgctcatatcagggagcagtgtgcccagaagagagtcctctagttggggacctctagtgcacccagaggagggtcctctggttgggggtcttaggcaggagcccttctgctctgggtccaagagtggggttggggttgacattggggaagtgtgtatcctcaacactagtattgtaagtgctcaatacatgtccacttaataaattaatgtatctgataagtgatccctgtctaacagtgtggcagaaaatgccctgctttgcaatatgaagataacctttgtcccgttctttgctttcttctctaagtctatattcattgcctcccggagtgtgtaaccacatgagaaatagagggaaggttctgtccttaagaagttaaaagtgtgactgggaaggtaaaacatacttattaagggttaactagcatcatgccattctgtgtgatggtgagtttgtgtgtgtgtgcacatgtgcgtgagtacacacatatacatttaaaaaggtcttgaatataccaaaatattatgtctaggtgatgggtagcttgtatattttttctgtatccttgtctgtgtttgtcaaattttatagaaacaataacagtaacagctctctgaccttctaccctgtatgttctgcgtcctgtctaattcctcaagttccttcactgcctgtcactctgatgcttgctatatatcagcccatcctgctttttgtttcttagacccaaagtgtcaagtgcacacctgccctgggtctttgtgtttgctgtttccatttcctggagtgcagctggccctgatttgcatgtgaccagcaacttttcatctatgtctcaactcaaatgtcacctcttcactgaccatcctgtctaatgattccctccatctcatcccactcaccccagccactctctgttccattgccctgttttattttcttcacggtgcatcattctttgcaatgactttatttacttgttcattatttgcttctctcactagaatgaacactccatgagagcagggacctgctttgccttgttcaccactttattcccagtggctagaaccacgtctgacacagagtaggtgcacaataaatattggttacgtgaatgaataagcaaatgaacggcactgtgagaggggcatcatgactccatttacagagaagatacagacatggagaagttaggtagtttgcccaaggctgcccaaccagtaagtggtgggtcaggattttcaacctaactgactccaacgtcatgctcttaatcactgtgtatttgtcagattatgttgaacacacctgttataatctacaaatataatgaagccattttcatgttagtaaagagttaatttcaagaattacaatgcccttaaaatgtgcatgcacaccaactacgattatgcatcctaccctgtgtattcagctagggtccgaatgaattgccatatacaaggagaaagctcagtgcctttggctggcttggtaacattttcctagtaaccaattgaaatttccaagataaaaactccggggaaatcctccactaatgacatggagccttgttctatttctgccttagttacctatcaattttatctcctgaaagagttccaatctgctagaacatgtgtttttctgtgatttttccagcagaggagactctaatctaaatcctgtcatttcagaggaatggaaagcccaattcattaaaacagaaaggaagaagctcctgaactacaaggctcggctggtgaagaacctgcaaccccgaatttattgtccctttgctgggtattttgtggaatctcacccatcagacaagtacatcaaggaaacaaacaccaaaaatgacccaaatgaactcaacaatcttatcaagaaaaactctgatgtgataacatggacccctcgaccgggagccacccttgatctgggaagaatgctgaaggatcgaacagacagcaagggcatcatagagcctccagaggggacaaaaatttacaaggattcctgggattttgaaccttatttggaaatcttgaatgctgctctaggagatgaaatatttcttcactcatcctggataaaagaatacttcacttgggctggatttaaagattacaaccttgtggtcaggatgattgagacagatgaggacttcaatccttttcctggaggatatgactatttggttgactttttagatttatccttcccaaaagaaagaccacaacgagaacatccctatgaggaaatccatagccgggtggatgtcatcagacacgtggtgaagaatggtctactctgggatgagttgtatataggattccaaacacggctccagcgggatcctgacatataccatcacctgttttggaatcattttcaaataaaactccccctcacaccacccaactggaagtcattcctgatgtgctgtgagcagaatgggcctgtgattttgcaagaatgcaaaaccacatgaaaatttcaagaattcactgatctgatgcaaaataaaaatttatcattacatcttgaacccaggaagcttacagcaaagagactatgctttatgacgtcagcaatagataattccacgttgcctttgtgatttgtatatatagcttacatttgtggatcactacatagccagattcaaaaatattttacttgttccatccacagttctctacagaaagaaccaatgaacccaataggaacaaattctctgtggaaaacaaagcatagctgtagtagatacgaatccaatcacagaggaaacaggaagagaaaaacatccaagactacagtgaaaactggaaatggtctgttttcgtgatattcgtatgattaagatgcaaattttttcttaggaaaatgtgattgttaactagcattctgttttacatgttgacatttctaacacacacaccactgatttgaacttcaaaatttattttctgattatatatgctaggtctgattctgaagatacaagaattcaatggtggaatttgtctcctgaaatttctagattcataattagaagtgtttattaccaacttctcacttagattaacatcagtgatgtttgattattctggttaaccgctcacatgcataacaataatgctagaaattcaggaattataattttgtgatttatactgtgtggtaaattattcagttctcactgcaaataaatataatgtatatcaatgtaatgtaggtcagaatgtctatggtgagcaaataaaagattattttaaaatatgaa

SEQ ID NO: 12831 - protein, 181 aa, Homo sapiens
MLKDRTDSKGIIEPPEGTKIYKDSWDFEPYLEILNAALGDEIFLHSSWIKEYFTWAGFKDYNLVVRMIETDEDFNPFPGGYDYLVDFLDLSFPKERPQREHPYEEIHSRVDVIRHVVKNGLLWDELYIGFQTRLQRDPDIYHHLFWNHFQIKLPLTPPNWKSFLMCCEQNGPVILQECKTT

SEQ ID NO: 12832 - DNA, 2494 bp, Homo sapiens
atgttctacagaagagggatgtacaccaagaatgccagcctggacctctggggagcaaatgagcaacagaaacgatatgagcaactgctgttctttcaaaatacccaggcagaggaaccggcagacgatgggcaggcaagtaagagggctattagttccctagaaaagtggagaggcatatttaacaacatcgaacaaacaactgagatcctgttgtgcctatcacctgttgaagttgccagtcttaaggaaggaatcaatttctttcgcaataagagcactggcaaagactacgtcttgtacaagaataagagccgactgagggcatgcaagaatatgtgcaagcaccaaggaggcctgttcataaaagatatcgaggatttagccggaagtgatgcttttaaaaagccatttttgtcattaatccagatttgttctcatttgattctagttgttgaaatggatgaaaacaacggacttttgcttttagaactgaatcctcctaacccttgggacttacagcccagatctcctgaagagttggcttttggagaagtacagataacatatctcactcatgcctgcatggacctcaagttaggagacaagagaatggtgtttgacccttggttaatcggtcctgcttttgcccgtggatggtggttgctccatgagcctccatctgattggctggagaggctgtgccaggcagacctcatttacatcagtcatctgcactcagaccacctgagttaccccacactgaaaaagcttgctgggagaagaccagatattcccatttatgttggaaacacagaaaggcctgtattttggaatctgaatcagagcggtgtccagttgactaatatcaatgtcgtgccatttggaatatggcagcaggtggacaaaaatcttcgattcatgatcttgatggacggtgttcatcctgagatggacacttgcattattgtggagtacaaaggtcataaaatactcaatatagtagactgcaccagacccaatgggggaaggctgcctatgaaggttgctctaatgatgagtgattttgctggaggagcatcaggctttccaatgactttcagtggtggaaaatttacggaggaatggaaagcccaattcattaaaacagaaaggaagaagctcctgaactacaaggctcggctggtgaagaacctgcaaccccgaatttattgtccctttgctgggtattttgtggaatctcacccatcagacaagtacatcaaggaaacaaacaccaaaaatgacccaaatgaactcaacaatcttatcaagaaaaactctgatgtgataacatggacccctcgaccgggagccacccttgatctgggaagaatgctgaaggatcgaacagacagcaagggcatcatagagcctccagaggggacaaaaatttacaaggattcctgggattttgaaccttatttggaaatcttgaatgctgctctaggagatgaaatatttcttcactcatcctggataaaagaatacttcacttgggctggatttaaagattacaaccttgtggtcaggatgattgagacagatgaggacttcaatccttttcctggaggatatgactatttggttgactttttagatttatccttcccaaaagaaagaccacaacgagaacatccctatgaggaaatccatagccgggtggatgtcatcagacacgtggtgaagaatggtctactctgggatgagttgtatataggattccaaacacggctccagcgggatcctgacatataccatcacctgttttggaatcattttcaaataaaactccccctcacaccacccaactggaagtcattcctgatgtgctgtgagcagaatgggcctgtgattttgcaattctctacagaaagaaccaatgaacccaataggaacaaattctctgtggaaaacaaagcatagctgtagtagatacgaatccaatcacagaggaaacaggaagagaaaaacatccaagactacagtgaaaactggaaatggtctgttttcgtgatattcgtatgattaagatgcaaattttttcttaggaaaatgtgattgttaactagcattctgttttacatgttgacatttctaacacacacaccactgatttgaacttcaaaatttattttctgattatatatgctaggtctgattctgaagatacaagaattcaatggtggaatttgtctcctgaaatttctagattcataattagaagtgtttattaccaacttctcacttagattaacatcagtgatgtttgattattctggttaaccgctcacatgcataacaataatgctagaaattcaggaattataattttgtgatttatactgtgtggtaaattattcagttctcactgcaaataaatataatgtatatcaatgtaatgtaggtcagaatgtctatggtgagcaaataaaagattattttaaaatatgaa

SEQ ID NO: 12833 - protein, 654 aa, Homo sapiens [sequence omitted]

SEQ ID NO: 12834 - DNA, 1843 bp, Homo sapiens
gtgaaaggcagtgggctaagtggtagggggagaaggaagatacagagtgctttcaaaagtgcctaaatgtaagtcaacagggcagtgtgccaattacagtgttataatgttctacagaagagggatgtacaccaagaatgccagcctggacctctggtgtgtcttggaagacttaaccaggaaggggacgattcgtttctatttgacccaagactgatgctgcgtggtgaaggagaggaactgcgttccaggcagaggaagtccagatgcgcaagagcagagatgggagggacagcacagtggcttctcagaattgaatatggtgttagacttctaaaagagctgtggtagagggagaaaactgtcaaaggaaatcagtaactgttaaaggaaaataccttaaacgtcctgttttcaggctgactaatgccttaggggagcaaatgagcaacagaaacgatatgagcaactgctgttctttcaaaatacccaggcagaggaaccggcagacgatgggcagcatcgaacaaacaactgagatcctgttgtgcctatcacctgttgaagttgccagtcttaaggaaggaatcaatttctttcgcaataagagcactggcaaagactacgtcttgtacaagaataagagccgactgagggcatgcaagaatatgtgcaagcaccaaggaggcctgttcataaaagatatcgaggatttagccggaagttgttgaaatggatgaaaacaacggacttttgcttttagaactgaatcctcctaacccttgggacttacagcccagatctcctgaagagttggcttttggagaagtacaggtggacaaaaatcttcgattcatgatcttgatggacggtgttcatcctgagatggacacttgcattattgtggagtacaaaggtcataaaatactcaatatagtagactgcaccagacccaatgggggaaggctgcctatgaaggttgctctaatgatgagtgattttgctggaggagcatcaggctttccaatgactttcagtggtggaaaatttacggcagaggagactctaatctaaatcctgtcatttcagaggaatggaaagcccaattcattaaaacagaaaggaagaagctcctgaactacaaggctcggctggtgaagaacctgcaaccccgaatttattgtccctttgctgggtattttgtggaatctcacccatcagacaagtatggctagacactttgtacatttttacatacaacttaacgtatggtggaatgagcgactttgctgtgaaagcagtgtgacatgagaaggaaagtgattagtaggtgtctggaactttttaacaagctgctggagaacccagagcatgaataaaagttacacttggcagccaggaactctttcaggagataaaataacagatagatattctccgaaaggatcccaggaaagaggatggcaactgccatttattatgtgaagtgaactggggacttttaactaagccatctaagttaatctcccaatagcactatgcgtaggaagggggtattgttccttttttgcagataaggaatctgaaactcagaaaggtcaagggacgtgcccaaagtcaccctgttggaaacatgagttgagaatggaaccctggtatgcttagttctaaagctcttttctctataccatactgcattccagaatagaattatgtctttcttctcatgttttaggtatctaatgtgatttttcttgcagcaatataacttctgcaaatactatgaatcatcaccaatgtatgaaattgttgaaagaaataaaagaccatgaatttgatcttg

SEQ ID NO: 12835 - protein, 113 aa, Homo sapiens
MDENNGLLLLELNPPNPWDLQPRSPEELAFGEVQVDKNLRFMILMDGVHPEMDTCIIVEYKGHKILNIVDCTRPNGGRLPMKVALMMSDFAGGASGFPMTFSGGKFTAEETLI

SEQ ID NO: 12836 - DNA, 1714 bp, Homo sapiens
tgggctaagtggtagggggagaaggaagatacagagtgctttcaaaagtgcctaaatcatcgaacaaacaactgagatcctgttgtgcctatcacctgttgaagttgccagtcttaaggaaggaatcaatttctttcgcaataagagcactggcaaagactacgtcttgtacaagaataagagccgactgagggcatgcaagaatatgtgcaagcaccaaggaggcctgttcataaaagatatcgaggatttagccggaagttgttgaaatggatgaaaacaacggacttttgcttttagaactgaatcctcctaacccttgggacttacagcccagatctcctgaagagttggcttttggagaagtacagataacatatctcactcatgcctgcatggacctcaagttaggagacaagagaatggtgtttgacccttggttaatcggtcctgcttttgcccgtggatggtggttgctccatgagcctccatctgattggctggagaggctgtgccaggcagacctcatttacatcagtcatctgcactcagaccacctgagttaccccacactgaaaaagcttgctgggagaagaccagatattcccatttatgttggaaacacagaaaggcctgtattttggaatctgaatcagagcggtgtccagttgactaatatcaatgtcgtgccatttggaatatggcagcaggtggacaaaaatcttcgattcatgatcttgatggacggtgttcatcctgagatggacacttgcattattgtggagtacaaaggtcataaaatactcaatatagtagactgcaccagacccaatgggggaaggctgcctatgaaggttgctctaatgatgagtgattttgctggaggagcatcaggctttccaatgactttcagtggtggaaaatttacggcagaggagactctaatctaaatcctgtcatttcagaggaatggaaagcccaattcattaaaacagaaaggaagaagctcctgaactacaaggctcggctggtgaagaacctgcaaccccgaatttattgtccctttgctgggtattttgtggaatctcacccatcagacaagtatggctagacactttgtacatttttacatacaacttaacgtatggtggaatgagcgactttgctgtgaaagcagtgtgacatgagaaggaaagtgattagtaggtgtctggaactttttaacaagctgctggagaacccagagcatgaataaaagttacacttggcagccaggaactctttcaggagataaaataacagatagatattctccgaaaggatcccaggaaagaggatggcaactgccatttattatgtgaagtgaactggggacttttaactaagccatctaagttaatctcccaatagcactatgcgtaggaagggggtattgttccttttttgcagataaggaatctgaaactcagaaaggtcaagggacgtgcccaaagtcaccctgttggaaacatgagttgagaatggaaccctggtatgcttagttctaaagctcttttctctataccatactgcattccagaatagaattatgtctttcttctcatgttttaggtatctaatgtgatttttcttgcagcaatataacttctgcaaatactatgaatcatcaccaatgtatgaaattgttgaaagaaataaaagaccatgaatttga

SEQ ID NO: 12837 - protein, 226 aa, Homo sapiens
MDENNGLLLLELNPPNPWDLQPRSPEELAFGEVQITYLTHACMDLKLGDKRMVFDPWLIGPAFARGWWLLHEPPSDWLERLCQADLIYISHLHSDHLSYPTLKKLAGRRPDIPIYVGNTERPVFWNLNQSGVQLTNINVVPFGIWQQVDKNLRFMILMDGVHPEMDTCIIVEYKGHKILNIVDCTRPNGGRLPMKVALMMSDFAGGASGFPMTFSGGKFTAEETLI

SEQ ID NO: 12838 - DNA, 1996 bp, Homo sapiens
gtgaaaggcagtgggctaagtggtagggggagaaggaagatacagagtgctttcaaaagtgcctaaatgtaagtcaacagggcagtgtgccaattacagtgttataatgttctacagaagagggatgtacaccaagaatgccagcctggacctctggtgtgtcttggaagacttaaccaggaaggggacgattcgtttctatttgacccaagactgatgctgcgtggtgaaggagaggaactgcgttccaggcagaggaagtccagatgcgcaagagcagagatgggagggacagcacagtggcttctcagaattgaatatggtgttagacttctaaaagagctgtggtagagggagaaaactgtcaaaggaaatcagtaactgttaaaggaaaataccttaaacgtcctgttttcaggctgactaatgccttaggggagcaaatgagcaacagaaacgatatgagcaactgctgttctttcaaaatacccaggcagaggaaccggcagacgatgggcagcatcgaacaaacaactgagatcctgttgtgcctatcacctgttgaagttgccagtcttaaggaaggaatcaatttctttcgcaataagagcactggcaaagactacgtcttgtacaagaataagagccgactgagggcatgcaagaatatgtgcaagcaccaaggaggcctgttcataaaagatatcgaggatttagccggaagttgttgaaatggatgaaaacaacggacttttgcttttagaactgaatcctcctaacccttgggacttacagcccagatctcctgaagagttggcttttggagaagtacagataacatatctcactcatgcctgcatggacctcaagttaggagacaagagaatggtgtttgacccttggttaatcggtcctgcttttgcccgtggatggtggttgctccatgagcctccatctgattggctggagaggctgtgccaggcagacctcatttacatcagtcatctgcactcagaccacctgagttaccccacactgaaaaagcttgctgggagaagaccagatattcccatttatgttggaaacacagaaaggcctgtattttggaatctgaatcagagcggtgtccagttgactaatatcaatgtcgtgccatttggaatatggcagcaggtggacaaaaatcttcgattcatgatcttgatggacggtgttcatcctgagatggacacttgcattattgtggagtacaaaggtcataaaatactcaatatagtagactgcaccagacccaatgggggaaggctgcctatgaaggttgctctaatgatgagtgattttgctggaggagcatcaggctttccaatgactttcagtggtggaaaatttacgggtaatattttgtatgaaagtgataccaagtatcacgcatggcacattgctaaatgctgtaagagtaaatacaaatgtaattgagacatgatccctccccacaagaagcatgcaatcttattgggaaaccagatttgtaagttgcagattaccaactaaggtttctagctcaaaacatgatggagcatgaaggaaatgttgagatctgagagcacctcaggaggagccaagaaagagaatcatctggattcaccatgtagaccgtagagcagaacaggaaaggcctgaagtgggtcatccaggcttaggtgctcttggaatatggttcctaatggggtgtgtgcagcctcaatgtagacacatccccttggcactgtggatgctcatatcagggagcagtgtgcccagaagagagtcctctagttggggacctctagtgcacccagaggagggtcctctggttgggggtcttaggcaggagcccttctgctctgggtccaagagtggggttggggttgacattggggaagtgtgtatcctcaacactagtattgtaagtgctcaatacatgtccacttaataaattaatgtatctgataagtga

SEQ ID NO: 12839 - protein, 247 aa, Homo sapiens [sequence omitted]

SEQ ID NO: 12840 - DNA, 2305 bp, Homo sapiens
agagtgatcactttcactcccaaagacatcctttggtgatacttactgtgggattcagagtggggtgcagaggacgaccctgcaaaggcacggactataagagagatctgtgcagctgcgcctcagggggtgtcctgggcccctgggcatgacaggagggggaccacttgcagttctactggaaaatttaccacccttccagaatcctctgaagatatacaggtcgcaactagagtgagacccgagtactgccttgggtcagaatggctagagaaccgagaaaaaacgcagccctggacgcccagtctgcagaagaccagacggggctcctgaccgtgaaggtggagaaggaggaagcctccgccttgacggcggaggtgagagcaccctgcagccctgctcggggccccgaacgctcccgccagcgcttccgaggcttccgctacccggaggctgcgggcccccgcgaggcgttgagccggctccgagaactctgcggacaatggctgcagcctgagatgcacagcaaggagcagatcctggagctgctggtgctggagcagttcctgaccatcctgccggggaatctgcagagctgggtgcgggagcagcatccagagagcggggaggaggtggtggtgctattggagtatttggagaggcagctggatgagccggcgccgcaggttcccgttggtgaccaggggcaagaactgctctgttgcaagatggcactattgacacaaactcaagggtctcaaagtagccagtgccagccaatgaaggctctgttcaagcatgaatctctgggatcccagcccttacacgatagagttctccaggttcctgggcttgcccagggagggtgctgcagagaagatgcaatggtagcttccaggctcactccagggtcccagggtttgctgaaaatggaagatgtggccctgaccctcactcctgggtggacacagctggattcatctcaggtgaacctctacagagatgaaaagcaggagaaccatagcagcctggtctcccttggtggtgaaatacagactaagagcagggacttgcctccagtcaagaagcttccagaaaaggagcatgggaagatatgccacctgagggaagacattgcccagattcctacacatgcagaagctggtgaacaggagggcaggttacaaagaaagcagaaaaatgccatagggagtaggcgacattattgccatgaatgtggaaagagttttgctcaaagttcaggcctgactaaacacaggagaatccacactggtgagaaaccctatgaatgtgaagactgtggaaagaccttcattgggagctctgcccttgtcattcatcagagagtccacactggtgagaagccatatgagtgtgaagaatgtggtaaggtcttcagtcacagctcaaaccttatcaaacaccagagaacccacactggggagaagccctatgagtgtgatgactgtgggaagaccttcagccagagctgcagcctccttgaacatcacaaaattcatactggggagaagccataccagtgcaatatgtgtggcaaagcctttaggcggaattcacatctcctgagacatcagaggattcatggtgataaaaatgttcagaatcctgagcacggggagtcctgggaaagtcagggtaggacggaaagccagtgggaaaatactgaggctcccgtgtcttataaatgtaatgagtgtgagagaagtttcacacggaatagaagtcttattgaacatcagaaaatccacactggtgagaaaccctatcagtgtgacacatgtggaaaaggtttcactcgaacttcataccttgttcaacatcagagaagccatgtagggaaaaaaactctttcacagtgacccatggtattcatgccaacattggtgctcatttgtcactgaactgaagccaccctggagcccttaatggttacagaaattgtggaccagggctttatttaccactatacatcatcgggtattagaaaatgtagtctggctgagacgatgagttatcttctacattctagaaagtgattggaagaagtcatttgataagaggccatgggagagtggtctggaagttgtaggacctaaaatagtttgttctcacccagtgtatttaaatggccttctggacttgttaattgccctcagccagcactttaggacatctggttggatggctctgatgtggggggctgctgctctgaccattcattttgcctctaatgaatctttcacaaattggtcagatccatgag

SEQ ID NO: 12841 - protein, 545 aa, Homo sapiens; identical to SEQ ID NO: 1278

SEQ ID NO: 12842 - DNA, 1639 bp, Homo sapiens; identical to SEQ ID NO: 1279

SEQ ID NO: 12843 - protein, 402 aa, Homo sapiens; identical to SEQ ID NO: 1280

SEQ ID NO: 12844 - DNA, 2362 bp, Homo sapiens
ccttctgcgatgcctaagcggcagcaccatcgagccaaggtcctccagcgttcctagagcggagaagaaagcgctccgaagagctagagctgacactcggcgatgagctaagacgctgtttcagagcgtttgggtcctctgaggccccttgaccaggagtgtctctgaagatacagtccaaagaaagttctccaaaacaaggagaacagtctgaagctggggatggcaacagcattggacccagaccagccaaagaaacaaaaaatacttgtggaggagatggcccctctgaaaggagtacaggaacagcaggttcggcatgagtgtgaagttacaaagcctgagaaagagaagggtgaggagacaaggattgagaatgggaagcttattgtagtaacagactcttgtggaagagtagagtcatctgggaaaatatctgaacccatggaggctcataatgagggctctaacttggaaaggcatcaggccaagcccaaagagaagattgagtataaatgctcagaacgtgagcagagattcatccagcacttggacctgattgaacatgcgagtacacacacgggaaagaaactctgcgagtctgatgtgtgtcagagttccagtcttacaggacataagaaagtcctctctagagagaaaggtcatcagtgtcatgagtgtgggaaagcctttcagaggagttcacacctcgtcagacatcagaaaatccatcttggtgagaagccttatcagtgcaatgagtgtggcaaagtctttagccagaatgcaggccttttggaacatctcagaattcatactggagagaaaccttatctatgtatccattgtggaaaaaattttaggcgcagctctcaccttaatcgacatcagagaattcacagtcaggaggagccctgtgagtgcaaggagtgtggaaaaacctttagtcaggccttactcctcacccaccatcagagaatccatagtcactccaaaagccatcaatgtaacgagtgtggaaaagctttcagtttgacctcagaccttattcgacaccacagaattcatactggagaaaaacctttcaagtgtaacatatgccagaaagccttccgactaaactcacaccttgctcagcatgtaagaatccacaatgaagaaaaaccctatcagtgtagtgaatgtggagaagccttcaggcaaaggtcaggtctttttcaacatcagagatatcaccacaaagacaaactggcttgatgaggtgttctctccttgtagaacatcagagaaggcacattgactagcaaacagcactttaggaaaagtcaccgtagcccactgtggcatcagaaaattcttgggggctgagttggaggctccctgcctctattctctctcctttgctttccttgaagtcagctttggaccacaataatttcactgtagatgatatgctaggatcaaagttaaacagcattcttcactgcaggacatctcagagcatgtaacataactgcatgattatatactctaagcaatagagagcttcatgactgagtaagagttttgaagtcagcagtgaatcaagtgcccacagatttgcaggcttaagcagaacaagggaagattgatatttttggatatgctatagcagctttctcctatgaaataaaactgatgatgtttggaagtatactactctcaaaggtgtctttaaagtacaggttaatggtgaacattttcccccagtggcttcacctcattcctcccactggccttaccccttccttccccagtggaagcattttcaaaagcaaagataattttcgctggtgaacttcagaacttgccttcagggttagcttcatgtaattttaccatttcccatccccattccccaccacattatgtcaagattcaagttataaattaacgttttacttagactttgaaagagatttcatgagtaatttgaatgaaccttgctgaattaatctgaatagcaactgtctgacttgataactccagtgccagtatagtggctgctgcatagacactattcagtaaatgtctgatgaaagaaattggactttttccctttaatactgatgatgcaattttgaaatgttgcttgttctggaatacttcggaagttaaacaataaagtcagcttggagaggagatcatgatctttatactgtgaatagcagaatgtcacagatgaagaatattaaaattaggggcgtccactccaaaacatatcaccagagtgacaacttcagccctcagcctctgcaatccatatatatcctggtcttgggagtccatagaatactgtttccttctaataaaggtttcaaac

SEQ ID NO: 12845 - protein, 344 aa, Homo sapiens
MATALDPDQPKKQKILVEEMAPLKGVQEQQVRHECEVTKPEKEKGEETRIENGKLIVVTDSCGRVESSGKISEPMEAHNEGSNLERHQAKPKEKIEYKCSEREQRFIQHLDLIEHASTHTGKKLCESDVCQSSSLTGHKKVLSREKGHQCHECGKAFQRSSHLVRHQKIHLGEKPYQCNECGKVFSQNAGLLEHLRIHTGEKPYLCIHCGKNFRRSSHLNRHQRIHSQEEPCECKECGKTFSQALLLTHHQRIHSHSKSHQCNECGKAFSLTSDLIRHHRIHTGEKPFKCNICQKAFRLNSHLAQHVRIHNEEKPYQCSECGEAFRQRSGLFQHQRYHHKDKLA

SEQ ID NO: 12846 - DNA, 2499 bp, Homo sapiens
ccttctgcgatgcctaagcggcagcaccatcgagccaaggtcctccagcgttcctagagcggagaagaaagcgctccgaagagctagagctgacactcggcgatgagctaagacgctgtttcagagcgtttgggtcctctgaggccccttgaccaggagtgtctctgaagatacagtccaaagaaagttctccaaaacaaggagaacagtctgaagctggggatggcaacagcattggacccagaccagccaaagaaacaaaaaatacttgtggaggagatggcccctctgaaaggagtacaggaacagcaggttcggcatgagtgtgaagttacaaagcctgagaaagagaagggtgaggagacaaggattgagaatgggaagcttattgtagtaacagactcttgtggaagagtagagtcatctgggaaaatatctgaacccatggaggctcataatgagggctctaacttggaaaggcatcaggccaagcccaaagagaagattgagtataaatgctcagaacgtgagcagagattcatccagcacttggacctgattgaacatgcgagtacacacacgggaaagaaactctgcgagtctgatgtgtgtcagagttccagtcttacaggacataagaaagtcctctctagagagaaaggtcatcagtgtcatgagtgtgggaaagcctttcagaggagttcacacctcgtcagacatcagaaaatccatcttggtgagaagccttatcagtgcaatgagtgtggcaaagtctttagccagaatgcaggccttttggaacatctcagaattcatactggagagaaaccttatctatgtatccattgtggaaaaaattttaggcgcagctctcaccttaatcgacatcagagaattcacagtcaggaggagccctgtgagtgcaaggagtgtggaaaaacctttagtcaggccttactcctcacccaccatcagagaatccatagtcactccaaaagccatcaatgtaacgagtgtggaaaagctttcagtttgacctcagaccttattcgacaccacagaattcatactggagaaaaacctttcaagtgtaacatatgccagaaagccttccgactaaactcacaccttgctcagcatgtaagaatccacaatgaagaaaaaccctatcagtgtagtgaatgtggagaagccttcaggcaaaggtcaggtctttttcaacatcagagatatcaccacaaagacaaactggcttgatgaggtgttctctccttgtagaacatcagagaaggcacattgactagcaaacagcactttaggaaaagtcaccgtagcccactgtggcatcagaaaattcttgggggctgagttggaggctccctgcctctattctctctcctttgctttccttgaagtcagctttggaccacaataatttcactgtagatgatatgctaggatcaaagttaaacagcattcttcactgcaggacatctcagagcatgtaacataactgcatgattatatactctaagcaatagagagcttcatgactgagtaagagttttgaagtcagcagtgaatcaagtgcccacagatttgcaggcttaagcagaacaagggaagattgatatttttggatatgctatagcagctttctcctatgaaataaaactgatgatgtttggaagtatactactctcaaaggtgtctttaaagtacaggttaatggtgaacattttcccccagtggcttcacctcattcctcccactggccttaccccttccttccccagtggaagcattttcaaaagcaaagataattttcgctggtgaacttcagaacttgccttcagggttagcttcatgtaattttaccatttcccatccccattccccaccacattatgtcaagattcaagttataaattaacgttttacttagactttgaaagagatttcatgagtaatttgaatgaaccttgctgaattaatctgaatagcaactgtctgacttgataactccagtgccagtatagtggctgctgcatagacactattcagtaaatgtctgatgaaagaaattggactttttccctttaatactgatgatgcaattttgaaatgttgcttgttctggaatacttcggaagttaaacaataaagtcagcttggagaggagatcatgatctttatactgtgaatagcagaatgtcacagatgaagaatattaaaattaggggcgtccactccaaaacatatcaccagagtgacaacttcagccctcagcctctgcaatccatatatatcctggtcttgggagtccatagaatactgtttccttctaataaaggtttcaaacaaatccctgcagatttatttaaagtgtttgtggaagataattttccatataagctgtgcagtattctatggtatatgtccccattgttcatcatttacgtcatttacagtttgatcaccataaacaatttttcagtg

SEQ ID NO: 12847 - protein, 344 aa, Homo sapiens; identical to SEQ ID NO: 12845

SEQ ID NO: 12848 - DNA, 2046 bp, Homo sapiens
agagcggagaagaaagcgctccgaagagctagagctgacactcggcgatgagctaagacgctgtttcagagcgtttgggtcctctgaggccccttgaccaggagtgtctctgaagatacagtccaaagaaagttctccaaaacaaggagaacagtctgaagctggggatggcaacagcattggtgagtgcccattccctggctcccctgaatctgaagaaggaggggcttcgggtagtgagggaggatcactactctacttgggaacagggattcaagctgcaaggaaacagtaaaggccttggacaggagccattgtgcaaacaattcaggcagttgcgttatgaagagaccacaggacctcgagaagcactaagtcggctccgggagctctgtcaacagtgctacagcccgagacccataccaaggagcagatcctggagctgctggtgctggagcagtttctgatcatcctgcctaaggagctccaggcccgggtgcaggagcatcacccagagagcagggaggacgtggttgttgttctggaggatttgcagctggatcttggagaaacaggacaacaggtggacccagaccagccaaagaaacaaaaaatacttgtggaggagatggcccctctgaaaggagtacaggaacagcaggttcggcatgagtgtgaagttacaaagcctgagaaagagaagggtgaggagacaaggattgagaatgggaagcttattgtagtaacagactcttgtggaagagtagagtcatctgggaaaatatctgaacccatggaggctcataatgagggctctaacttggaaaggcatcaggccaagcccaaagagaagattgagtataaatgctcagaacgtgagcagagattcatccagcacttggacctgattgaacatgcgagtacacacacgggaaagaaactctgcgagtctgatgtgtgtcagagttccagtcttacaggacataagaaagtcctctctagagagaaaggtcatcagtgtcatgagtgtgggaaagcctttcagaggagttcacacctcgtcagacatcagaaaatccatcttggtgagaagccttatcagtgcaatgagtgtggcaaagtctttagccagaatgcaggccttttggaacatctcagaattcatactggagagaaaccttatctatgtatccattgtggaaaaaattttaggcgcagctctcaccttaatcgacatcagagaattcacagtcaggaggagccctgtgagtgcaaggagtgtggaaaaacctttagtcaggccttactcctcacccaccatcagagaatccatagtcactccaaaagccatcaatgtaacgagtgtggaaaagctttcagtttgacctcagaccttattcgacaccacagaattcatactggagaaaaacctttcaagtgtaacatatgccagaaagccttccgactaaactcacaccttgctcagcatgtaagaatccacaatgaagaaaaaccctatcagtgtagtgaatgtggagaagccttcaggcaaaggtcaggtctttttcaacatcagagatatcaccacaaagacaaactggcttgatgaggtgttctctccttgtagaacatcagagaaggcacattgactagcaaacagcactttaggaaaagtcaccgtagcccactgtggcatcagaaaattcttgggggctgagttggaggctccctgcctctattctctctcctttgctttccttgaagtcagctttggaccacaataatttcactgtagatgatatgctaggatcaaagttaaacagcattcttcactgcaggacatctcagagcatgtaacataactgcatgattatatactctaagcaatagagagcttcatgactgagtaagagttttgaagtcagcagtgaatcaagtgcccacagatttgcaggcttaagcagaacaagggaagattgatatttttggatatgctatagcagctttctcctatgaaataaaactgatgatgtttggaagtatact

SEQ ID NO: 12849 - protein, 325 aa, Homo sapiens [sequence omitted]

SEQ ID NO: 12850 - DNA, 2711 bp, Homo sapiens
agagcggagaagaaagcgctccgaagagctagagctgacactcggcgatgagctaagacgctgtttcagagcgtttgggtcctctgaggccccttgaccaggagtgtctctgaagatacagtccaaagaaagttctccaaaacaaggagaacagtctgaagctggggatggcaacagcattggtgagtgcccattccctggctcccctgaatctgaagaaggaggggcttcgggtagtgagggaggatcactactctacttgggaacagggattcaagctgcaaggaaacagtaaaggccttggacaggagccattgtgcaaacaattcaggcagttgcgttatgaagagaccacaggacctcgagaagcactaagtcggctccgggagctctgtcaacagtgctacagcccgagacccataccaaggagcagatcctggagctgctggtgctggagcagtttctgatcatcctgcctaaggagctccaggcccgggtgcaggagcatcacccagagagcagggaggacgtggttgttgttctggaggatttgcagctggatcttggagaaacaggacaacaggtggacccagaccagccaaagaaacaaaaaatacttgtggaggagatggcccctctgaaaggagtacaggaacagcaggttcggcatgagtgtgaagttacaaagcctgagaaagagaagggtgaggagacaaggattgagaatgggaagcttattgtagtaacagactcttgtggaagagtagagtcatctgggaaaatatctgaacccatggaggctcataatgagggctctaacttggaaaggcatcaggccaagcccaaagagaagattgagtataaatgctcagaacgtgagcagagattcatccagcacttggacctgattgaacatgcgagtacacacacgggaaagaaactctgcgagtctgatgtgtgtcagagttccagtcttacaggacataagaaagtcctctctagagagaaaggtcatcagtgtcatgagtgtgggaaagcctttcagaggagttcacacctcgtcagacatcagaaaatccatcttggtgagaagccttatcagtgcaatgagtgtggcaaagtctttagccagaatgcaggccttttggaacatctcagaattcatactggagagaaaccttatctatgtatccattgtggaaaaaattttaggcgcagctctcaccttaatcgacatcagagaattcacagtcaggaggagccctgtgagtgcaaggagtgtggaaaaacctttagtcaggccttactcctcacccaccatcagagaatccatagtcactccaaaagccatcaatgtaacgagtgtggaaaagctttcagtttgacctcagaccttattcgacaccacagaattcatactggagaaaaacctttcaagtgtaacatatgccagaaagccttccgactaaactcacaccttgctcagcatgtaagaatccacaatgaagaaaaaccctatcagtgtagtgaatgtggagaagccttcaggcaaaggtcaggtctttttcaacatcagagatatcaccacaaagacaaactggcttgatgaggtgttctctccttgtagaacatcagagaaggcacattgactagcaaacagcactttaggaaaagtcaccgtagcccactgtggcatcagaaaattcttgggggctgagttggaggctccctgcctctattctctctcctttgctttccttgaagtcagctttggaccacaataatttcactgtagatgatatgctaggatcaaagttaaacagcattcttcactgcaggacatctcagagcatgtaacataactgcatgattatatactctaagcaatagagagcttcatgactgagtaagagttttgaagtcagcagtgaatcaagtgcccacagatttgcaggcttaagcagaacaagggaagattgatatttttggatatgctatagcagctttctcctatgaaataaaactgatgatgtttggaagtatactactctcaaaggtgtctttaaagtacaggttaatggtgaacattttcccccagtggcttcacctcattcctcccactggccttaccccttccttccccagtggaagcattttcaaaagcaaagataattttcgctggtgaacttcagaacttgccttcagggttagcttcatgtaattttaccatttcccatccccattccccaccacattatgtcaagattcaagttataaattaacgttttacttagactttgaaagagatttcatgagtaatttgaatgaaccttgctgaattaatctgaatagcaactgtctgacttgataactccagtgccagtatagtggctgctgcatagacactattcagtaaatgtctgatgaaagaaattggactttttccctttaatactgatgatgcaattttgaaatgttgcttgttctggaatacttcggaagttaaacaataaagtcagcttggagaggagatcatgatctttatactgtgaatagcagaatgtcacagatgaagaatattaaaattaggggcgtccactccaaaacatatcaccagagtgacaacttcagccctcagcctctgcaatccatatatatcctggtcttgggagtccatagaatactgtttccttctaataaaggtttcaaac

SEQ ID NO: 12851 - protein, 325 aa, Homo sapiens [sequence omitted]

SEQ ID NO: 12852 - DNA, 2848 bp, Homo sapiens
agagcggagaagaaagcgctccgaagagctagagctgacactcggcgatgagctaagacgctgtttcagagcgtttgggtcctctgaggccccttgaccaggagtgtctctgaagatacagtccaaagaaagttctccaaaacaaggagaacagtctgaagctggggatggcaacagcattggtgagtgcccattccctggctcccctgaatctgaagaaggaggggcttcgggtagtgagggaggatcactactctacttgggaacagggattcaagctgcaaggaaacagtaaaggccttggacaggagccattgtgcaaacaattcaggcagttgcgttatgaagagaccacaggacctcgagaagcactaagtcggctccgggagctctgtcaacagtgctacagcccgagacccataccaaggagcagatcctggagctgctggtgctggagcagtttctgatcatcctgcctaaggagctccaggcccgggtgcaggagcatcacccagagagcagggaggacgtggttgttgttctggaggatttgcagctggatcttggagaaacaggacaacaggtggacccagaccagccaaagaaacaaaaaatacttgtggaggagatggcccctctgaaaggagtacaggaacagcaggttcggcatgagtgtgaagttacaaagcctgagaaagagaagggtgaggagacaaggattgagaatgggaagcttattgtagtaacagactcttgtggaagagtagagtcatctgggaaaatatctgaacccatggaggctcataatgagggctctaacttggaaaggcatcaggccaagcccaaagagaagattgagtataaatgctcagaacgtgagcagagattcatccagcacttggacctgattgaacatgcgagtacacacacgggaaagaaactctgcgagtctgatgtgtgtcagagttccagtcttacaggacataagaaagtcctctctagagagaaaggtcatcagtgtcatgagtgtgggaaagcctttcagaggagttcacacctcgtcagacatcagaaaatccatcttggtgagaagccttatcagtgcaatgagtgtggcaaagtctttagccagaatgcaggccttttggaacatctcagaattcatactggagagaaaccttatctatgtatccattgtggaaaaaattttaggcgcagctctcaccttaatcgacatcagagaattcacagtcaggaggagccctgtgagtgcaaggagtgtggaaaaacctttagtcaggccttactcctcacccaccatcagagaatccatagtcactccaaaagccatcaatgtaacgagtgtggaaaagctttcagtttgacctcagaccttattcgacaccacagaattcatactggagaaaaacctttcaagtgtaacatatgccagaaagccttccgactaaactcacaccttgctcagcatgtaagaatccacaatgaagaaaaaccctatcagtgtagtgaatgtggagaagccttcaggcaaaggtcaggtctttttcaacatcagagatatcaccacaaagacaaactggcttgatgaggtgttctctccttgtagaacatcagagaaggcacattgactagcaaacagcactttaggaaaagtcaccgtagcccactgtggcatcagaaaattcttgggggctgagttggaggctccctgcctctattctctctcctttgctttccttgaagtcagctttggaccacaataatttcactgtagatgatatgctaggatcaaagttaaacagcattcttcactgcaggacatctcagagcatgtaacataactgcatgattatatactctaagcaatagagagcttcatgactgagtaagagttttgaagtcagcagtgaatcaagtgcccacagatttgcaggcttaagcagaacaagggaagattgatatttttggatatgctatagcagctttctcctatgaaataaaactgatgatgtttggaagtatactactctcaaaggtgtctttaaagtacaggttaatggtgaacattttcccccagtggcttcacctcattcctcccactggccttaccccttccttccccagtggaagcattttcaaaagcaaagataattttcgctggtgaacttcagaacttgccttcagggttagcttcatgtaattttaccatttcccatccccattccccaccacattatgtcaagattcaagttataaattaacgttttacttagactttgaaagagatttcatgagtaatttgaatgaaccttgctgaattaatctgaatagcaactgtctgacttgataactccagtgccagtatagtggctgctgcatagacactattcagtaaatgtctgatgaaagaaattggactttttccctttaatactgatgatgcaattttgaaatgttgcttgttctggaatacttcggaagttaaacaataaagtcagcttggagaggagatcatgatctttatactgtgaatagcagaatgtcacagatgaagaatattaaaattaggggcgtccactccaaaacatatcaccagagtgacaacttcagccctcagcctctgcaatccatatatatcctggtcttgggagtccatagaatactgtttccttctaataaaggtttcaaacaaatccctgcagatttatttaaagtgtttgtggaagataattttccatataagctgtgcagtattctatggtatatgtccccattgttcatcatttacgtcatttacagtttgatcaccataaacaatttttcagtg

SEQ ID NO: 12853 - protein, 325 aa, Homo sapiens [sequence omitted]

SEQ ID NO: 12854 - DNA, 1634 bp, Homo sapiens
gaagaaagcgctccgaagagctagagctgacactcggcgatgagctaagacgctgtttcagagcgtttgggtcctctgaggccccttgaccaggagtgtctctgaagatacagtccaaagaaagttctccaaaacaaggagaacagtctgaagctggggatggcaacagcattggacccagaccagccaaagaaacaaaaaatacttgtggaggagatggcccctctgaaaggagtacaggaacagcaggttcggcatgagtgtgaagttacaaagcctgagaaagagaagggtgaggagacaaggattgagaatgggaagcttattgtagtaacagactcttgtggaagagtagagtcatctgggaaaatatctgaacccatggaggctcataatgagggctctaacttggaaaggcatcaggccaagcccaaagagaagattgagtataaatgctcagaacgtgagcagagattcatccagcacttggacctgattgaacatgcgagtacacacacgggaaagaaactctgcgagtctgatgtgtgtcagagttccagtcttacaggacataagaaagtcctctctagagagaaaggtcatcagtgtcatgagtgtgggaaagcctttcagaggagttcacacctcgtcagacatcagaaaatccatcttggtgagaagccttatcagtgcaatgagtgtggcaaagtctttagccagaatgcaggccttttggaacatctcagaattcatactggagagaaaccttatctatgtatccattgtggaaaaaattttaggcgcagctctcaccttaatcgacatcagagaattcacagtcaggaggagccctgtgagtgcaaggagtgtggaaaaacctttagtcaggccttactcctcacccaccatcagagaatccatagtcactccaaaagccatcaatgtaacgagtgtggaaaagctttcagtttgacctcagaccttattcgacaccacagaattcatactggagaaaaacctttcaagtgtaacatatgccagaaagccttccgactaaactcacaccttgctcagcatgtaagaatccacaatgaagaaaaaccctatcagtgtagtgaatgtggagaagccttcaggcaaaggtcaggtctttttcaacatcagagatatcaccacaaagacaaactggcttgatgaggtgttctctccttgtagaacatcagagaaggcacattgactagcaaacagcactttaggaaaagtcaccgtagcccactgtggcatcagaaaattcttgggggctgagttggaggctccctgcctctattctctctcctttgctttccttgaagtcagctttggaccacaataatttcactgtagatgatatgctaggatcaaagttaaacagcattcttcactgcaggacatctcagagcatgtaacataactgcatgattatatactctaagcaatagagagcttcatgactgagtaagagttttgaagtcagcagtgaatcaagtgcccacagatttgcaggcttaagcagaacaagggaagattgatatttttggatatgctatagcagctttctcctatgaaataaaactgatgatgtttggaagtatact

SEQ ID NO: 12855 - protein, 344 aa, Homo sapiens; identical to SEQ ID NO: 12845

SEQ ID NO: 12856 - DNA, 1420 bp, Homo sapiens
aagagctagagctgacactcggcgatgagctaagacgctgtttcagagcgtttgggtcctctgaggccccttgaccaggtgaggagacaaggattgagaatgggaagcttattgtagtaacagactcttgtggaagagtagagtcatctgggaaaatatctgaacccatggaggctcataatgagggctctaacttggaaaggcatcaggccaagcccaaagagaagattgagtataaatgctcagaacgtgagcagagattcatccagcacttggacctgattgaacatgcgagtacacacacgggaaagaaactctgcgagtctgatgtgtgtcagagttccagtcttacaggacataagaaagtcctctctagagagaaaggtcatcagtgtcatgagtgtgggaaagcctttcagaggagttcacacctcgtcagacatcagaaaatccatcttggtgagaagccttatcagtgcaatgagtgtggcaaagtctttagccagaatgcaggccttttggaacatctcagaattcatactggagagaaaccttatctatgtatccattgtggaaaaaattttaggcgcagctctcaccttaatcgacatcagagaattcacagtcaggaggagccctgtgagtgcaaggagtgtggaaaaacctttagtcaggccttactcctcacccaccatcagagaatccatagtcactccaaaagccatcaatgtaacgagtgtggaaaagctttcagtttgacctcagaccttattcgacaccacagaattcatactggagaaaaacctttcaagtgtaacatatgccagaaagccttccgactaaactcacaccttgctcagcatgtaagaatccacaatgaagaaaaaccctatcagtgtagtgaatgtggagaagccttcaggcaaaggtcaggtctttttcaacatcagagatatcaccacaaagacaaactggcttgatgaggtgttctctccttgtagaacatcagagaaggcacattgactagcaaacagcactttaggaaaagtcaccgtagcccactgtggcatcagaaaattcttgggggctgagttggaggctccctgcctctattctctctcctttgctttccttgaagtcagctttggaccacaataatttcactgtagatgatatgctaggatcaaagttaaacagcattcttcactgcaggacatctcagagcatgtaacataactgcatgattatatactctaagcaatagagagcttcatgactgagtaagagttttgaagtcagcagtgaatcaagtgcccacagatttgcaggcttaagcagaacaagggaagattgatatttttggatatgctatagcagctttctcctatgaaataaaactgatgatgtttggaagtatact

SEQ ID NO: 12857 - protein, 270 aa, Homo sapiens
MEAHNEGSNLERHQAKPKEKIEYKCSEREQRFIQHLDLIEHASTHTGKKLCESDVCQSSSLTGHKKVLSREKGHQCHECGKAFQRSSHLVRHQKIHLGEKPYQCNECGKVFSQNAGLLEHLRIHTGEKPYLCIHCGKNFRRSSHLNRHQRIHSQEEPCECKECGKTFSQALLLTHHQRIHSHSKSHQCNECGKAFSLTSDLIRHHRIHTGEKPFKCNICQKAFRLNSHLAQHVRIHNEEKPYQCSECGEAFRQRSGLFQHQRYHHKDKLA

SEQ ID NO: 12858 - DNA, 2085 bp, Homo sapiens
aagagctagagctgacactcggcgatgagctaagacgctgtttcagagcgtttgggtcctctgaggccccttgaccaggtgaggagacaaggattgagaatgggaagcttattgtagtaacagactcttgtggaagagtagagtcatctgggaaaatatctgaacccatggaggctcataatgagggctctaacttggaaaggcatcaggccaagcccaaagagaagattgagtataaatgctcagaacgtgagcagagattcatccagcacttggacctgattgaacatgcgagtacacacacgggaaagaaactctgcgagtctgatgtgtgtcagagttccagtcttacaggacataagaaagtcctctctagagagaaaggtcatcagtgtcatgagtgtgggaaagcctttcagaggagttcacacctcgtcagacatcagaaaatccatcttggtgagaagccttatcagtgcaatgagtgtggcaaagtctttagccagaatgcaggccttttggaacatctcagaattcatactggagagaaaccttatctatgtatccattgtggaaaaaattttaggcgcagctctcaccttaatcgacatcagagaattcacagtcaggaggagccctgtgagtgcaaggagtgtggaaaaacctttagtcaggccttactcctcacccaccatcagagaatccatagtcactccaaaagccatcaatgtaacgagtgtggaaaagctttcagtttgacctcagaccttattcgacaccacagaattcatactggagaaaaacctttcaagtgtaacatatgccagaaagccttccgactaaactcacaccttgctcagcatgtaagaatccacaatgaagaaaaaccctatcagtgtagtgaatgtggagaagccttcaggcaaaggtcaggtctttttcaacatcagagatatcaccacaaagacaaactggcttgatgaggtgttctctccttgtagaacatcagagaaggcacattgactagcaaacagcactttaggaaaagtcaccgtagcccactgtggcatcagaaaattcttgggggctgagttggaggctccctgcctctattctctctcctttgctttccttgaagtcagctttggaccacaataatttcactgtagatgatatgctaggatcaaagttaaacagcattcttcactgcaggacatctcagagcatgtaacataactgcatgattatatactctaagcaatagagagcttcatgactgagtaagagttttgaagtcagcagtgaatcaagtgcccacagatttgcaggcttaagcagaacaagggaagattgatatttttggatatgctatagcagctttctcctatgaaataaaactgatgatgtttggaagtatactactctcaaaggtgtctttaaagtacaggttaatggtgaacattttcccccagtggcttcacctcattcctcccactggccttaccccttccttccccagtggaagcattttcaaaagcaaagataattttcgctggtgaacttcagaacttgccttcagggttagcttcatgtaattttaccatttcccatccccattccccaccacattatgtcaagattcaagttataaattaacgttttacttagactttgaaagagatttcatgagtaatttgaatgaaccttgctgaattaatctgaatagcaactgtctgacttgataactccagtgccagtatagtggctgctgcatagacactattcagtaaatgtctgatgaaagaaattggactttttccctttaatactgatgatgcaattttgaaatgttgcttgttctggaatacttcggaagttaaacaataaagtcagcttggagaggagatcatgatctttatactgtgaatagcagaatgtcacagatgaagaatattaaaattaggggcgtccactccaaaacatatcaccagagtgacaacttcagccctcagcctctgcaatccatatatatcctggtcttgggagtccatagaatactgtttccttctaataaaggtttcaaac

SEQ ID NO: 12859 - protein, 270 aa, Homo sapiens; identical to SEQ ID NO: 12857

SEQ ID NO: 12860 - DNA, 2222 bp, Homo sapiens
aagagctagagctgacactcggcgatgagctaagacgctgtttcagagcgtttgggtcctctgaggccccttgaccaggtgaggagacaaggattgagaatgggaagcttattgtagtaacagactcttgtggaagagtagagtcatctgggaaaatatctgaacccatggaggctcataatgagggctctaacttggaaaggcatcaggccaagcccaaagagaagattgagtataaatgctcagaacgtgagcagagattcatccagcacttggacctgattgaacatgcgagtacacacacgggaaagaaactctgcgagtctgatgtgtgtcagagttccagtcttacaggacataagaaagtcctctctagagagaaaggtcatcagtgtcatgagtgtgggaaagcctttcagaggagttcacacctcgtcagacatcagaaaatccatcttggtgagaagccttatcagtgcaatgagtgtggcaaagtctttagccagaatgcaggccttttggaacatctcagaattcatactggagagaaaccttatctatgtatccattgtggaaaaaattttaggcgcagctctcaccttaatcgacatcagagaattcacagtcaggaggagccctgtgagtgcaaggagtgtggaaaaacctttagtcaggccttactcctcacccaccatcagagaatccatagtcactccaaaagccatcaatgtaacgagtgtggaaaagctttcagtttgacctcagaccttattcgacaccacagaattcatactggagaaaaacctttcaagtgtaacatatgccagaaagccttccgactaaactcacaccttgctcagcatgtaagaatccacaatgaagaaaaaccctatcagtgtagtgaatgtggagaagccttcaggcaaaggtcaggtctttttcaacatcagagatatcaccacaaagacaaactggcttgatgaggtgttctctccttgtagaacatcagagaaggcacattgactagcaaacagcactttaggaaaagtcaccgtagcccactgtggcatcagaaaattcttgggggctgagttggaggctccctgcctctattctctctcctttgctttccttgaagtcagctttggaccacaataatttcactgtagatgatatgctaggatcaaagttaaacagcattcttcactgcaggacatctcagagcatgtaacataactgcatgattatatactctaagcaatagagagcttcatgactgagtaagagttttgaagtcagcagtgaatcaagtgcccacagatttgcaggcttaagcagaacaagggaagattgatatttttggatatgctatagcagctttctcctatgaaataaaactgatgatgtttggaagtatactactctcaaaggtgtctttaaagtacaggttaatggtgaacattttcccccagtggcttcacctcattcctcccactggccttaccccttccttccccagtggaagcattttcaaaagcaaagataattttcgctggtgaacttcagaacttgccttcagggttagcttcatgtaattttaccatttcccatccccattccccaccacattatgtcaagattcaagttataaattaacgttttacttagactttgaaagagatttcatgagtaatttgaatgaaccttgctgaattaatctgaatagcaactgtctgacttgataactccagtgccagtatagtggctgctgcatagacactattcagtaaatgtctgatgaaagaaattggactttttccctttaatactgatgatgcaattttgaaatgttgcttgttctggaatacttcggaagttaaacaataaagtcagcttggagaggagatcatgatctttatactgtgaatagcagaatgtcacagatgaagaatattaaaattaggggcgtccactccaaaacatatcaccagagtgacaacttcagccctcagcctctgcaatccatatatatcctggtcttgggagtccatagaatactgtttccttctaataaaggtttcaaacaaatccctgcagatttatttaaagtgtttgtggaagataattttccatataagctgtgcagtattctatggtatatgtccccattgttcatcatttacgtcatttacagtttgatcaccataaacaatttttcagtg

SEQ ID NO: 12861 - protein, 270 aa, Homo sapiens; identical to SEQ ID NO: 12857

SEQ ID NO: 12862 - DNA, 853 bp, Homo sapiens
gagctagagctgacactcggcgatgagctaagacgctgtttcagagcgtttgggtcctctgaggccccttgaccaggagtgtctctgaagatacagtccaaagaaagttctccaaaacaaggagaacagtctgaagctggggatggcaacagcattgggattcaagctgcaaggaaacagtaaaggccttggacaggagccattgtgcaaacaattcaggcagttgcgttatgaagagaccacaggacctcgagaagcactaagtcggctccgggagctctgtcaacagtgctacagcccgagacccataccaaggagcagatcctggagctgctggtgctggagcagtttctgatcatcctgcctaaggagctccaggcccgggtgcaggagcatcacccagagagcagggaggacgtggttgttgttctggaggatttgcagctggatcttggagaaacaggacaacaggtggtaagggtcagatgtgctctttttcaggaatgcaggaattgagatctctggccagacaggtggacatgggctcatcagcggaaggagaattactaagctttgattcagtttttttccagtctagctgttaatttccttaggtcttacctcaaccttacctggcccttgcttggagaaaactgaatgtgcaccagattccccatcttcttttctttgcccctctggggtttctctttcttctcttttttaacacctaggtgttttactgaacagcagtttcctaaacccacatatatctaattatgcctccatatacctaattgtccctaggacccagaccagccaaagaaacaaaaaatacttgtggaggagatggccc

SEQ ID NO: 12863 - protein, 70 aa, Homo sapiens
MATALGFKLQGNSKGLGQEPLCKQFRQLRYEETTGPREALSRLRELCQQCYSPRPIPRSRSWSCWCWSSF

SEQ ID NO: 12864 - DNA, 3002 bp, Homo sapiens
actcggcgatgagctaagacgctgtttcagagcgtttgggtcctctgaggccccttgaccaggagtgtctctgaagatacagtccaaagaaagttctccaaaacaaggagaacagtctgaagctggggatggcaacagcattggtgagtgcccattccctggctcccctgaatctgaagaaggaggggcttcgggtagtgagggaggatcactactctacttgggaacagggattcaagctgcaaggaaacagtaaaggccttggacaggagccattgtgcaaacaattcaggcagttgcgttatgaagagaccacaggacctcgagaagcactaagtcggctccgggagctctgtcaacagtgctacagcccgagacccataccaaggagcagatcctggagctgctggtgctggagcagtttctgatcatcctgcctaaggagctccaggcccgggtgcaggagcatcacccagagagcagggaggacgtggttgttgttctggaggatttgcagctggatcttggagaaacaggacaacaggtggtaagggtcagatgtgctctttttcaggaatgcaggaattgagatctctggccagacaggtggacatgggctcatcagcggaaggagaattactaagctttgattcagtttttttccagtctagctgttaatttccttaggtcttacctcaaccttacctggcccttgcttggagaaaactgaatgtgcaccagattccccatcttcttttctttgcccctctggggtttctctttcttctcttttttaacacctaggtgttttactgaacagcagtttcctaaacccacatatatctaattatgcctccatatacctaattgtccctaggacccagaccagccaaagaaacaaaaaatacttgtggaggagatggcccctctgaaaggagtacaggaacagcaggttcggcatgagtgtgaagttacaaagcctgagaaagagaagggtgaggagacaaggattgagaatgggaagcttattgtagtaacagactcttgtggaagagtagagtcatctgggaaaatatctgaacccatggaggctcataatgagggctctaacttggaaaggcatcaggccaagcccaaagagaagattgagtataaatgctcagaacgtgagcagagattcatccagcacttggacctgattgaacatgcgagtacacacacgggaaagaaactctgcgagtctgatgtgtgtcagagttccagtcttacaggacataagaaagtcctctctagagagaaaggtcatcagtgtcatgagtgtgggaaagcctttcagaggagttcacacctcgtcagacatcagaaaatccatcttggtgagaagccttatcagtgcaatgagtgtggcaaagtctttagccagaatgcaggccttttggaacatctcagaattcatactggagagaaaccttatctatgtatccattgtggaaaaaattttaggcgcagctctcaccttaatcgacatcagagaattcacagtcaggaggagccctgtgagtgcaaggagtgtggaaaaacctttagtcaggccttactcctcacccaccatcagagaatccatagtcactccaaaagccatcaatgtaacgagtgtggaaaagctttcagtttgacctcagaccttattcgacaccacagaattcatactggagaaaaacctttcaagtgtaacatatgccagaaagccttccgactaaactcacaccttgctcagcatgtaagaatccacaatgaagaaaaaccctatcagtgtagtgaatgtggagaagccttcaggcaaaggtcaggtctttttcaacatcagagatatcaccacaaagacaaactggcttgatgaggtgttctctccttgtagaacatcagagaaggcacattgactagcaaacagcactttaggaaaagtcaccgtagcccactgtggcatcagaaaattcttgggggctgagttggaggctccctgcctctattctctctcctttgctttccttgaagtcagctttggaccacaataatttcactgtagatgatatgctaggatcaaagttaaacagcattcttcactgcaggacatctcagagcatgtaacataactgcatgattatatactctaagcaatagagagcttcatgactgagtaagagttttgaagtcagcagtgaatcaagtgcccacagatttgcaggcttaagcagaacaagggaagattgatatttttggatatgctatagcagctttctcctatgaaataaaactgatgatgtttggaagtatactactctcaaaggtgtctttaaagtacaggttaatggtgaacattttcccccagtggcttcacctcattcctcccactggccttaccccttccttccccagtggaagcattttcaaaagcaaagataattttcgctggtgaacttcagaacttgccttcagggttagcttcatgtaattttaccatttcccatccccattccccaccacattatgtcaagattcaagttataaattaacgttttacttagactttgaaagagatttcatgagtaatttgaatgaaccttgctgaattaatctgaatagcaactgtctgacttgataactccagtgccagtatagtggctgctgcatagacactattcagtaaatgtctgatgaaagaaattggactttttccctttaatactgatgatgcaattttgaaatgttgcttgttctggaatacttcggaagttaaacaataaagtcagcttggagaggagatcatgatctttatactgtgaatagcagaatgtcacagatgaagaatattaaaattaggggcgtccactccaaaacatatcaccagagtgacaacttcagccctcagcctctgcaatccatatatatcctggtcttgggagtccatagaatactgtttccttctaataaaggtttcaaac

SEQ ID NO: 12865 - protein, 325 aa, Homo sapiens [sequence omitted]

SEQ ID NO: 12866 - DNA, 1611 bp, Homo sapiens
ggtaaacagagtacaaccttctgctgcatatttttcatccattcagcgcaattttaagtagatattaaaggagtgtctctgaagatacagtccaaagaaagttctccaaaacaaggagaacagtctgaagctggggatggcaacagcattggacccagaccagccaaagaaacaaaaaatacttgtggaggagatggcccctctgaaaggagtacaggaacagcaggttcggcatgagtgtgaagttacaaagcctgagaaagagaagggtgaggagacaaggattgagaatgggaagcttattgtagtaacagactcttgtggaagagtagagtcatctgggaaaatatctgaacccatggaggctcataatgagggctctaacttggaaaggcatcaggccaagcccaaagagaagattgagtataaatgctcagaacgtgagcagagattcatccagcacttggacctgattgaacatgcgagtacacacacgggaaagaaactctgcgagtctgatgtgtgtcagagttccagtcttacaggacataagaaagtcctctctagagagaaaggtcatcagtgtcatgagtgtgggaaagcctttcagaggagttcacacctcgtcagacatcagaaaatccatcttggtgagaagccttatcagtgcaatgagtgtggcaaagtctttagccagaatgcaggccttttggaacatctcagaattcatactggagagaaaccttatctatgtatccattgtggaaaaaattttaggcgcagctctcaccttaatcgacatcagagaattcacagtcaggaggagccctgtgagtgcaaggagtgtggaaaaacctttagtcaggccttactcctcacccaccatcagagaatccatagtcactccaaaagccatcaatgtaacgagtgtggaaaagctttcagtttgacctcagaccttattcgacaccacagaattcatactggagaaaaacctttcaagtgtaacatatgccagaaagccttccgactaaactcacaccttgctcagcatgtaagaatccacaatgaagaaaaaccctatcagtgtagtgaatgtggagaagccttcaggcaaaggtcaggtctttttcaacatcagagatatcaccacaaagacaaactggcttgatgaggtgttctctccttgtagaacatcagagaaggcacattgactagcaaacagcactttaggaaaagtcaccgtagcccactgtggcatcagaaaattcttgggggctgagttggaggctccctgcctctattctctctcctttgctttccttgaagtcagctttggaccacaataatttcactgtagatgatatgctaggatcaaagttaaacagcattcttcactgcaggacatctcagagcatgtaacataactgcatgattatatactctaagcaatagagagcttcatgactgagtaagagttttgaagtcagcagtgaatcaagtgcccacagatttgcaggcttaagcagaacaagggaagattgatatttttggatatgctatagcagctttctcctatgaaataaaactgatgatgtttggaagtatact

SEQ ID NO: 12867 - protein, 344 aa, Homo sapiens; identical to SEQ ID NO: 12845

SEQ ID NO: 12868 - DNA, 2276 bp, Homo sapiens
ggtaaacagagtacaaccttctgctgcatatttttcatccattcagcgcaattttaagtagatattaaaggagtgtctctgaagatacagtccaaagaaagttctccaaaacaaggagaacagtctgaagctggggatggcaacagcattggacccagaccagccaaagaaacaaaaaatacttgtggaggagatggcccctctgaaaggagtacaggaacagcaggttcggcatgagtgtgaagttacaaagcctgagaaagagaagggtgaggagacaaggattgagaatgggaagcttattgtagtaacagactcttgtggaagagtagagtcatctgggaaaatatctgaacccatggaggctcataatgagggctctaacttggaaaggcatcaggccaagcccaaagagaagattgagtataaatgctcagaacgtgagcagagattcatccagcacttggacctgattgaacatgcgagtacacacacgggaaagaaactctgcgagtctgatgtgtgtcagagttccagtcttacaggacataagaaagtcctctctagagagaaaggtcatcagtgtcatgagtgtgggaaagcctttcagaggagttcacacctcgtcagacatcagaaaatccatcttggtgagaagccttatcagtgcaatgagtgtggcaaagtctttagccagaatgcaggccttttggaacatctcagaattcatactggagagaaaccttatctatgtatccattgtggaaaaaattttaggcgcagctctcaccttaatcgacatcagagaattcacagtcaggaggagccctgtgagtgcaaggagtgtggaaaaacctttagtcaggccttactcctcacccaccatcagagaatccatagtcactccaaaagccatcaatgtaacgagtgtggaaaagctttcagtttgacctcagaccttattcgacaccacagaattcatactggagaaaaacctttcaagtgtaacatatgccagaaagccttccgactaaactcacaccttgctcagcatgtaagaatccacaatgaagaaaaaccctatcagtgtagtgaatgtggagaagccttcaggcaaaggtcaggtctttttcaacatcagagatatcaccacaaagacaaactggcttgatgaggtgttctctccttgtagaacatcagagaaggcacattgactagcaaacagcactttaggaaaagtcaccgtagcccactgtggcatcagaaaattcttgggggctgagttggaggctccctgcctctattctctctcctttgctttccttgaagtcagctttggaccacaataatttcactgtagatgatatgctaggatcaaagttaaacagcattcttcactgcaggacatctcagagcatgtaacataactgcatgattatatactctaagcaatagagagcttcatgactgagtaagagttttgaagtcagcagtgaatcaagtgcccacagatttgcaggcttaagcagaacaagggaagattgatatttttggatatgctatagcagctttctcctatgaaataaaactgatgatgtttggaagtatactactctcaaaggtgtctttaaagtacaggttaatggtgaacattttcccccagtggcttcacctcattcctcccactggccttaccccttccttccccagtggaagcattttcaaaagcaaagataattttcgctggtgaacttcagaacttgccttcagggttagcttcatgtaattttaccatttcccatccccattccccaccacattatgtcaagattcaagttataaattaacgttttacttagactttgaaagagatttcatgagtaatttgaatgaaccttgctgaattaatctgaatagcaactgtctgacttgataactccagtgccagtatagtggctgctgcatagacactattcagtaaatgtctgatgaaagaaattggactttttccctttaatactgatgatgcaattttgaaatgttgcttgttctggaatacttcggaagttaaacaataaagtcagcttggagaggagatcatgatctttatactgtgaatagcagaatgtcacagatgaagaatattaaaattaggggcgtccactccaaaacatatcaccagagtgacaacttcagccctcagcctctgcaatccatatatatcctggtcttgggagtccatagaatactgtttccttctaataaaggtttcaaac

SEQ ID NO: 12869 - protein, 344 aa, Homo sapiens; identical to SEQ ID NO: 12845

SEQ ID NO: 12870 - DNA, 2413 bp, Homo sapiens
ggtaaacagagtacaaccttctgctgcatatttttcatccattcagcgcaattttaagtagatattaaaggagtgtctctgaagatacagtccaaagaaagttctccaaaacaaggagaacagtctgaagctggggatggcaacagcattggacccagaccagccaaagaaacaaaaaatacttgtggaggagatggcccctctgaaaggagtacaggaacagcaggttcggcatgagtgtgaagttacaaagcctgagaaagagaagggtgaggagacaaggattgagaatgggaagcttattgtagtaacagactcttgtggaagagtagagtcatctgggaaaatatctgaacccatggaggctcataatgagggctctaacttggaaaggcatcaggccaagcccaaagagaagattgagtataaatgctcagaacgtgagcagagattcatccagcacttggacctgattgaacatgcgagtacacacacgggaaagaaactctgcgagtctgatgtgtgtcagagttccagtcttacaggacataagaaagtcctctctagagagaaaggtcatcagtgtcatgagtgtgggaaagcctttcagaggagttcacacctcgtcagacatcagaaaatccatcttggtgagaagccttatcagtgcaatgagtgtggcaaagtctttagccagaatgcaggccttttggaacatctcagaattcatactggagagaaaccttatctatgtatccattgtggaaaaaattttaggcgcagctctcaccttaatcgacatcagagaattcacagtcaggaggagccctgtgagtgcaaggagtgtggaaaaacctttagtcaggccttactcctcacccaccatcagagaatccatagtcactccaaaagccatcaatgtaacgagtgtggaaaagctttcagtttgacctcagaccttattcgacaccacagaattcatactggagaaaaacctttcaagtgtaacatatgccagaaagccttccgactaaactcacaccttgctcagcatgtaagaatccacaatgaagaaaaaccctatcagtgtagtgaatgtggagaagccttcaggcaaaggtcaggtctttttcaacatcagagatatcaccacaaagacaaactggcttgatgaggtgttctctccttgtagaacatcagagaaggcacattgactagcaaacagcactttaggaaaagtcaccgtagcccactgtggcatcagaaaattcttgggggctgagttggaggctccctgcctctattctctctcctttgctttccttgaagtcagctttggaccacaataatttcactgtagatgatatgctaggatcaaagttaaacagcattcttcactgcaggacatctcagagcatgtaacataactgcatgattatatactctaagcaatagagagcttcatgactgagtaagagttttgaagtcagcagtgaatcaagtgcccacagatttgcaggcttaagcagaacaagggaagattgatatttttggatatgctatagcagctttctcctatgaaataaaactgatgatgtttggaagtatactactctcaaaggtgtctttaaagtacaggttaatggtgaacattttcccccagtggcttcacctcattcctcccactggccttaccccttccttccccagtggaagcattttcaaaagcaaagataattttcgctggtgaacttcagaacttgccttcagggttagcttcatgtaattttaccatttcccatccccattccccaccacattatgtcaagattcaagttataaattaacgttttacttagactttgaaagagatttcatgagtaatttgaatgaaccttgctgaattaatctgaatagcaactgtctgacttgataactccagtgccagtatagtggctgctgcatagacactattcagtaaatgtctgatgaaagaaattggactttttccctttaatactgatgatgcaattttgaaatgttgcttgttctggaatacttcggaagttaaacaataaagtcagcttggagaggagatcatgatctttatactgtgaatagcagaatgtcacagatgaagaatattaaaattaggggcgtccactccaaaacatatcaccagagtgacaacttcagccctcagcctctgcaatccatatatatcctggtcttgggagtccatagaatactgtttccttctaataaaggtttcaaacaaatccctgcagatttatttaaagtgtttgtggaagataattttccatataagctgtgcagtattctatggtatatgtccccattgttcatcatttacgtcatttacagtttgatcaccataaacaatttttcagtg

SEQ ID NO: 12871 - protein, 344 aa, Homo sapiens; identical to SEQ ID NO: 12845

SEQ ID NO: 12872 - DNA, 2275 bp, Homo sapiens
gagtgtctctgaagatacagtccaaagaaagttctccaaaacaaggagaacagtctgaagctggggatggcaacagcattggtgagtgcccattccctggctcccctgaatctgaagaaggaggggcttcgggtagtgagggaggatcactactctacttgggaacagggattcaagctgcaaggaaacagtaaaggccttggacaggagccattgtgcaaacaattcaggcagttgcgttatgaagagaccacaggacctcgagaagcactaagtcggctccgggagctctgtcaacagtgctacagcccgagacccataccaaggagcagatcctggagctgctggtgctggagcagtttctgatcatcctgcctaaggagctccaggcccgggtgcaggagcatcacccagagagcagggaggacgtggttgttgttctggaggatttgcagctggatcttggagaaacaggacaacaggtggtaagggtcagatgtgctctttttcaggaatgcaggaattgagatctctggccagacaggtggacatgggctcatcagcggaaggagaattactaagctttgattcagtttttttccagtctagctgttaatttccttaggtcttacctcaaccttacctggcccttgcttggagaaaactgaatgtgcaccagattccccatcttcttttctttgcccctctggggtttctctttcttctcttttttaacacctaggtgttttactgaacagcagtttcctaaacccacatatatctaattatgcctccatatacctaattgtccctaggacccagaccagccaaagaaacaaaaaatacttgtggaggagatggcccctctgaaaggagtacaggaacagcaggttcggcatgagtgtgaagttacaaagcctgagaaagagaagggtgaggagacaaggattgagaatgggaagcttattgtagtaacagactcttgtggaagagtagagtcatctgggaaaatatctgaacccatggaggctcataatgagggctctaacttggaaaggcatcaggccaagcccaaagagaagattgagtataaatgctcagaacgtgagcagagattcatccagcacttggacctgattgaacatgcgagtacacacacgggaaagaaactctgcgagtctgatgtgtgtcagagttccagtcttacaggacataagaaagtcctctctagagagaaaggtcatcagtgtcatgagtgtgggaaagcctttcagaggagttcacacctcgtcagacatcagaaaatccatcttggtgagaagccttatcagtgcaatgagtgtggcaaagtctttagccagaatgcaggccttttggaacatctcagaattcatactggagagaaaccttatctatgtatccattgtggaaaaaattttaggcgcagctctcaccttaatcgacatcagagaattcacagtcaggaggagccctgtgagtgcaaggagtgtggaaaaacctttagtcaggccttactcctcacccaccatcagagaatccatagtcactccaaaagccatcaatgtaacgagtgtggaaaagctttcagtttgacctcagaccttattcgacaccacagaattcatactggagaaaaacctttcaagtgtaacatatgccagaaagccttccgactaaactcacaccttgctcagcatgtaagaatccacaatgaagaaaaaccctatcagtgtagtgaatgtggagaagccttcaggcaaaggtcaggtctttttcaacatcagagatatcaccacaaagacaaactggcttgatgaggtgttctctccttgtagaacatcagagaaggcacattgactagcaaacagcactttaggaaaagtcaccgtagcccactgtggcatcagaaaattcttgggggctgagttggaggctccctgcctctattctctctcctttgctttccttgaagtcagctttggaccacaataatttcactgtagatgatatgctaggatcaaagttaaacagcattcttcactgcaggacatctcagagcatgtaacataactgcatgattatatactctaagcaatagagagcttcatgactgagtaagagttttgaagtcagcagtgaatcaagtgcccacagatttgcaggcttaagcagaacaagggaagattgatatttttggatatgctatagcagctttctcctatgaaataaaactgatgatgtttggaagtatact

SEQ ID NO: 12873 - protein, 325 aa, Homo sapiens [sequence omitted]

SEQ ID NO: 12874 - DNA, 3077 bp, Homo sapiens
gagtgtctctgaagatacagtccaaagaaagttctccaaaacaaggagaacagtctgaagctggggatggcaacagcattggtgagtgcccattccctggctcccctgaatctgaagaaggaggggcttcgggtagtgagggaggatcactactctacttgggaacagggattcaagctgcaaggaaacagtaaaggccttggacaggagccattgtgcaaacaattcaggcagttgcgttatgaagagaccacaggacctcgagaagcactaagtcggctccgggagctctgtcaacagtgctacagcccgagacccataccaaggagcagatcctggagctgctggtgctggagcagtttctgatcatcctgcctaaggagctccaggcccgggtgcaggagcatcacccagagagcagggaggacgtggttgttgttctggaggatttgcagctggatcttggagaaacaggacaacaggtggtaagggtcagatgtgctctttttcaggaatgcaggaattgagatctctggccagacaggtggacatgggctcatcagcggaaggagaattactaagctttgattcagtttttttccagtctagctgttaatttccttaggtcttacctcaaccttacctggcccttgcttggagaaaactgaatgtgcaccagattccccatcttcttttctttgcccctctggggtttctctttcttctcttttttaacacctaggtgttttactgaacagcagtttcctaaacccacatatatctaattatgcctccatatacctaattgtccctaggacccagaccagccaaagaaacaaaaaatacttgtggaggagatggcccctctgaaaggagtacaggaacagcaggttcggcatgagtgtgaagttacaaagcctgagaaagagaagggtgaggagacaaggattgagaatgggaagcttattgtagtaacagactcttgtggaagagtagagtcatctgggaaaatatctgaacccatggaggctcataatgagggctctaacttggaaaggcatcaggccaagcccaaagagaagattgagtataaatgctcagaacgtgagcagagattcatccagcacttggacctgattgaacatgcgagtacacacacgggaaagaaactctgcgagtctgatgtgtgtcagagttccagtcttacaggacataagaaagtcctctctagagagaaaggtcatcagtgtcatgagtgtgggaaagcctttcagaggagttcacacctcgtcagacatcagaaaatccatcttggtgagaagccttatcagtgcaatgagtgtggcaaagtctttagccagaatgcaggccttttggaacatctcagaattcatactggagagaaaccttatctatgtatccattgtggaaaaaattttaggcgcagctctcaccttaatcgacatcagagaattcacagtcaggaggagccctgtgagtgcaaggagtgtggaaaaacctttagtcaggccttactcctcacccaccatcagagaatccatagtcactccaaaagccatcaatgtaacgagtgtggaaaagctttcagtttgacctcagaccttattcgacaccacagaattcatactggagaaaaacctttcaagtgtaacatatgccagaaagccttccgactaaactcacaccttgctcagcatgtaagaatccacaatgaagaaaaaccctatcagtgtagtgaatgtggagaagccttcaggcaaaggtcaggtctttttcaacatcagagatatcaccacaaagacaaactggcttgatgaggtgttctctccttgtagaacatcagagaaggcacattgactagcaaacagcactttaggaaaagtcaccgtagcccactgtggcatcagaaaattcttgggggctgagttggaggctccctgcctctattctctctcctttgctttccttgaagtcagctttggaccacaataatttcactgtagatgatatgctaggatcaaagttaaacagcattcttcactgcaggacatctcagagcatgtaacataactgcatgattatatactctaagcaatagagagcttcatgactgagtaagagttttgaagtcagcagtgaatcaagtgcccacagatttgcaggcttaagcagaacaagggaagattgatatttttggatatgctatagcagctttctcctatgaaataaaactgatgatgtttggaagtatactactctcaaaggtgtctttaaagtacaggttaatggtgaacattttcccccagtggcttcacctcattcctcccactggccttaccccttccttccccagtggaagcattttcaaaagcaaagataattttcgctggtgaacttcagaacttgccttcagggttagcttcatgtaattttaccatttcccatccccattccccaccacattatgtcaagattcaagttataaattaacgttttacttagactttgaaagagatttcatgagtaatttgaatgaaccttgctgaattaatctgaatagcaactgtctgacttgataactccagtgccagtatagtggctgctgcatagacactattcagtaaatgtctgatgaaagaaattggactttttccctttaatactgatgatgcaattttgaaatgttgcttgttctggaatacttcggaagttaaacaataaagtcagcttggagaggagatcatgatctttatactgtgaatagcagaatgtcacagatgaagaatattaaaattaggggcgtccactccaaaacatatcaccagagtgacaacttcagccctcagcctctgcaatccatatatatcctggtcttgggagtccatagaatactgtttccttctaataaaggtttcaaacaaatccctgcagatttatttaaagtgtttgtggaagataattttccatataagctgtgcagtattctatggtatatgtccccattgttcatcatttacgtcatttacagtttgatcaccataaacaatttttcagtg

SEQ ID NO: 12875 - protein, 325 aa, Homo sapiens [sequence omitted]

SEQ ID NO: 12876 - DNA, 1988 bp, Homo sapiens
ctggaggcgccggcagcgcccgccagacccgccagcccagcggcccgggctctggggaaaccggcgctcccgacaggggagcaccgggcctctgagctccctcgggagcctttcacgaggtcagctacgtctttgttgtgcgcgttcctgaacttttggtccattaaccaacaattagacacgccggtattcagtgcctggcgcggtgctagatgctgggtgtaatctcagaaaaatacattcaggggcgcgcctgagggtgctggctgctggcatctcaggtgctttacgtgcattcgtgaagaagcccatcagtatttcttgaataccagaccccaagctaagtgaagctttagcctctaagctcaacatgtatgaagctttgccaggccctgctcctgaaaatgaagatggccttgtgaaagtgaaggaggaagatcccacctgggagcaggtgtgcaactcacaggagggcagctcccacactcaggagatttgccgcctgcgctttcggcacttctgctaccaggaggctcacggaccccaggaagctctggcccaactccgagaactttgtcatcaatggctgagaccggagatgcacaccaaggaacagataatggaactgctggtgctggagcagttcctgaccatcctgcccaaggagctccagccctgtgtgaagacatatcctctggagagtggagaggaggcagtgacagtgctggagaatctagagacaggaagtggagacacaggacaacaggcctctgtctatattcagggacaggacatgcacccaatggtggcagaatatcaaggagtctctttggagtgtcagagcctccagctcctgcctgggataaccaccctgaagtgtgaacctccacagcgtcctcaagggaacccccaagaagtgagtgggcctgttccccacggatcagctcatctccaggaaaaaaaccccagagacaaggctgtagtgcctgtgtttaacccagtcaggtcccagacattggtgaagactgaggaagaaacagcccaggccgttgctgcagagaagtggtcacatctgagtctgactcggaggaacctctgtgggaactcagctcaggagacagttatgagcctcagtccgatgactgaagaaattgtaactaaagatagattgtttaaagcaaagcaagaaacttctgaagaaatggaacaaagtggagaagcctcaggaaagcccaacagagagtgtgcaccccagattccttgtagtactcctattgctactgaaaggacagttgcacatttgaacactctgaaggaccgtcacccaggtgatttgtgggcccgcatgcacatctcatccctggaatatgctgcaggagacattacccgaaaagggagaaaaaaagacaaagctcgagtgagtgaactgctccaaggcctctcattctctggtgactcagatgtggaaaaagataatgagcctgagatccagcctgctcaaaagaagttaaaggtatcatgtttcccagaaaagagttggaccaaaagagacattaaacccaattttccaagctggtcagcactggattctggacttttgaatctcaagagcgaaaagttgaacccagtagagctttttgaattattttttgatgatgaaacattcaacttaattgtcaatgaaaccaataattatgcttctcagaaaaatgtcagcttggaagtcacagttcaggaaatgaggtgtgtgtttggtgtcttacttttgagtggatttatgaggcatcctagaagggaaatgtattgggaagtctctgacaccgatcagaacctggttagagatgcaatcagaagggacagatttgaattgattttctcaaacctgcactttgcagataatggccacctagatcaaaaagataagtttacaaagttgagacctctcataaaacaaatgaataaaaatttcctcttgtatgctcccctgg

SEQ ID NO: 12877 - protein, 538 aa, Homo sapiens
MYEALPGPAPENEDGLVKVKEEDPTWEQVCNSQEGSSHTQEICRLRFRHFCYQEAHGPQEALAQLRELCHQWLRPEMHTKEQIMELLVLEQFLTILPKELQPCVKTYPLESGEEAVTVLENLETGSGDTGQQASVYIQGQDMHPMVAEYQGVSLECQSLQLLPGITTLKCEPPQRPQGNPQEVSGPVPHGSAHLQEKNPRDKAVVPVFNPVRSQTLVKTEEETAQAVAAEKWSHLSLTRRNLCGNSAQETVMSLSPMTEEIVTKDRLFKAKQETSEEMEQSGEASGKPNRECAPQIPCSTPIATERTVAHLNTLKDRHPGDLWARMHISSLEYAAGDITRKGRKKDKARVSELLQGLSFSGDSDVEKDNEPEIQPAQKKLKVSCFPEKSWTKRDIKPNFPSWSALDSGLLNLKSEKLNPVELFELFFDDETFNLIVNETNNYASQKNVSLEVTVQEMRCVFGVLLLSGFMRHPRREMYWEVSDTDQNLVRDAIRRDRFELIFSNLHFADNGHLDQKDKFTKLRPLIKQMNKNFLLYAP

SEQ ID NO: 12878 - DNA, 3064 bp, Homo sapiens
ctggaggcgccggcagcgcccgccagacccgccagcccagcggcccgggctctggggaaaccggcgctcccgacaggggagcaccgggcctctgagctccctcgggagcctttcacgaggtcagctacgtctttgttgtgcgcgttcctgaacttttggtccattaaccaacaattagacacgccggtattcagtgcctggcgcggtgctagatgctgggtgtaatctcagaaaaatacattcaggggcgcgcctgagggtgctggctgctggcatctcaggtgctttacgtgcattcgtgaagaagcccatcagtatttcttgaataccagaccccaagctaagtgaagctttagcctctaagctcaacatgtatgaagctttgccaggccctgctcctgaaaatgaagatggccttgtgaaagtgaaggaggaagatcccacctgggagcaggtgtgcaactcacaggagggcagctcccacactcaggagatttgccgcctgcgctttcggcacttctgctaccaggaggctcacggaccccaggaagctctggcccaactccgagaactttgtcatcaatggctgagaccggagatgcacaccaaggaacagataatggaactgctggtgctggagcagttcctgaccatcctgcccaaggagctccagccctgtgtgaagacatatcctctggagagtggagaggaggcagtgacagtgctggagaatctagagacaggaagtggagacacaggacaacaggcctctgtctatattcagggacaggacatgcacccaatggtggcagaatatcaaggagtctctttggagtgtcagagcctccagctcctgcctgggataaccaccctgaagtgtgaacctccacagcgtcctcaagggaacccccaagaagtgagtgggcctgttccccacggatcagctcatctccaggaaaaaaaccccagagacaaggctgtagtgcctgtgtttaacccagtcaggtcccagacattggtgaagactgaggaagaaacagcccaggccgttgctgcagagaagtggtcacatctgagtctgactcggaggaacctctgtgggaactcagctcaggagacagttatgagcctcagtccgatgactgaagaaattgtaactaaagatagattgtttaaagcaaagcaagaaacttctgaagaaatggaacaaagtggagaagcctcaggaaagcccaacagagagtgtgcaccccagattccttgtagtactcctattgctactgaaaggacagttgcacatttgaacactctgaaggaccgtcacccaggtgatttgtgggcccgcatgcacatctcatccctggaatatgctgcaggagacattacccgaaaagggagaaaaaaagacaaagctcgagtgagtgaactgctccaaggcctctcattctctggtgactcagatgtggaaaaagataatgagcctgagatccagcctgctcaaaagaagttaaaggtatcatgtttcccagaaaagagttggaccaaaagagacattaaacccaattttccaagctggtcagcactggattctggacttttgaatctcaagagcgaaaagttgaacccagtagagctttttgaattattttttgatgatgaaacattcaacttaattgtcaatgaaaccaataattatgcttctcagaaaaatgtcagcttggaagtcacagttcaggaaatgaggtgtgtgtttggtgtcttacttttgagtggatttatgaggcatcctagaagggaaatgtattgggaagtctctgacaccgatcagaacctggttagagatgcaatcagaagggacagatttgaattgattttctcaaacctgcactttgcagataatggccacctagatcaaaaagataagtttacaaagttgagacctctcataaaacaaatgaataaaaatttcctcttgtatgctcccctggaagaatactattgctttgataagtcaatgtgtgaatgctttgatagtgaccaattcctgaatggaaagcctattagaattggctataaaatttggtgtggtacaaccacacagggttatctggtttggtttgaaccctatcaagaagaatcaactatgaaggtagatgaggatcctgatcttgggttaggtggaaatctagtgatgaacttcgctgatgttcttttagagagaggtcagtatccctatcacctgtgttttgatagcttctttacaagtgtcaaattgttgtcagccttgaaaaagaagggggtgagggcaacaggaacaattcgtgagaacaggaccgaaaaatgtccccttatgaatgtagaacatatgaaaaaaatgaagagagggtattttgatttccgaatagaagaaaacaatgagataattttgtgtcgttggtatggggatggcattatcagtctgtgctccaatgctgtgggcatagaaccagtcaatgaggtaagctgttgtgatgctgataacgaagaaatccctcagataagtcaaccatccatagtaaaagtgtatgatgaatgcaaggaaggtgtagctaaaatggatcaaattatttcgaaatacagggtgaggataagaagcaagaaatggtactcaattttggtgagctacatgattgatgtagccatgaacaatgcatggcaactacacagagcctgtaacccaggtgcttctctagaccccttggattttcggagatttgttgcacatttctacttggaacacaatgctcatctgtcagattagggtacataaaatggacatagtgcagacattaataagacatagaaaaataataattatacatgctgttgtaccctcccaaagtaaatctgatatatgtaatgaagttattaaataatacttttaaaaatcagacatttatatagagtttcaaagactattgtaacaagtaatgttaaaaattgtctgtgagaatgttgaactgtagtacctttctctatgtcaagttttgtgtcagacatgggaaatcatgtatttgttcaattg

SEQ ID NO: 12879 - protein, 809 aa, Homo sapiens; identical to SEQ ID NO: 1288

SEQ ID NO: 12880 - DNA, 795 bp, Homo sapiens
agcaaggcagaaaagcagcaggcacattccactggagagagacgccacaggtgcaatgaatgtgggaaaagcttcactaagagttcagtactcattgagcaccagagaatccacactggggagaagccatatgaatgtgaagaatgtgggaaggccttcagccggaggtcaagcctgaatgaacatcggcggagccacactggagagaaaccctatcaatgtaaggagtgtgggaaagccttcagtgccagcaatggcctcactcgacacagaagaatccacacaggggaaaaaccatatgaatgcaaagtgtgtgggaaggctttcctcctcagctcatgccttgttcagcatcagaggatacacactggagagaagcgctatcagtgtcgtgagtgtggcaaagccttcattcagaatgcagggcttttccagcatctccgagtccacactggtgagaaaccctatcagtgcagtcagtgcagtaaactctttagtaagcggacacttcttaagaaacatcagaaaatccacactggagagagaccataagggtgatgagtttgggaaagccttcagtcatcattgcaaccttattaggcattttagaatccatactgttccagcagaactggactaattctgtggaccctcagacccctaaatggggccgtcttggaaatcaaaacctgaatcagaatatttcaaaagagaggaaataaaagttcagcttaaaactgttctgccctaaacctttggctttgaagtttatttttaaagcgttaaagaatacat

SEQ ID NO: 12881 - protein, 54 aa, Homo sapiens
MSLGKPSVIIATLLGILESILFQQNWTNSVDPQTPKWGRLGNQNLNQNISKERK

SEQ ID NO: 12882 - DNA, 304 bp, Homo sapiens
gtaaggagtgtgggaaagccttcagtgccagcaatggcctcactcgacacagaagaatccacacaggggaaaaaccatatgaatgcaaagtgtgtgggaaggctttcctcctcagctcatgccttgttcagcatcagaggatacacactggagagaagcgctatcagtgtcgtgagtgtggcaaagccttcattcagaatgcagggcttttccagcatctccgagtccacactgtcaaaacctgaatcagaatatttcaaaagagaggaaataaaagttcagcttaaaactgttctgccctaaa

SEQ ID NO: 12883 - protein, 89 aa, Homo sapiens
MASLDTEESTQGKNHMNAKCVGRLSSSAHALFSIRGYTLERSAISVVSVAKPSFRMQGFSSISESTLSKPESEYFKREEIKVQLKTVLP

SEQ ID NO: 12884 - DNA, 2344 bp, Homo sapiens
gcctttctttgtctgagataacgcccggagttctttgtcctgcctccaagacgataaaggagcgcagacacaaaggctccagaccatgaacatggacattctgaagtgctcttggaggatgtggaacatctgaaggtcaagcaggaaccaacagacatacagcttcagcctatggtgacacagctcagatatgaatctttttgcctccaccaatttcaagaacaagatggtgaaagtatacctgagaaccaggagttggcatcaaagcaagaaatcttaaaagaaatggaacatttgggggatagcaaactccaaagagatgtatctttggattctaagtacagagaaacttgtaaacgagacagcaaggcagaaaagcagcaggcacattccactggagagagacgccacaggtgcaatgaatgtgggaaaagcttcactaagagttcagtactcattgagcaccagagaatccacactggggagaagccatatgaatgtgaagaatgtgggaaggccttcagccggaggtcaagcctgaatgaacatcggcggagccacactggagagaaaccctatcaatgtaaggagtgtgggaaagccttcagtgccagcaatggcctcactcgacacagaagaatccacacaggggaaaaaccatatgaatgcaaagtgtgtgggaaggctttcctcctcagctcatgccttgttcagcatcagaggatacacactggagagaagcgctatcagtgtcgtgagtgtggcaaagccttcattcagaatgcagggcttttccagcatctccgagtccacactggtgagaaaccctatcagtgcagtcagtgcagtaaactctttagtaagcggacacttcttaagaaacatcagaaaatccacactggagagagaccataagggtgatgagtttgggaaagccttcagtcatcattgcaaccttattaggcattttagaatccatactgttccagcagaactggactaattctgtggaccctcagacccctaaatggggccgtcttggaaagtaagattttcaagtggcttattctgttcttataaaatttattttgtattgcattgaaccacttgtctacaaaccaggtgttggtgtctcctgtgtggatgactgtgattgtagggggttgctgggtggccttcttattccctagcctttggtccatttcttatgatttcctttaaaggcaccaaatcttatctggaaataaattgttatggaggggctgtttttgagcaatactgcatattgaacaattctaaaagaccagtatctatgtatacttttaaaaaaaagatttgctaagatcaaaggatattcagaggtgcatctttttctgtaagagtgacattttaaacaaatgtaaggttttggggaataagaatcgtccacattcccacaggaaatcattgctatggtctcccctaggaatgtgatagatagcttctataattatgcagcattatccatagtatgaaacctgtagttttaatggtttagaaatctatgtctcatttcatatctaactcatgtttttgatacgaatcaatatatatgttgatatcatgagttaatatgagtttgacatgaatcatcaacatagtatatacatatcaacataactatgttgatgattcatatcaaattctcaatgcaggtcattactgtaagttttccatttttgttacaaataataagtaagatgatactttaaaatctctgttcttcacaaggtacctctttaattcatagccttttatgtcagcattattcttcttttgggggttggtcagcaactttgagtgccattgcaagcagcatcatttaagtagttttataaagaaaagaagtctgatatcttgggcagcttgctgcttactggggagaccagcatgcttagacacttattgccagggttaaacatatgctctggcaccaagttcaaatctttcctccccatttgtgagctgtgggactttaggcaagttatctaaatgctgctatgctatagtctccccacctgtaaaacagaggatgataccaataccttcctcatagggtacataagattaaataaatacaaacttgtacttaaaatgtagctctcaataaatatgcattatgatttacatacgaaataatagcatttaacaaatgtaggtagaattttaagtatcatgttaaaattaggatacgaaatgcctctgctgacattcttgttactcttttctccacagtcaaaacctgaatcagaatatttcaaaagagaggaaataaaagttcagcttaaaactgttctgccctaaa

SEQ ID NO: 12885 - protein, 247 aa, Homo sapiens
MVTQLRYESFCLHQFQEQDGESIPENQELASKQEILKEMEHLGDSKLQRDVSLDSKYRETCKRDSKAEKQQAHSTGERRHRCNECGKSFTKSSVLIEHQRIHTGEKPYECEECGKAFSRRSSLNEHRRSHTGEKPYQCKECGKAFSASNGLTRHRRIHTGEKPYECKVCGKAFLLSSCLVQHQRIHTGEKRYQCRECGKAFIQNAGLFQHLRVHTGEKPYQCSQCSKLFSKRTLLKKHQKIHTGERP

SEQ ID NO: 12886 - DNA, 3399 bp, Homo sapiens
tggaactcttcgcaggcttttcctgtaaataaacctgtttggccgtggaattgcctcctgttactcgctctctacgtttatatcttcctaacaccttccggctctaatgttttgggtctcgatgaccatctaactcctaaatgctgggggccgctccccatagaaatgcctcgccggatttctccgcctcgcacccagtgggactgggatttttggccccggggtttgcaataagggagtcaccaagcagcagccacctctggaattcctagaaaggaaagagttgcctggcttcagccagtgggctcagaacggctgacgcatttccggcctttgcggttgatcggtcattggggtgctgcagccccgccacctgttccgtagcttgccggtgccccgaaggtgagtcttggccccttgtcgcgacccgccaggttcccagaagatttcaggtctgtgccttggagtaggcggggagggaacgtctgcgcaggcgtgacccccgcccctacacattcactggcctgaagcccccgtggagtaggtggaggtcccgccccttatcctgaagattaaacagcctttctttgtctgagataacgcccggagttctttgtcctgcctccaagacgataaaggagcgcagacacaaaggtgtcttctcctaaggaagattaaatcagaaaattttaaatcacagttatccctttacttaaagccagagtaagccttccaaattaaccccaggaatggcttcaacagaggaacagtacgatcttaagattgtgaaagtggaggaagaccctatctgggaccaagaaacccaccttcgagggaacaacttttctggccaagaagcctcccgacaactttttaggcagttttgttaccaagagactcctggtccccgagaagctctgagccggctccgagaactctgtcatcagtggctaaggccagaaatccacaccaaagagcaaatcttggagctgctggtgctggagcaattcctgactatcctgcctgaggagctccaggcctgggtgcgggagcaccatccggagagtggggaggaggctgtggctgtagttgaagatctggaacaagagcttagtgagccagggaaccaggctccagaccatgaacatggacattctgaagtgctcttggaggatgtggaacatctgaaggtcaagcaggaaccaacagacatacagcttcagcctatggtgacacagctcagatatgaatctttttgcctccaccaatttcaagaacaagatggtgaaagtatacctgagaaccaggagttggcatcaaagcaagaaatcttaaaagaaatggaacatttgggggatagcaaactccaaagagatgtatctttggattctaagtacagagaaacttgtaaacgagacagcaaggcagaaaagcagcaggcacattccactggagagagacgccacaggtgcaatgaatgtgggaaaagcttcactaagagttcagtactcattgagcaccagagaatccacactggggagaagccatatgaatgtgaagaatgtgggaaggccttcagccggaggtcaagcctgaatgaacatcggcggagccacactggagagaaaccctatcaatgtaaggagtgtgggaaagccttcagtgccagcaatggcctcactcgacacagaagaatccacacaggggaaaaaccatatgaatgcaaagtgtgtgggaaggctttcctcctcagctcatgccttgttcagcatcagaggatacacactggagagaagcgctatcagtgtcgtgagtgtggcaaagccttcattcagaatgcagggcttttccagcatctccgagtccacactggtgagaaaccctatcagtgcagtcagtgcagtaaactctttagtaagcggacacttcttaagaaacatcagaaaatccacactggagagagaccataagggtgatgagtttgggaaagccttcagtcatcattgcaaccttattaggcattttagaatccatactgttccagcagaactggactaattctgtggaccctcagacccctaaatggggccgtcttggaaagtaagattttcaagtggcttattctgttcttataaaatttattttgtattgcattgaaccacttgtctacaaaccaggtgttggtgtctcctgtgtggatgactgtgattgtagggggttgctgggtggccttcttattccctagcctttggtccatttcttatgatttcctttaaaggcaccaaatcttatctggaaataaattgttatggaggggctgtttttgagcaatactgcatattgaacaattctaaaagaccagtatctatgtatacttttaaaaaaaagatttgctaagatcaaaggatattcagaggtgcatctttttctgtaagagtgacattttaaacaaatgtaaggttttggggaataagaatcgtccacattcccacaggaaatcattgctatggtctcccctaggaatgtgatagatagcttctataattatgcagcattatccatagtatgaaacctgtagttttaatggtttagaaatctatgtctcatttcatatctaactcatgtttttgatacgaatcaatatatatgttgatatcatgagttaatatgagtttgacatgaatcatcaacatagtatatacatatcaacataactatgttgatgattcatatcaaattctcaatgcaggtcattactgtaagttttccatttttgttacaaataataagtaagatgatactttaaaatctctgttcttcacaaggtacctctttaattcatagccttttatgtcagcattattcttcttttgggggttggtcagcaactttgagtgccattgcaagcagcatcatttaagtagttttataaagaaaagaagtctgatatcttgggcagcttgctgcttactggggagaccagcatgcttagacacttattgccagggttaaacatatgctctggcaccaagttcaaatctttcctccccatttgtgagctgtgggactttaggcaagttatctaaatgctgctatgctatagtctccccacctgtaaaacagaggatgataccaataccttcctcatagggtacataagattaaataaatacaaacttgtacttaaaatgtagctctcaataaatatgcattatgatttacatacgaaataatagcatttaacaaatgtaggtagaattttaagtatcatgttaaaattaggatacgaaatgcctctgctgacattcttgttactcttttctccacagtcaaaacctgaatcagaatatttcaaaagagaggaaataaaagttcagcttaaaactgttctgccctaaa

SEQ ID NO: 12887 - protein, 406 aa, Homo sapiens; identical to SEQ ID NO: 1292

SEQ ID NO: 12888 - DNA, 2671 bp, Homo sapiens
tggaactcttcgcaggcttttcctgtaaataaacctgtttggccgtggaattgcctcctgttactcgctctctacgtttatatcttcctaacaccttccggctctaatgttttgggtctcgatgaccatctaactcctaaatgctgggggccgctccccatagaaatgcctcgccggatttctccgcctcgcacccagtgggactgggatttttggccccggggtttgcaataagggagtcaccaagcagcagccacctctggaattcctagaaaggaaagagttgcctggcttcagccagtgggctcagaacggctgacgcatttccggcctttgcggttgatcggtcattggggtgctgcagccccgccacctgttccgtagcttgccggtgccccgaaggctccagaccatgaacatggacattctgaagtgctcttggaggatgtggaacatctgaaggtcaagcaggaaccaacagacatacagcttcagcctatggtgacacagctcagatatgaatctttttgcctccaccaatttcaagaacaagatggtgaaagtatacctgagaaccaggagttggcatcaaagcaagaaatcttaaaagaaatggaacatttgggggatagcaaactccaaagagatgtatctttggattctaagtacagagaaacttgtaaacgagacagcaaggcagaaaagcagcaggcacattccactggagagagacgccacaggtgcaatgaatgtgggaaaagcttcactaagagttcagtactcattgagcaccagagaatccacactggggagaagccatatgaatgtgaagaatgtgggaaggccttcagccggaggtcaagcctgaatgaacatcggcggagccacactggagagaaaccctatcaatgtaaggagtgtgggaaagccttcagtgccagcaatggcctcactcgacacagaagaatccacacaggggaaaaaccatatgaatgcaaagtgtgtgggaaggctttcctcctcagctcatgccttgttcagcatcagaggatacacactggagagaagcgctatcagtgtcgtgagtgtggcaaagccttcattcagaatgcagggcttttccagcatctccgagtccacactggtgagaaaccctatcagtgcagtcagtgcagtaaactctttagtaagcggacacttcttaagaaacatcagaaaatccacactggagagagaccataagggtgatgagtttgggaaagccttcagtcatcattgcaaccttattaggcattttagaatccatactgttccagcagaactggactaattctgtggaccctcagacccctaaatggggccgtcttggaaagtaagattttcaagtggcttattctgttcttataaaatttattttgtattgcattgaaccacttgtctacaaaccaggtgttggtgtctcctgtgtggatgactgtgattgtagggggttgctgggtggccttcttattccctagcctttggtccatttcttatgatttcctttaaaggcaccaaatcttatctggaaataaattgttatggaggggctgtttttgagcaatactgcatattgaacaattctaaaagaccagtatctatgtatacttttaaaaaaaagatttgctaagatcaaaggatattcagaggtgcatctttttctgtaagagtgacattttaaacaaatgtaaggttttggggaataagaatcgtccacattcccacaggaaatcattgctatggtctcccctaggaatgtgatagatagcttctataattatgcagcattatccatagtatgaaacctgtagttttaatggtttagaaatctatgtctcatttcatatctaactcatgtttttgatacgaatcaatatatatgttgatatcatgagttaatatgagtttgacatgaatcatcaacatagtatatacatatcaacataactatgttgatgattcatatcaaattctcaatgcaggtcattactgtaagttttccatttttgttacaaataataagtaagatgatactttaaaatctctgttcttcacaaggtacctctttaattcatagccttttatgtcagcattattcttcttttgggggttggtcagcaactttgagtgccattgcaagcagcatcatttaagtagttttataaagaaaagaagtctgatatcttgggcagcttgctgcttactggggagaccagcatgcttagacacttattgccagggttaaacatatgctctggcaccaagttcaaatctttcctccccatttgtgagctgtgggactttaggcaagttatctaaatgctgctatgctatagtctccccacctgtaaaacagaggatgataccaataccttcctcatagggtacataagattaaataaatacaaacttgtacttaaaatgtagctctcaataaatatgcattatgatttacatacgaaataatagcatttaacaaatgtaggtagaattttaagtatcatgttaaaattaggatacgaaatgcctctgctgacattcttgttactcttttctccacagtcaaaacctgaatcagaatatttcaaaagagaggaaataaaagttcagcttaaaactgttctgccctaaa

SEQ ID NO: 12889 - protein, 247 aa, Homo sapiens; identical to SEQ ID NO: 12885

SEQ ID NO: 12890 - DNA, 3147 bp, Homo sapiens
tggaactcttcgcaggcttttcctgtaaataaacctgtttggccgtggaattgcctcctgttactcgctctctacgtttatatcttcctaacaccttccggctctaatgttttgggtctcgatgaccatctaactcctaaatgctgggggccgctccccatagaaatgcctcgccggatttctccgcctcgcacccagtgggactgggatttttggccccggggtttgcaataagggagtcaccaagcagcagccacctctggaattcctagaaaggaaagagttgcctggcttcagccagtgggctcagaacggctgacgcatttccggcctttgcggttgatcggtcattggggtgctgcagccccgccacctgttccgtagcttgccggtgccccgaaggtgtcttctcctaaggaagattaaatcagaaaattttaaatcacagttatccctttacttaaagccagagtaagccttccaaattaaccccaggaatggcttcaacagaggaacagtacgatcttaagattgtgaaagtggaggaagaccctatctgggaccaagaaacccaccttcgagggaacaacttttctggccaagaagcctcccgacaactttttaggcagttttgttaccaagagactcctggtccccgagaagctctgagccggctccgagaactctgtcatcagtggctaaggccagaaatccacaccaaagagcaaatcttggagctgctggtgctggagcaattcctgactatcctgcctgaggagctccaggcctgggtgcgggagcaccatccggagagtggggaggaggctgtggctgtagttgaagatctggaacaagagcttagtgagccagggaaccaggctccagaccatgaacatggacattctgaagtgctcttggaggatgtggaacatctgaaggtcaagcaggaaccaacagacatacagcttcagcctatggtgacacagctcagatatgaatctttttgcctccaccaatttcaagaacaagatggtgaaagtatacctgagaaccaggagttggcatcaaagcaagaaatcttaaaagaaatggaacatttgggggatagcaaactccaaagagatgtatctttggattctaagtacagagaaacttgtaaacgagacagcaaggcagaaaagcagcaggcacattccactggagagagacgccacaggtgcaatgaatgtgggaaaagcttcactaagagttcagtactcattgagcaccagagaatccacactggggagaagccatatgaatgtgaagaatgtgggaaggccttcagccggaggtcaagcctgaatgaacatcggcggagccacactggagagaaaccctatcaatgtaaggagtgtgggaaagccttcagtgccagcaatggcctcactcgacacagaagaatccacacaggggaaaaaccatatgaatgcaaagtgtgtgggaaggctttcctcctcagctcatgccttgttcagcatcagaggatacacactggagagaagcgctatcagtgtcgtgagtgtggcaaagccttcattcagaatgcagggcttttccagcatctccgagtccacactggtgagaaaccctatcagtgcagtcagtgcagtaaactctttagtaagcggacacttcttaagaaacatcagaaaatccacactggagagagaccataagggtgatgagtttgggaaagccttcagtcatcattgcaaccttattaggcattttagaatccatactgttccagcagaactggactaattctgtggaccctcagacccctaaatggggccgtcttggaaagtaagattttcaagtggcttattctgttcttataaaatttattttgtattgcattgaaccacttgtctacaaaccaggtgttggtgtctcctgtgtggatgactgtgattgtagggggttgctgggtggccttcttattccctagcctttggtccatttcttatgatttcctttaaaggcaccaaatcttatctggaaataaattgttatggaggggctgtttttgagcaatactgcatattgaacaattctaaaagaccagtatctatgtatacttttaaaaaaaagatttgctaagatcaaaggatattcagaggtgcatctttttctgtaagagtgacattttaaacaaatgtaaggttttggggaataagaatcgtccacattcccacaggaaatcattgctatggtctcccctaggaatgtgatagatagcttctataattatgcagcattatccatagtatgaaacctgtagttttaatggtttagaaatctatgtctcatttcatatctaactcatgtttttgatacgaatcaatatatatgttgatatcatgagttaatatgagtttgacatgaatcatcaacatagtatatacatatcaacataactatgttgatgattcatatcaaattctcaatgcaggtcattactgtaagttttccatttttgttacaaataataagtaagatgatactttaaaatctctgttcttcacaaggtacctctttaattcatagccttttatgtcagcattattcttcttttgggggttggtcagcaactttgagtgccattgcaagcagcatcatttaagtagttttataaagaaaagaagtctgatatcttgggcagcttgctgcttactggggagaccagcatgcttagacacttattgccagggttaaacatatgctctggcaccaagttcaaatctttcctccccatttgtgagctgtgggactttaggcaagttatctaaatgctgctatgctatagtctccccacctgtaaaacagaggatgataccaataccttcctcatagggtacataagattaaataaatacaaacttgtacttaaaatgtagctctcaataaatatgcattatgatttacatacgaaataatagcatttaacaaatgtaggtagaattttaagtatcatgttaaaattaggatacgaaatgcctctgctgacattcttgttactcttttctccacagtcaaaacctgaatcagaatatttcaaaagagaggaaataaaagttcagcttaaaactgttctgccctaaa

SEQ ID NO: 12891 - protein, 406 aa, Homo sapiens; identical to SEQ ID NO: 1292

SEQ ID NO: 12892 - DNA, 3176 bp, Homo sapiens
cagagagagagagaaaaactgctgaccctgtaagagagaactggccatcttgcagacagacagagccccgagtgttctttcaactacctgccacccatccaacaactcccctcggacctcagtatgggctggaacctgacacttggcatgacagtgaccccaggcatccaaaccatgacagttccatcagctctccaaatgagagacagagtctcactatgtcgcccaggcttgtcttgaactcctggactcaagagatcctcccatctcggcctctcaaagtgttgggattacaggcgtgagctattacacctgacttaagtctccattttcatatctatactttgggattccagaagacagaggtttgagtgtaaaacacaaaataacaaaaccacaacaaaaacaactctgtattctcgtccccaccattaccatctctcctttgtgatgtcaaagagaccagaggaagtggacagactcggggaagaatagccagagtaagccttccaaattaaccccaggaatggcttcaacagaggaacagtacgatcttaagattgtgaaagtggaggaagaccctatctgggaccaagaaacccaccttcgagggaacaacttttctggccaagaagcctcccgacaactttttaggcagttttgttaccaagagactcctggtccccgagaagctctgagccggctccgagaactctgtcatcagtggctaaggccagaaatccacaccaaagagcaaatcttggagctgctggtgctggagcaattcctgactatcctgcctgaggagctccaggcctgggtgcgggagcaccatccggagagtggggaggaggctgtggctgtagttgaagatctggaacaagagcttagtgagccagggaaccaggctccagaccatgaacatggacattctgaagtgctcttggaggatgtggaacatctgaaggtcaagcaggaaccaacagacatacagcttcagcctatggtgacacagctcagatatgaatctttttgcctccaccaatttcaagaacaagatggtgaaagtatacctgagaaccaggagttggcatcaaagcaagaaatcttaaaagaaatggaacatttgggggatagcaaactccaaagagatgtatctttggattctaagtacagagaaacttgtaaacgagacagcaaggcagaaaagcagcaggcacattccactggagagagacgccacaggtgcaatgaatgtgggaaaagcttcactaagagttcagtactcattgagcaccagagaatccacactggggagaagccatatgaatgtgaagaatgtgggaaggccttcagccggaggtcaagcctgaatgaacatcggcggagccacactggagagaaaccctatcaatgtaaggagtgtgggaaagccttcagtgccagcaatggcctcactcgacacagaagaatccacacaggggaaaaaccatatgaatgcaaagtgtgtgggaaggctttcctcctcagctcatgccttgttcagcatcagaggatacacactggagagaagcgctatcagtgtcgtgagtgtggcaaagccttcattcagaatgcagggcttttccagcatctccgagtccacactggtgagaaaccctatcagtgcagtcagtgcagtaaactctttagtaagcggacacttcttaagaaacatcagaaaatccacactggagagagaccataagggtgatgagtttgggaaagccttcagtcatcattgcaaccttattaggcattttagaatccatactgttccagcagaactggactaattctgtggaccctcagacccctaaatggggccgtcttggaaagtaagattttcaagtggcttattctgttcttataaaatttattttgtattgcattgaaccacttgtctacaaaccaggtgttggtgtctcctgtgtggatgactgtgattgtagggggttgctgggtggccttcttattccctagcctttggtccatttcttatgatttcctttaaaggcaccaaatcttatctggaaataaattgttatggaggggctgtttttgagcaatactgcatattgaacaattctaaaagaccagtatctatgtatacttttaaaaaaaagatttgctaagatcaaaggatattcagaggtgcatctttttctgtaagagtgacattttaaacaaatgtaaggttttggggaataagaatcgtccacattcccacaggaaatcattgctatggtctcccctaggaatgtgatagatagcttctataattatgcagcattatccatagtatgaaacctgtagttttaatggtttagaaatctatgtctcatttcatatctaactcatgtttttgatacgaatcaatatatatgttgatatcatgagttaatatgagtttgacatgaatcatcaacatagtatatacatatcaacataactatgttgatgattcatatcaaattctcaatgcaggtcattactgtaagttttccatttttgttacaaataataagtaagatgatactttaaaatctctgttcttcacaaggtacctctttaattcatagccttttatgtcagcattattcttcttttgggggttggtcagcaactttgagtgccattgcaagcagcatcatttaagtagttttataaagaaaagaagtctgatatcttgggcagcttgctgcttactggggagaccagcatgcttagacacttattgccagggttaaacatatgctctggcaccaagttcaaatctttcctccccatttgtgagctgtgggactttaggcaagttatctaaatgctgctatgctatagtctccccacctgtaaaacagaggatgataccaataccttcctcatagggtacataagattaaataaatacaaacttgtacttaaaatgtagctctcaataaatatgcattatgatttacatacgaaataatagcatttaacaaatgtaggtagaattttaagtatcatgttaaaattaggatacgaaatgcctctgctgacattcttgttactcttttctccacagtcaaaacctgaatcagaatatttcaaaagagaggaaataaaagttcagcttaaaactgttctgccctaaa

SEQ ID NO: 12893 - protein, 406 aa, Homo sapiens; identical to SEQ ID NO: 1292

SEQ ID NO: 12894 - DNA, 3551 bp, Homo sapiens
attgctgggcaactaggtcccgccggagcgttccagctcaaagattacctgctgcagtcaggcagaaatgtaaagtctttcctgtttgattgggaactgacccaggtgccaggcttggggggacaccggacaaccaaaggcaatatgtggactcggcaagccactggtccctaaacctgaataagtttccgggcagagctgcatttattgacggttatgaaagctgatttagaagcagcaacgcagcctcttgcctggaattgggatgatgcggctgaaaccaccttcctggcagccaaacaggctattcagcaggcacaagccctatgggtagctgatcggggcacccatttaaacttgatgtgcatgtgaccagatagttttgactggggcttatggcatcacacagagctctttagaatgccagtagacttttggtcccaactttggaagggagctgagctccagtattcctcgacagagaagcagttactaactgcatatgctgccctttagactcgtgacagcctggcaggatgggctacagtcgtcgcgcgcatgacttacccaatagcaggccccgagtgttctttcaactacctgccacccatccaacaactcccctcggacctcagtatgggctggaacctgacacttggcatgacagtgaccccaggcatccaaaccatgacagttccatcagctctccaaatgagactttgggattccagaagacagaggtttgagtgtaaaacacaaaataacaaaaccacaacaaaaacaactctgtattctcgtccccaccattaccatctctcctttgtgatgtcaaagagaccagaggaagtggacagactcggggaagaatagccagagtaagccttccaaattaaccccaggaatggcttcaacagaggaacagtacgatcttaagattgtgaaagtggaggaagaccctatctgggaccaagaaacccaccttcgagggaacaacttttctggccaagaagcctcccgacaactttttaggcagttttgttaccaagagactcctggtccccgagaagctctgagccggctccgagaactctgtcatcagtggctaaggccagaaatccacaccaaagagcaaatcttggagctgctggtgctggagcaattcctgactatcctgcctgaggagctccaggcctgggtgcgggagcaccatccggagagtggggaggaggctgtggctgtagttgaagatctggaacaagagcttagtgagccagggaaccaggctccagaccatgaacatggacattctgaagtgctcttggaggatgtggaacatctgaaggtcaagcaggaaccaacagacatacagcttcagcctatggtgacacagctcagatatgaatctttttgcctccaccaatttcaagaacaagatggtgaaagtatacctgagaaccaggagttggcatcaaagcaagaaatcttaaaagaaatggaacatttgggggatagcaaactccaaagagatgtatctttggattctaagtacagagaaacttgtaaacgagacagcaaggcagaaaagcagcaggcacattccactggagagagacgccacaggtgcaatgaatgtgggaaaagcttcactaagagttcagtactcattgagcaccagagaatccacactggggagaagccatatgaatgtgaagaatgtgggaaggccttcagccggaggtcaagcctgaatgaacatcggcggagccacactggagagaaaccctatcaatgtaaggagtgtgggaaagccttcagtgccagcaatggcctcactcgacacagaagaatccacacaggggaaaaaccatatgaatgcaaagtgtgtgggaaggctttcctcctcagctcatgccttgttcagcatcagaggatacacactggagagaagcgctatcagtgtcgtgagtgtggcaaagccttcattcagaatgcagggcttttccagcatctccgagtccacactggtgagaaaccctatcagtgcagtcagtgcagtaaactctttagtaagcggacacttcttaagaaacatcagaaaatccacactggagagagaccataagggtgatgagtttgggaaagccttcagtcatcattgcaaccttattaggcattttagaatccatactgttccagcagaactggactaattctgtggaccctcagacccctaaatggggccgtcttggaaagtaagattttcaagtggcttattctgttcttataaaatttattttgtattgcattgaaccacttgtctacaaaccaggtgttggtgtctcctgtgtggatgactgtgattgtagggggttgctgggtggccttcttattccctagcctttggtccatttcttatgatttcctttaaaggcaccaaatcttatctggaaataaattgttatggaggggctgtttttgagcaatactgcatattgaacaattctaaaagaccagtatctatgtatacttttaaaaaaaagatttgctaagatcaaaggatattcagaggtgcatctttttctgtaagagtgacattttaaacaaatgtaaggttttggggaataagaatcgtccacattcccacaggaaatcattgctatggtctcccctaggaatgtgatagatagcttctataattatgcagcattatccatagtatgaaacctgtagttttaatggtttagaaatctatgtctcatttcatatctaactcatgtttttgatacgaatcaatatatatgttgatatcatgagttaatatgagtttgacatgaatcatcaacatagtatatacatatcaacataactatgttgatgattcatatcaaattctcaatgcaggtcattactgtaagttttccatttttgttacaaataataagtaagatgatactttaaaatctctgttcttcacaaggtacctctttaattcatagccttttatgtcagcattattcttcttttgggggttggtcagcaactttgagtgccattgcaagcagcatcatttaagtagttttataaagaaaagaagtctgatatcttgggcagcttgctgcttactggggagaccagcatgcttagacacttattgccagggttaaacatatgctctggcaccaagttcaaatctttcctccccatttgtgagctgtgggactttaggcaagttatctaaatgctgctatgctatagtctccccacctgtaaaacagaggatgataccaataccttcctcatagggtacataagattaaataaatacaaacttgtacttaaaatgtagctctcaataaatatgcattatgatttacatacgaaataatagcatttaacaaatgtaggtagaattttaagtatcatgttaaaattaggatacgaaatgcctctgctgacattcttgttactcttttctccacagtcaaaacctgaatcagaatatttcaaaagagaggaaataaaagttcagcttaaaactgttctgccctaaa

SEQ ID NO: 12895 - protein, 406 aa, Homo sapiens; identical to SEQ ID NO: 1292

SEQ ID NO: 12896 - DNA, 364 bp, Homo sapiens
tggaacatttgggggatagcaaactccaaagagatgtatctttggattctaagtacagagaaacttgtaaacgagacagcaaggcagaaaagcagcaggcacattccactggagagagacgccacaggtgcaatgaatgtgggaaaagcttcactaagagttcagtactcattgagcaccagagaatccacactggggagaagccatatgaatgtgaagaatgtgggaaggccttcagccggaggtcaagcctgaatgaacatcggcggagccacactggagagaaaccctatcaattcaaaacctgaatcagaatatttcaaaagagaggaaataaaagttcagcttaaaactgttctgccct

SEQ ID NO: 12897 - protein, 35 aa, Homo sapiens
MNIGGATLERNPINSKPESEYFKREEIKVQLKTVL

SEQ ID NO: 12898 - DNA, 860 bp, Homo sapiens
tggaactcttcgcaggcttttcctgtaaataaacctgtttggccgtggaattgcctcctgttactcgctctctacgtttatatcttcctaacaccttccggctctaatgttttgggtctcgatgaccatctaactcctaaatgctgggggccgctccccatagaaatgcctcgccggatttctccgcctcgcacccagtgggactgggatttttggccccggggtttgcaataagggagtcaccaagcagcagccacctctggaattcctagaaaggaaagagttgcctggcttcagccagtgggctcagaacggctgacgcatttccggcctttgcggttgatcggtcattggggtgctgcagccccgccacctgttccgtagcttgccggtgccccgaagccagagtaagccttccaaattaaccccaggaatggcttcaacagaggaacagtacgatcttaagattgtgaaagtggaggaagaccctatctgggaccaagaaacccaccttcgagggaacaacttttctggccaagaagcctcccgacaactttttaggcagttttgttaccaagagactcctggtccccgagaagctctgagccggctccgagaactctgtcatcagtggctaaggccagaaatccacaccaaagagcaaatcttggagctgctggtgctggagcaattcctgactatcctgcctgaggagctccaggcctgggtgcgggagcaccatccggagagtggggaggaggctgtggctgtagttgaagatctggaacaagagcttagtgagccagggaaccaggctccagaccatgaacatggacattctgaagtgctcttggaggatg

SEQ ID NO: 12899 - protein, 141 aa, Homo sapiens
MASTEEQYDLKIVKVEEDPIWDQETHLRGNNFSGQEASRQLFRQFCYQETPGPREALSRLRELCHQWLRPEIHTKEQILELLVLEQFLTILPEELQAWVREHHPESGEEAVAVVEDLEQELSEPGNQAPDHEHGHSEVLLE

SEQ ID NO: 12900 - DNA, 735 bp, Homo sapiens
agagaaaaactgctgaccctgtaagagagaactggccatcttgcagacagacagagccccgagtgttctttcaactacctgccacccatccaacaactcccctcggacctcagtatgggctggaacctgacacttggcatgacagtgactttgggattccagaagacagaggtttgagtgtaaaacacaaaataacaaaaccacaacaaaaacaactctgtattctcgtccccaccattaccatctctcctttgtgatgtcaaagagaccagaggaagtggacagactcggggaagaataggtgtcttctcctaaggaagattaaatcagaaaattttaaatcacagttatccctttacttaaagccagagtaagccttccaaattaaccccaggaatggcttcaacagaggaacagtacgatcttaagattgtgaaagtggaggaagaccctatctgggaccaagaaacccaccttcgagggaacaacttttctggccaagaagcctcccgacaactttttaggcagttttgttaccaagagactcctggtccccgagaagctctgagccggctccgagaactctgtcatcagtggctaaggccagaaatccacaccaaagagcaaatcttggagctgctggtgctggagcaattcctgactatcctgcctgaggagctccaggcctgggtgcgggagcaccatccggagagtggggaggaggctgtggctgta

SEQ ID NO: 12901 - protein, 112 aa, Homo sapiens
MASTEEQYDLKIVKVEEDPIWDQETHLRGNNFSGQEASRQLFRQFCYQETPGPREALSRLRELCHQWLRPEIHTKEQILELLVLEQFLTILPEELQAWVREHHPESGEEAVA

SEQ ID NO: 12902 - DNA, 3575 bp, Homo sapiens
agtggcttctgtgccccgccctgcgggtggtttgctagtttcaagcactttgtgagtatggggtgaatcggcgtcggccttccactgtggggttaaatctcatcccgcggctctcctcctgtcggtcctgcagttcttttgtccccgggtagagggatcttctgcagaaatagcgctggaagctagagtgaggcctgagtactgccttggcctaggatggctagagaattaagtgaaagcacagccctggatgcccagtctacagaagaccagatggagcttctggtcataaaggtggaggaagaagaagccggttttcccagtagcccagatctgggttctgagggctcccgcgagcgcttccgaggcttccgctacccggaggctgcaggcccccgcgaggcgctgagtcggctccgagagctctgccgacagtggctgcagcctgagatgcacagcaaggagcagatcctggagctgctggtgctggagcagttcctgaccatcctgccggggaatctgcagagctgggtgcgggagcagcatccagagagcggggaggaggtggtggtgctattggagtatttggagaggcagctggatgagccggcgccgcaggtagaaagaacaggtttagtatctgagcgctgtggcctgtttcctcctgaaatcccagatcagagtgaggggcattcctttaacatccaggagttcttcatctcttttttgtaccgtgaacctccttggcagtaaggtgaagtccctggactccttctcagaataattttttttttaaaatacataaaccataaaggattacaaaagaacgcagtcatatcaacatacagtttgcaaagtattaactttgtattaaagtcatacttttttttattagtacactaaataataaaacctacggacagggcttataactggcaattacaaagcagtgataagtatctctttgcttggttgtaatgtgatgtaaaaacatctgcaggttctattggtgacaaagtcgtgggtactgcttatgctacattgatttgttgcttccattcataattggaaggaaatgctaactttctcttaaagactagttaaaaataagattagcttttgtcctgttcaagttcatggactacgtgggaaggagttcatggaccactggttatgaacctctggtagaaaatgggccgacttttacctccatgttcttccctgttttatgagactgtgtcctctttgcatcatcctgtgtccctgtgcacacaccctcagaggacctgtgtggccagagccttctaaatggtgagctggataccagggttcttgacttgggtctgttgcacccaaggcctgtaacagtggaaagtcagtgcgagtctcttagcttcattctttataaaggatgtgggaaattctgagctgcacatgagaaagtaacttgaaaactgtaattttataataactataaatgtctggaaggaaacctgcatacatatcgtatgccaggccatgttaggtgatttcacgtactgtgatgttgtttgggtcccccaaactccataaactagagattgtaatccccttttcagataataaaaggtattaatattctctgagaattttgcaccagtttccaatggattttcataaaagcacaaatgtatatatgaaggagcatagagtaatgataagaacgtgtgctctggcatcattctacctgagctcccatcctagcattgccactgattagctatttaaactggctgtgccttaatttccctatcagtaaaatgggtataataataatacctcccttataagattgttgttttctgcgttaaatgagttaacatttataatgctcttggaaatagtgccagccacctaggtagttctatggaagtgtttgatgaaaacatgaaaataagaacaaatgatttctaggtttcaggtgttgaccaggggcaagaactgctctgttgcaagatggcactattgacaccagccccagggtcacaaagtagccaatttcagctaatgaaggctctgctcaagcatgaatctgtgggatcccagcctttacaagatagagttctccaggtccccgtgcttgcccatggaggatgctgcagagaagataaagtggtagcttctaggcttactccagagtcccaggtgatgaaaaacagactaagagcagggacttgcctccagctgaggagcttccagaaaaggagcatgggaagatatcgtgccacctgagagaagacattgcccagattcctacatgtgcagaagctggtgaacaggagggcaggctacaaagaaagcagaaaaatgccacaggagggaggcggcacatctgccatgaatgtggaaagagttttgctcaaagctcaggcctgagtaaacacaggagaatccacactggtgagaaaccctacgaatgtgaagagtgtggcaaagccttcattgggagctctgcccttgtcattcatcagagagtccacactggtgagaagccatatgagtgtgaagaatgtggtaaggccttcagtcatagctcagaccttatcaagcatcagagaacccacactggggagaagccctatgagtgtgatgactgtgggaagaccttcagccagagctgcagcctccttgaacatcacagaatccacattggtcagattcataaagtcttatatccccctctgtgccttttctgcaggtgctaataaatgtttattgaatgtaccagtgagattaccttcatagatctgaaaatctgatgttatccaggtttctgaagaacttctcgccaaggccatttgtgcttgtgtccaattctctgacctagattgtgactcaatctagtgtgtttcttaccaagtacataggcagagcagggttactgtgattgaaagaatccattttttttttggagacgtagtcttgctctgtcgcccaggctggagtgcagtggcacaatcttggctcactgcaacctccacctcctgggttcaagcgattctcctgcctcagcctcctgagtagctgggattacaggtgtgtgccaccatgcccggctaattttttatgtttttagtagagacgggattttaccgtgttagccaggatggtctcgatctcctaacctcatgatcctcctgcctcagcctaccaaagtgctgggattacaggcatgagccaccatgcccggccaagaatccatatttctttaccagactaggaattctattctagtgcaaatgccttaaaaagcttatcactaaatcattacgaatgtgtgccatccgtggaattgcttttttttttttttttttgtaaatatgaggtctcactatgttgcccaggctggtctcgaaatcctgggcaatcctcctgcctcaccctctcaagtactggaattacaggcgtgagccaccatacccagcccaaatttcactctttaatgttttcctgttgctattctttaaggaaaaaactttcctattcagacagtgtgaaaatcagtcatcaagtcagaataaaatgatgaatattct

SEQ ID NO: 12903 - protein, 91 aa, Homo sapiens
MALLTPAPGSQSSQFQLMKALLKHESVGSQPLQDRVLQVPVLAHGGCCREDKVVASRLTPESQVMKNRLRAGTCLQLRSFQKRSMGRYRAT

SEQ ID NO: 12904 - DNA, 1795 bp, Homo sapiens
agtttcaagcactttgtgagtatggggtgaatcggcgtcggccttccactgtggggttaaatctcatcccgcggctctcctcctgtcggtcctgcagttcttttgtccccgggtagaggtttcaggtgttgaccaggggcaagaactgctctgttgcaagatggcactattgacaccagccccagggtcacaaagtagccaatttcagctaatgaaggctctgctcaagcatgaatctgtgggatcccagcctttacaagatagagttctccaggtccccgtgcttgcccatggaggatgctgcagagaagataaagtggtagcttctaggcttactccagagtcccaggggttgttgaaagtggaagatgtggccctgaccctcacccctgaatggacacagcaggattcatctcaggggaatctctgtagagatgaaaagcaggagaaccatggcagcctggtctccctgggtgatgaaaaacagactaagagcagggacttgcctccagctgaggagcttccagaaaaggagcatgggaagatatcgtgccacctgagagaagacattgcccagattcctacatgtgcagaagctggtgaacaggagggcaggctacaaagaaagcagaaaaatgccacaggagggaggcggcacatctgccatgaatgtggaaagagttttgctcaaagctcaggcctgagtaaacacaggagaatccacactggtgagaaaccctacgaatgtgaagagtgtggcaaagccttcattgggagctctgcccttgtcattcatcagagagtccacactggtgagaagccatatgagtgtgaagaatgtggtaaggccttcagtcatagctcagaccttatcaagcatcagagaacccacactggggagaagccctatgagtgtgatgactgtgggaagaccttcagccagagctgcagcctccttgaacatcacagaatccacactggggagaagccgtatcagtgcagtatgtgtggcaaagcctttaggcgaagttcacatctcctgagacatcagaggatccatactggggataaaaatgttcaggaacctgagcagggagaggcctggaaaagtaggatggaaagccagttggaaaatgttgaaactcccatgtcttataaatgtaatgagtgtgaaagaagtttcactcagaatacaggcctcattgaacatcaaaaaatccacactggtgagaaaccctatcagtgtaatgcgtgtggaaaaggcttcacccgaatttcataccttgttcaacatcagagaagccatgtagggaaaaacatcctatcacagtgacccatgccatacatgccagagttggtgctcatttgtcactgatctgaagccactccccctggagtctcaactatagaaattgtgggctgggctttatttaccactacacattatcaggtgttagaaaatgtagactgggttagacaaattatcttctaagttctagaaggggtttgtaatcaaaacatatttgataggaggctacgggagagttgtctagaagaggtaagacctgaaactgtttgttctctcccactagaattaaatggatgtttagactggctacttgccctaaaccagcacttggtgatgtctactgggtggatggttgtgatttgggggctgcttctctgaccattctttttgactgtaatgaatcctccacagttggtcagattcataaagtcttatatccccctctgtgccttttctgcaggtgctaataaatgtttattgaatgta

SEQ ID NO: 12905 - protein, 390 aa, Homo sapiens
MALLTPAPGSQSSQFQLMKALLKHESVGSQPLQDRVLQVPVLAHGGCCREDKVVASRLTPESQGLLKVEDVALTLTPEWTQQDSSQGNLCRDEKQENHGSLVSLGDEKQTKSRDLPPAEELPEKEHGKISCHLREDIAQIPTCAEAGEQEGRLQRKQKNATGGRRHICHECGKSFAQSSGLSKHRRIHTGEKPYECEECGKAFIGSSALVIHQRVHTGEKPYECEECGKAFSHSSDLIKHQRTHTGEKPYECDDCGKTFSQSCSLLEHHRIHTGEKPYQCSMCGKAFRRSSHLLRHQRIHTGDKNVQEPEQGEAWKSRMESQLENVETPMSYKCNECERSFTQNTGLIEHQKIHTGEKPYQCNACGKGFTRISYLVQHQRSHVGKNILSQ

SEQ ID NO: 12906 - DNA, 2251 bp, Homo sapiens
gcactttgtgagtatggggtgaatcggcgtcggccttccactgtggggttaaatctcatcccgcggctctcctcctgtcggtcctgcagttcttttgtccccgggtagagggatcttctgcagaaatagcgctggaagctagagtgaggcctgagtactgccttggcctaggatggctagagaattaagtgaaagcacagccctggatgcccagtctacagaagaccagatggagcttctggtcataaaggtggaggaagaagaagccggttttcccagtagcccagatctgggttctgagggctcccgcgagcgcttccgaggcttccgctacccggaggctgcaggcccccgcgaggcgctgagtcggctccgagagctctgccgacagtggctgcagcctgagatgcacagcaaggagcagatcctggagctgctggtgctggagcagttcctgaccatcctgccggggaatctgcagagctgggtgcgggagcagcatccagagagcggggaggaggtggtggtgctattggagtatttggagaggcagctggatgagccggcgccgcaggtttcaggtgttgaccaggggcaagaactgctctgttgcaagatggcactattgacaccagccccagggtcacaaagtagccaatttcagctaatgaaggctctgctcaagcatgaatctgtgggatcccagcctttacaagatagagttctccaggtccccgtgcttgcccatggaggatgctgcagagaagataaagtggtagcttctaggcttactccagagtcccaggggttgttgaaagtggaagatgtggccctgaccctcacccctgaatggacacagcaggattcatctcaggggaatctctgtagagatgaaaagcaggagaaccatggcagcctggtctccctgggtgatgaaaaacagactaagagcagggacttgcctccagctgaggagcttccagaaaaggagcatgggaagatatcgtgccacctgagagaagacattgcccagattcctacatgtgcagaagctggtgaacaggagggcaggctacaaagaaagcagaaaaatgccacaggagggaggcggcacatctgccatgaatgtggaaagagttttgctcaaagctcaggcctgagtaaacacaggagaatccacactggtgagaaaccctacgaatgtgaagagtgtggcaaagccttcattgggagctctgcccttgtcattcatcagagagtccacactggtgagaagccatatgagtgtgaagaatgtggtaaggccttcagtcatagctcagaccttatcaagcatcagagaacccacactggggagaagccctatgagtgtgatgactgtgggaagaccttcagccagagctgcagcctccttgaacatcacagaatccacactggggagaagccgtatcagtgcagtatgtgtggcaaagcctttaggcgaagttcacatctcctgagacatcagaggatccatactggggataaaaatgttcaggaacctgagcagggagaggcctggaaaagtaggatggaaagccagttggaaaatgttgaaactcccatgtcttataaatgtaatgagtgtgaaagaagtttcactcagaatacaggcctcattgaacatcaaaaaatccacactggtgagaaaccctatcagtgtaatgcgtgtggaaaaggcttcacccgaatttcataccttgttcaacatcagagaagccatgtagggaaaaacatcctatcacagtgacccatgccatacatgccagagttggtgctcatttgtcactgatctgaagccactccccctggagtctcaactatagaaattgtgggctgggctttatttaccactacacattatcaggtgttagaaaatgtagactgggttagacaaattatcttctaagttctagaaggggtttgtaatcaaaacatatttgataggaggctacgggagagttgtctagaagaggtaagacctgaaactgtttgttctctcccactagaattaaatggatgtttagactggctacttgccctaaaccagcacttggtgatgtctactgggtggatggttgtgatttgggggctgcttctctgaccattctttttgactgtaatgaatcctccacagttggtcagattcataaagtcttatatccccctctgtgccttttctgcaggtgctaataaatgtttattgaatgta

SEQ ID NO: 12907 - protein, 538 aa, Homo sapiens
MARELSESTALDAQSTEDQMELLVIKVEEEEAGFPSSPDLGSEGSRERFRGFRYPEAAGPREALSRLRELCRQWLQPEMHSKEQILELLVLEQFLTILPGNLQSWVREQHPESGEEVVVLLEYLERQLDEPAPQVSGVDQGQELLCCKMALLTPAPGSQSSQFQLMKALLKHESVGSQPLQDRVLQVPVLAHGGCCREDKVVASRLTPESQGLLKVEDVALTLTPEWTQQDSSQGNLCRDEKQENHGSLVSLGDEKQTKSRDLPPAEELPEKEHGKISCHLREDIAQIPTCAEAGEQEGRLQRKQKNATGGRRHICHECGKSFAQSSGLSKHRRIHTGEKPYECEECGKAFIGSSALVIHQRVHTGEKPYECEECGKAFSHSSDLIKHQRTHTGEKPYECDDCGKTFSQSCSLLEHHRIHTGEKPYQCSMCGKAFRRSSHLLRHQRIHTGDKNVQEPEQGEAWKSRMESQLENVETPMSYKCNECERSFTQNTGLIEHQKIHTGEKPYQCNACGKGFTRISYLVQHQRSHVGKNILSQ

SEQ ID NO: 12908 - DNA, 379 bp, Homo sapiens
aaaagtaagatattctgaaagagagcctatcccagaagccatgagacctgggcctgatctaagagggaagggaaacctgagattcctgtgaaccagctgggactagattttaaactagaagtcattctgatgtgcagctgagtttgagatctaataagttaaagatactaaaaagaagcaatcgaccaaatccagaatgtgaggcattttataaaacagaaggttcaagttcctcaacaaataaatggcatttttaccaaaaggagtgggagggaatgggaactgtcatagattagaagactgaacagacttatcaaataaatgcaaatggtgaaccatattcggaccccactgaaaacaacaactgtaaaaagactgt

SEQ ID NO: 12909 - protein, 39 aa, Homo sapiens
KEAIDQIQNVRHFIKQKVQVPQQINGIFTKRSGREWELS

SEQ ID NO: 12910 - DNA, 1153 bp, Homo sapiens
ggtgatgaaaaacagactaagagcagggacttgcctccagctgaggagcttccagaaaaggagcatgggaagatatcgtgccacctgagagaagacattgcccagattcctacatgtgcagaagctggtgaacaggagggcaggctacaaagaaagcagaaaaatgccacaggagggaggcggcacatctgccatgaatgtggaaagagttttgctcaaagctcaggcctgagtaaacacaggagaatccacaactggtgagaagccatatgagtgtgaagaatgtggtaaggccttcagtcatagctcagaccttatcaagcatagaatccacactggggagaagccgtatcagtgcagtatgtgtggcaaagcctttaggcgaagttcacatctcctgagacatcagaggatccatactggggataaaaatgttcaggaacctgagcagggagaggcctggaaaagtaggatggaaagccagttggaaaatgttgaaactcccatgtcttataaatgtaatgagtgtgaaagaagtttcactcagaatacaggcctcattgaacatcaaaaaatccacactggtgagaaaccctatcagtgtaatgcgtgtggaaaaggcttcacccgaatttcataccttgttcaacatcagagaagccatgtagggaaaaacatcctatcacagtgacccatgccatacatgccagagttggtgctcatttgtcactgatctgaagccactccccctggagtctcaactatagaaattgtgggctgggctttatttaccactacacattatcaggtgttagaaaatgtagactgggttagacaaattatcttctaagttctagaaggggtttgtaatcaaaacatatttgataggaggctacgggagagttgtctagaagaggtaagacctgaaactgtttgttctctcccactagaattaaatggatgtttagactggctacttgccctaaaccagcacttggtgatgtctactgggtggatggttgtgatttgggggctgcttctctgaccattctttttgactgtaatgaatcctccacagttggtcagattcataaagtcttatatccccctctgtgccttttctgcaggtgctaataaatgtttattgaatgta

SEQ ID NO: 12911 - protein, 43 aa, Homo sapiens
MSVKNVVRPSVIAQTLSSIESTLGRSRISAVCVAKPLGEVHIS

SEQ ID NO: 12912 - DNA, 1136 bp, Homo sapiens
catgcccggccaagaatccatatttctttaccagactaggaattctattctagtgcaaatgccttaaaaagcttatcactaaatcattacgaatgtgtgccatccgtggaattgcttttttttttttttttttgtaaatatgaggtctcactatgttgcccaggctggtctcgaaatcctgggcaatcctcctgcctcaccctctcaagtactggaattacaggcgtgagccaccgcgcccggcccaagtatcacttatggtttcagaacgccattattagtgtctgactgtcttggtcttcttatacattgattcccaaatcacgtgtggtaacagcatctcaatttttcatgatgacggtttgaaccattaatttaattcctcaggctatctacttttttgttaaacatactgtgtagaccatcttttttttttcccatcatgatagtcaaaattttagtctgtgtattcaagtgagaaaatttttagtcagcattatacaagtagtatttattatgtatacattcagtggagttgtttctacaaaagtatttcggaatgactattctgctgcaaacttttgtgtaagcgcttcaccttattcctacaataaggagaagtgcactaacaaaatgaacaatgcagcaagggcttcagtcgcagctcaggtcttatcaaacaccagagaaccctcaatgggagaagccttatgagtgtgacaactgtggaaagacagttccttttttgttagtatcacttctacttattgtagaaatatgctttcattattgcatctactcacatttctcactcggtttctggcaccagcaatctcttccatatttataatatcagtcaaaaactctggaattcaaatataacaagacttttctggtcacctttgatagttaatgacttgggcattgtgatatattatctcctgctgtatgtattttgtttagtagaaattgaatcattatccacaatcctttatagaactatccaagtccctgtttttatgctagtttccaaggcttggtccttcaaggttttcagggatctaggggacacaaatctaacaaatcctaatgtatattatttgtattatagtaataaaccatatggttactttgtt

SEQ ID NO: 12913 - protein, 42 aa, Homo sapiens
MLPRLVSKSWAILLPHPLKYWNYRREPPRPAQVSLMVSERHY

SEQ ID NO: 12914 - DNA, 1152 bp, Homo sapiens
catgcccggccaagaatccatatttctttaccagactaggaattctattctagtgcaaatgccttaaaaagcttatcactaaatcattacgaatgtgtgccatccgtggaattgcttttttttttttttttttgtaaatatgaggtctcactatgttgcccaggctggtctcgaaatcctgggcaatcctcctgcctcaccctctcaagtactggaattacaggcgtgagccaccgcgcccggcccaagtatcacttatggtttcagaacgccattattagtgtctgactgtcttggtcttcttatacattgattcccaaatcacgtgtggtaacagcatctcaatttttcatgatgacggtttgaaccattaatttaattcctcaggctatctacttttttgttaaacatactgtgtagaccatcttttttttttcccatcatgatagtcaaaattttagtctgtgtattcaagtgagaaaatttttagtcagcattatacaagtagtatttattatgtatacattcagtggagttgtttctacaaaagtatttcggaatgactattctgctgcaaacttttgtgtaagcgcttcaccttattcctacaataaggagaagtgcactaacaaaatgaacaatgcagcaagggcttcagtcgcagctcaggtcttatcaaacaccagagaaccctcaatgggagaagccttatgagtgtgacaactgtggaaagacagttccttttttgttagtatcacttctacttattgtagaaatatgctttcattattgcatctactcacatttctcactcggtttctggcaccagcaatctcttccatatttataatatcagtcaaaaactctggaattcaaatataacaagacttttctggtcacctttgatagttaatgacttgggcattgtgatatattatctcctgctgtatgtattttgtttagtagaaattgaatcattatccacaatcctttatagaactatccaagtccctgtttttatgctagtttccaaggcttggtccttcaaggttttcagggatctaggggacacaaatctaacaaatcctaatgtatattatttgtattatagtaataaaccatatggttactttgtttgagtggattcttaaa

SEQ ID NO: 12915 - protein, 42 aa, Homo sapiens; identical to SEQ ID NO: 12913

SEQ ID NO: 12916 - DNA, 354 bp, Homo sapiens
caatatcatatgccacttcctgatgaatgtttagaggttaagttactttaggtaggattgaacccagttgcccaatgccttagttgttattaaaagtttgttgcaggccaggcatgagccactgcgcccggctgtcttttcatctttttaacagggtctttcagagcataaattttacattttgataaatacaaagtcataaacatttcatttaatgaattatgcttttgatgtcagttttaagaatctttgcctagccctaggctctgatgcttctaagaggtctcaagttttaggtattattttagcccatgacccattttgagtttgttgttgttgttgtttggtttacgg

SEQ ID NO: 12917 - protein, 36 aa, Homo sapiens
MNYAFDVSFKNLCLALGSDASKRSQVLGIILAHDPF

SEQ ID NO: 12918 - DNA, 2513 bp, Homo sapiens
gggtggtttcagattcgtgcgctccggcctttcagtgtctctggaagaagaccagctacaaggaaatacttctgaaaaatcactctgaaccccaagctggagtgaatcttctcctgagctctctcattccagaatggcaatcttgtttcaggagagatctctaatagtgactgatggtaaaggaagaaggctgtgcctagaacaaagaatcaggctggcaaagaaatcacaggtctttcctcaaactttaaattgctactctctggagatagctacctggactttacagagctgtcagaagacttgggaaggtttgccagcattggaaaaagccacttggacttcacagagctgtcagaagacttaggaagctttgccagtagttcctgagaccagaaatacatattatgaagcaggtgctggaacaggccctggcccctacttgtgaagctgcagatatagatggtgttactgagaaggaaactaaggacttggctccaaaacaaaacaaaacaaaatctggagatgctgaattttgttggggggaatgtctgtagaactgcaacatcaatgcagtaagtgtagtaaaagctttagtttatggtgagtcattactcagcatcatggagtccacgatgaagagaatctcttttcaatctgtgcaatcaacaagtttttgaaaggcttttgtttatagtggaaccctcttttccccctagaagaaccaccacaaggaaaaatgctgtcaccataaggaatgtgggaaagttttcagccacatggccttatttgacttcaaagaatccacatgagagagagactgcataaatgtaataactgaggaggcctttgttcagcaaagaaaccttatacaaactcgtataaagaatgtaggaagaccttcacccagaagccaggactgactgtgcaccagagaatctgcacaataaacatgatgaatgtggagatgcttgcttcagcattggagaattcacagtaaagggaaaccctgccagtgtgatgagtacggaaaagtcttcagaggttggaacttgggaaaaatcagtgagtgaattcatattagagaggctcttataaatgagaggattgtggaaacttgtatagacagagatcagacctcaacaagggagcctccacagtattgaaaagttaatataattaatgtaagtgggcaagttgtatggggaatgggtagtctaaattgctcattttagccagtaaaaacattaaattagtttcttagatcaagaaaaggaaatgttagaagttatttttcccttccagaggggtctatatgtgtaagcaaccaggacttttgaaataagttgcatctctggatttgtgatctgtctcctggatgattatctctgttttgggagacaggtattttttcttcatgcctgctctagtctcatctcatatctttaattcattcagcaagtatacacaatagtattatcgtctactgtttgttgtaaatatatatatattattttctttttggtctgagtaggcttgtattggtaccctaggacataaaaatcacatatatcatgtttcagtaaatgcagtgaaaggaactatattattaaattgctgggaatttctgtaaatttgagactacctttatattctccaacacaagaccgtgtaggtgtcccttcagagagtatatttttctagcttggcttctttattttctttatttttttgagatggagtcttgctcctgtcgcccaggctggagtgcaatggcacgatctcggctcactgcaacctccgcctcccaggttcaagtgattctcctgtctcagtctcccgagtagctgggattacaggcacttgccaccattcccagctaatttttgtatttttagtagagacggggtttcaccatgttggccaggctggtctcgaactcctgaccttgtgatctgcccaccttggcctcccaaagttcagggattacaggcatgagccaccatgcccggctgtttttttaagatagaaaaatatacttcatgtatagcctattgacagataatgactgatattttttcttatagataacacataataaacattgtgaagactaataagtaacttgcttattcttttcagttctaaaacctgtaggaaagaatctttagaagctgtcaacaagttgataatgtagcccaatctctacccatgataggagagtaaggcttatatattttatagtagggcactaaatacaggaaccatgtatttaaaaactttttagtgattatctcagaattctaggtgtccctctgctgtacatccctaaattttttgcataggtattattaataaattcattattttcaaagatggactgtgttctgtaaaaagcttttccagtatctgcaaatcacacagttttttttaactctattactattatataaaatgatttcttaatattgaaccaaccttgcattcctagaataaacctcacttagccatga

SEQ ID NO: 12919 - protein, 49 aa, Homo sapiens [sequence omitted]

SEQ ID NO: 12920 - DNA, 2646 bp, Homo sapiens
cagccgttgacggcagcggcacgtgaaagtaccgacctttctggcctttgtgacggacctttggaggcgggtggtttcagattcgtgcgctccggcctttcagtgtctctggtgaggttgggcctgataggttgagagctgccaggggaagttaaggatgacttccaagttttgaggaagaagaccagctacaaggaaatacttctgaaaaatcactctgaaccccaagctggagtgaatcttctcctgagctctctcattccagaatggcaatcttgtttcaggagagatctctaatagtgactgatggtaaaggaagaaggctgtgcctagaacaaagaatcaggctggcaaagaaatcacaggtctttcctcaaactttaaattgctactctctggagatagctacctggactttacagagctgtcagaagacttgggaaggtttgccagcattggaaaaagccacttggacttcacagagctgtcagaagacttaggaagctttgccagtagttcctgagaccagaaatacatattatgaagcaggtgctggaacaggccctggcccctacttgtgaagctgcagatatagatggtgttactgagaaggaaactaaggacttggctccaaaacaaaacaaaacaaaatctggagatgctgaattttgttggggggaatgtctgtagaactgcaacatcaatgcagtaagtgtagtaaaagctttagtttatggtgagtcattactcagcatcatggagtccacgatgaagagaatctcttttcaatctgtgcaatcaacaagtttttgaaaggcttttgtttatagtggaaccctcttttccccctagaagaaccaccacaaggaaaaatgctgtcaccataaggaatgtgggaaagttttcagccacatggccttatttgacttcaaagaatccacatgagagagagactgcataaatgtaataactgaggaggcctttgttcagcaaagaaaccttatacaaactcgtataaagaatgtaggaagaccttcacccagaagccaggactgactgtgcaccagagaatctgcacaataaacatgatgaatgtggagatgcttgcttcagcattggagaattcacagtaaagggaaaccctgccagtgtgatgagtacggaaaagtcttcagaggttggaacttgggaaaaatcagtgagtgaattcatattagagaggctcttataaatgagaggattgtggaaacttgtatagacagagatcagacctcaacaagggagcctccacagtattgaaaagttaatataattaatgtaagtgggcaagttgtatggggaatgggtagtctaaattgctcattttagccagtaaaaacattaaattagtttcttagatcaagaaaaggaaatgttagaagttatttttcccttccagaggggtctatatgtgtaagcaaccaggacttttgaaataagttgcatctctggatttgtgatctgtctcctggatgattatctctgttttgggagacaggtattttttcttcatgcctgctctagtctcatctcatatctttaattcattcagcaagtatacacaatagtattatcgtctactgtttgttgtaaatatatatatattattttctttttggtctgagtaggcttgtattggtaccctaggacataaaaatcacatatatcatgtttcagtaaatgcagtgaaaggaactatattattaaattgctgggaatttctgtaaatttgagactacctttatattctccaacacaagaccgtgtaggtgtcccttcagagagtatatttttctagcttggcttctttattttctttatttttttgagatggagtcttgctcctgtcgcccaggctggagtgcaatggcacgatctcggctcactgcaacctccgcctcccaggttcaagtgattctcctgtctcagtctcccgagtagctgggattacaggcacttgccaccattcccagctaatttttgtatttttagtagagacggggtttcaccatgttggccaggctggtctcgaactcctgaccttgtgatctgcccaccttggcctcccaaagttcagggattacaggcatgagccaccatgcccggctgtttttttaagatagaaaaatatacttcatgtatagcctattgacagataatgactgatattttttcttatagataacacataataaacattgtgaagactaataagtaacttgcttattcttttcagttctaaaacctgtaggaaagaatctttagaagctgtcaacaagttgataatgtagcccaatctctacccatgataggagagtaaggcttatatattttatagtagggcactaaatacaggaaccatgtatttaaaaactttttagtgattatctcagaattctaggtgtccctctgctgtacatccctaaattttttgcataggtattattaataaattcattattttcaaagatggactgtgttctgtaaaaagcttttccagtatctgcaaatcacacagttttttttaactctattactattatataaaatgatttcttaatattgaaccaaccttgcattcctagaataaacctcacttagccatga

SEQ ID NO: 12921 - protein, 49 aa, Homo sapiens [sequence omitted]

SEQ ID NO: 12922 - DNA, 589 bp, Homo sapiens
caaagaaaaggagtaacaggctgggtgcggtggctcacgcctataatcccaaagttcagggattacaggcatgagccaccatgcccggctgtttttttaagatagaaaaatatacttcatgtatagcctattgacagataatgactgatattttttcttatagataacacataataaacattgtgaagactaataagtaacttgcttattcttttcagttctaaaacctgtaggaaagaatctttagaagctgtcaacaagttgataatgtagcccaatctctacccatgataggagagtaaggcttatatattttatagtagggcactaaatacaggaaccatgtatttaaaaactttttagtgattatctcagaattctaggtgtccctctgctgtacatccctaaattttttgcataggtattattaataaattcattattttcaaagatggactgtgttctgtaaaaagcttttccagtatctgcaaatcacacagttttttttaactctattactattatataaaatgatttcttaatattgaaccaaccttgcattcctagaataaacctcacttagccatga

SEQ ID NO: 12923 - protein, 34 aa, Homo sapiens
QRKGVTGWVRWLTPIIPKFRDYRHEPPCPAVFLR

SEQ ID NO: 12924 - DNA, 5662 bp, Homo sapiens
gcttccggcctttgtgggtcacttttgatgggttccgggtcccaaaagggttcgaggcctcttgccttcgctccgtaggagggagttctcttctggccctgggggccgcaggactgtccaggaatacagtttccaggtgagatcttacttgaaacaccggtagttctagcacagctaaaatggcatctacttgggctatccaggcccacatggaccaggatgaacctttggaagtaaagatagaggaagagaaatataccaccagacaggattgggacctgcgtaaaaacaacacccatagcagagaggtcttccgtcagtacttcagacagttctgctaccaggagacatctggtccccgtgaggctttgagccgactccgagaactttgccatcagtggctgaggccagagacccacaccaaagaacagattctggagctgctggtgctggagcagttcctgaccatcctacctgaggagctccaggcctgggtgcaggagcagcatccagagagtggggaggaggtggtgactgtgctggaggatttagagagagaactggatgaaccaggagagcaggtctcagtccacactggggaacaggaaatgttcttgcaggagacggtacgtctacgaaaagaaggagaacccagtatgtccctccagtccatgaaagcccagccaaagtatgaatctccagaacttgaatcccaacaggagcaagttttagatgttgagactggaaatgagtatgggaatttaaagcaagaagtttctgaagaaatggaaccacatgggaagacatccagtaaatttgaaaatgatatgtccaagtctgctaggtgtggagaaactcgtgaacctgaagaaataacagaagagccctctgcttgctccagagaagataaacaacctacctgtgatgaaaatggagtaagcctgactgagaactctgaccatactgaacatcagagaatctgtccaggagaagaatcttacggatgtgatgactgtggaaaagcttttagtcagcactcacacctcatagaacatcagaggatccatactggagatagaccctacaaatgcgaagaatgtggaaaagctttccgtgggagaactgtgcttattcgacacaaaataatacacactggagagaaaccgtataagtgtaatgaatgtggcaaagcctttggccggtggtcagctcttaaccaacatcagagacttcacacaggagaaaaacactatcactgtaatgactgtggcaaagcctttagtcagaaagcaggcctctttcaccatatcaagatccacacaagagacaaaccttatcagtgcactcagtgtaataaaagttttagtcggcgttccatacttactcagcatcaaggagttcataccggcgccaagccgtatgagtgcaacgagtgtggaaaagcctttgtttataactcatcccttgtttcccatcaggaaatccaccacaaagaaaaatgctatcagtgtaaggaatgtgggaaatccttcagtcagagtggccttattcagcatcagagaattcacactggggaaaaaccctacaaatgtgacgtatgtgaaaaagcctttattcaaaggacaagtcttacagaacatcagcgaattcacactggagaaagaccctataaatgtgataagtgtgggaaggcgtttactcaaagatcagtcctcacggaacatcagagaatccacactggagagaggccctacaagtgtgatgagtgtgggaatgccttccgaggaatcaccagcctcattcagcatcagagaatccacactggggagaagccctaccaatgtgatgagtgtggaaaagccttcagacagaggaagaagaccagctacaaggaaatacttctgaaaaatcactctgaaccccaagctggagtgaatcttctcctgagctctctcattccagaatggcaatcttgtttcaggagagatctctaatagtgactgatggtaaaggaagaaggctgtgcctagaacaaagaatcaggctggcaaagaaatcacaggtctttcctcaaactttaaattgctactctctggagatagctacctggactttacagagctgtcagaagacttgggaaggtttgccagcattggaaaaagccacttggacttcacagagctgtcagaagacttaggaagctttgccagtagttcctgagaccagaaatacatattatgaagcaggtgctggaacaggccctggcccctacttgtgaagctgcagatataggtaagataatatcatccagaatgtggagacgaggcaatcgatgatgctggaaaagttgaagagagagtttgaatgaaggacaaaccaccgatgggaaagcttgggaggatcacttatagcttgactagcaaaaggctttgggaataggatagaaagcagcaaacctgaactttaggatccaccagatgtctctggagccataacccaacatttcccataaatagtaggttttaattctcctgttatttaggtgcatctctgggacctcctctttctatattgggttttttgtttgttgggtgttttaacttaggatttagcttcaaattccatttcccaagaccaattttatcacattgcctttaggtctcaggctaaatgatataacaagatatgcttttggcaaagatagtaccttggaatgaaaggtttcagatcaaacctaagatcctaccttagtttacctctcagtgttattgccttttgatatggaaagctgatgagagagcatctctggagagaaagaagaggagagcctcacgggaagcttttagaacttttagtagcatcctctccccagaaaacttgtctctactcatctccttctcattatctacctgattcgttaagtaggaaatctcagccatatttgtaggggattggggttttgttttttttgacccacttaactcctttagcttcagagtgttgctttcttacattttagacatgaatattacctagaaaatttatttccccactgttaattttccagtttattgatttccccacatcagattagtgtgtattttgaaactggtttagctattgtttcaagttaactttgatcatatcccgttgtttactgatccactcaacaaatatttattgaacattctgtaggtttatagtagtagccaagatacttaaagtgagtagaaatagtccttttaactgtccttaacaaattaaactttctcttggtttcatgatattccttgtttctcagctttggattcaaactgatcttctcttttttgattatactttcctgatttcttttattgtcacatttttgtgaaaagtcttccatgcacttccagtctctttctgcctagctgtctcttctcacccaaattggacccccctactcctaccctgccacgtgccttcacaaaaatgagatgcttgtttagagacttagaaaaggcatgcactttaggtaaaagtggattttatttttaatcactgtaccctatcataaatctcatttcagaagagacaactgacatttgaattgtctgtgcattttgttttagatggtgttactgagaaggaaactaaggacttggctccaaaacaaaacaaaacaaaatctggagatgctgaattttgttggggggaatgtctgtagaactgcaacatcaatgcagtaagtgtagtaaaagctttagtttatggtgagtcattactcagcatcatggagtccacgatgaagagaatctcttttcaatctgtgcaatcaacaagtttttgaaaggcttttgtttatagtggaaccctcttttccccctagaagaaccaccacaaggaaaaatgctgtcaccataaggaatgtgggaaagttttcagccacatggccttatttgacttcaaagaatccacatgagagagagactgcataaatgtaataactgaggaggcctttgttcagcaaagaaaccttatacaaactcgtataaagaatgtaggaagaccttcacccagaagccaggactgactgtgcaccagagaatctgcacaataaacatgatgaatgtggagatgcttgcttcagcattggagaattcacagtaaagggaaaccctgccagtgtgatgagtacggaaaagtcttcagaggttggaacttgggaaaaatcagtgagtgaattcatattagagaggctcttataaatgagaggattgtggaaacttgtatagacagagatcagacctcaacaagggagcctccacagtattgaaaagttaatataattaatgtaagtgggcaagttgtatggggaatgggtagtctaaattgctcattttagccagtaaaaacattaaattagtttcttagatcaagaaaaggaaatgttagaagttatttttcccttccagaggggtctatatgtgtaagcaaccaggacttttgaaataagttgcatctctggatttgtgatctgtctcctggatgattatctctgttttgggagacaggtattttttcttcatgcctgctctagtctcatctcatatctttaattcattcagcaagtatacacaatagtattatcgtctactgtttgttgtaaatatatatatattattttctttttggtctgagtaggcttgtattggtaccctaggacataaaaatcacatatatcatgtttcagtaaatgcagtgaaaggaactatattattaaattgctgggaatttctgtaaatttgagactacctttatattctccaacacaagaccgtgtaggtgtcccttcagagagtatatttttctagcttggcttctttattttctttatttttttgagatggagtcttgctcctgtcgcccaggctggagtgcaatggcacgatctcggctcactgcaacctccgcctcccaggttcaagtgattctcctgtctcagtctcccgagtagctgggattacaggcacttgccaccattcccagctaatttttgtatttttagtagagacggggtttcaccatgttggccaggctggtctcgaactcctgaccttgtgatctgcccaccttggcctcccaaagttcagggattacaggcatgagccaccatgcccggctgtttttttaagatagaaaaatatacttcatgtatagcctattgacagataatgactgatattttttcttatagataacacataataaacattgtgaagactaataagtaacttgcttattcttttcagttctaaaacctgtaggaaagaatctttagaagctgtcaacaagttgataatgtagcccaatctctacccatgataggagagtaaggcttatatattttatagtagggcactaaatacaggaaccatgtatttaaaaactttttagtgattatctcagaattctaggtgtccctctgctgtacatccctaaattttttgcataggtattattaataaattcattattttcaaagatggactgtgttctgtaaaaagcttttccagtatctgcaaatcacacagttttttttaactctattactattatataaaatgatttcttaatattgaaccaaccttgcattcctagaataaacctcacttagccatga

SEQ ID NO: 12925 - protein, 604 aa, Homo sapiens; identical to SEQ ID NO: 1296

SEQ ID NO: 12926 - DNA, 3945 bp, Homo sapiens
gcttccggcctttgtgggtcacttttgatgggttccgggtcccaaaagggttcgaggcctcttgccttcgctccgtaggagggagttctcttctggccctgggggccgcaggactgtccaggaatacagtttccaggtgagatcttacttgaaacaccggtagttctagcacagctaaaatggcatctacttgggctatccaggcccacatggaccaggatgaacctttggaagtaaagatagaggaagagaaatataccaccagacaggattgggacctgcgtaaaaacaacacccatagcagagaggtcttccgtcagtacttcagacagttctgctaccaggagacatctggtccccgtgaggctttgagccgactccgagaactttgccatcagtggctgaggccagagacccacaccaaagaacagattctggagctgctggtgctggagcagttcctgaccatcctacctgaggagctccaggcctgggtgcaggagcagcatccagagagtggggaggaggtggtgactgtgctggaggatttagagagagaactggatgaaccaggagagcaggtctcagtccacactggggaacaggaaatgttcttgcaggagacggtacgtctacgaaaagaaggagaacccagtatgtccctccagtccatgaaagcccagccaaagtatgaatctccagaacttgaatcccaacaggagcaagttttagatgttgagactggaaatgagtatgggaatttaaagcaagaagtttctgaagaaatggaaccacatgggaagacatccagtaaatttgaaaatgatatgtccaagtctgctaggtgtggagaaactcgtgaacctgaagaaataacagaagagccctctgcttgctccagagaagataaacaacctacctgtgatgaaaatggagtaagcctgactgagaactctgaccatactgaacatcagagaatctgtccaggagaagaatcttacggatgtgatgactgtggaaaagcttttagtcagcactcacacctcatagaacatcagaggatccatactggagatagaccctacaaatgcgaagaatgtggaaaagctttccgtgggagaactgtgcttattcgacacaaaataatacacactggagagaaaccgtataagtgtaatgaatgtggcaaagcctttggccggtggtcagctcttaaccaacatcagagacttcacacaggagaaaaacactatcactgtaatgactgtggcaaagcctttagtcagaaagcaggcctctttcaccatatcaagatccacacaagagacaaaccttatcagtgcactcagtgtaataaaagttttagtcggcgttccatacttactcagcatcaaggagttcataccggcgccaagccgtatgagtgcaacgagtgtggaaaagcctttgtttataactcatcccttgtttcccatcaggaaatccaccacaaagaaaaatgctatcagtgtaaggaatgtgggaaatccttcagtcagagtggccttattcagcatcagagaattcacactggggaaaaaccctacaaatgtgacgtatgtgaaaaagcctttattcaaaggacaagtcttacagaacatcagcgaattcacactggagaaagaccctataaatgtgataagtgtgggaaggcgtttactcaaagatcagtcctcacggaacatcagagaatccacactggagagaggccctacaagtgtgatgagtgtgggaatgccttccgaggaatcaccagcctcattcagcatcagagaatccacactggggagaagccctaccaatgtgatgagtgtggaaaagccttcagacagaggaagaagaccagctacaaggaaatacttctgaaaaatcactctgaaccccaagctggagtgaatcttctcctgagctctctcattccagaatggcaatcttgtttcaggagagatctctaatagtgactgatggtaaaggaagaaggctgtgcctagaacaaagaatcaggctggcaaagaaatcacaggtctttcctcaaactttaaattgctactctctggagatagctacctggactttacagagctgtcagaagacttgggaaggtttgccagcattggaaaaagccacttggacttcacagagctgtcagaagacttaggaagctttgccagtagttcctgagaccagaaatacatattatgaagcaggtgctggaacaggccctggcccctacttgtgaagctgcagatatagatggtgttactgagaaggaaactaaggacttggctccaaaacaaaacaaaacaaaatctggagatgctgaattttgttggggggaatgtctgtagaactgcaacatcaatgcagtaagtgtagtaaaagctttagtttatggtgagtcattactcagcatcatggagtccacgatgaagagaatctcttttcaatctgtgcaatcaacaagtttttgaaaggcttttgtttatagtggaaccctcttttccccctagaagaaccaccacaaggaaaaatgctgtcaccataaggaatgtgggaaagttttcagccacatggccttatttgacttcaaagaatccacatgagagagagactgcataaatgtaataactgaggaggcctttgttcagcaaagaaaccttatacaaactcgtataaagaatgtaggaagaccttcacccagaagccaggactgactgtgcaccagagaatctgcacaataaacatgatgaatgtggagatgcttgcttcagcattggagaattcacagtaaagggaaaccctgccagtgtgatgagtacggaaaagtcttcagaggttggaacttgggaaaaatcagtgagtgaattcatattagagaggctcttataaatgagaggattgtggaaacttgtatagacagagatcagacctcaacaagggagcctccacagtattgaaaagttaatataattaatgtaagtgggcaagttgtatggggaatgggtagtctaaattgctcattttagccagtaaaaacattaaattagtttcttagatcaagaaaaggaaatgttagaagttatttttcccttccagaggggtctatatgtgtaagcaaccaggacttttgaaataagttgcatctctggatttgtgatctgtctcctggatgattatctctgttttgggagacaggtattttttcttcatgcctgctctagtctcatctcatatctttaattcattcagcaagtatacacaatagtattatcgtctactgtttgttgtaaatatatatatattattttctttttggtctgagtaggcttgtattggtaccctaggacataaaaatcacatatatcatgtttcagtaaatgcagtgaaaggaactatattattaaattgctgggaatttctgtaaatttgagactacctttatattctccaacacaagaccgtgtaggtgtcccttcagagagtatatttttctagcttggcttctttattttctttatttttttgagatggagtcttgctcctgtcgcccaggctggagtgcaatggcacgatctcggctcactgcaacctccgcctcccaggttcaagtgattctcctgtctcagtctcccgagtagctgggattacaggcacttgccaccattcccagctaatttttgtatttttagtagagacggggtttcaccatgttggccaggctggtctcgaactcctgaccttgtgatctgcccaccttggcctcccaaagttcagggattacaggcatgagccaccatgcccggctgtttttttaagatagaaaaatatacttcatgtatagcctattgacagataatgactgatattttttcttatagataacacataataaacattgtgaagact

SEQ ID NO: 12927 - protein, 604 aa, Homo sapiens; identical to SEQ ID NO: 1296

SEQ ID NO: 12928 - DNA, 370 bp, Homo sapiens
attcacactggagaaagaccctataaatgtgataagtgtgggaaggcgtttactcaaagatcagtcctcacggaacatcagagaatccacactggagagaggccctacaagtgtgatgagtgtgggaatgccttccgaggaatcaccagcctcattcagcatcagagaatccacactggggagaagccctaccaatgtgatgagtgtggaaaagccttcagacagaggtaaacaagacattaagtgtttaaggcaaaaagcatggagaggttggggaagagccaagtttctaaagtaatgaaaagtgaggaagaagaccagctacaaggaaatacttctgaaaaatcactctgaaccccaagctggagtg

SEQ ID NO: 12929 - protein, 60 aa, Homo sapiens
MSVGMPSEESPASFSIRESTLGRSPTNVMSVEKPSDRGKQDIKCLRQKAWRGWGRAKFLK

SEQ ID NO: 12930 - DNA, 1496 bp, Homo sapiens
gcttccggcctttgtgggtcacttttgatgggttccgggtcccaaaagggttcgaggcctcttgccttcgctccgtaggagggagttctcttctggccctgggggccgcaggactgtccaggaatacagtttccaggtgagatcttacttgaaacaccggtagttctagcacagctaaaatggcatctacttgggctatccaggcccacatggaccaggatgaacctttggaagtaaagatagaggaagagaaatataccaccagacaggattgggacctgcgtaaaaacaacacccatagcagagaggtcttccgtcagtacttcagacagttctgctaccaggagacatctggtccccgtgaggctttgagccgactccgagaactttgccatcagtggctgaggccagagacccacaccaaagaacagattctggagctgctggtgctggagcagttcctgaccatcctacctgaggagctccaggcctgggtgcaggagcagcatccagagagtggggaggaggtggtgactgtgctggaggatttagagagagaactggatgaaccaggagagcagagtgagtctgtcagctacatctcattttcctcaggtctcagtccacactggggaacaggaaatgttcttgcaggagacggtacgtctacgaaaagaaggagaacccagtatgtccctccagtccatgaaagcccagccaaagtatgaatctccagaacttgaatcccaacaggagcaagttttagatgttgagactggaaatgagtatgggaatttaaagcaagaagtttctgaagaaatggaaccacatgggaagacatccagtaaatttgaaaatgatatgtccaagtctgctaggtgtggagaaactcgtgaacctgaagaaataacagaagagccctctgcttgctccagagaagataaacaacctacctgtgatgaaaatggagtaagcctgactgagaactctgaccatactgaacatcagagaatctgtccaggagaagaatcttacggatgtgatgactgtggaaaagcttttagtcagcactcacacctcatagaacatcagaggatccatactggagatagaccctacaaatgcgaagaatgtggaaaagctttccgtgggagaactgtgcttattcgacacaaaataatacacactggagagaaaccgtataagtgtaatgaatgtggcaaagcctttggccggtggtcagctcttaaccaacatcagagacttcacacaggagaaaaacactatcactgtaatgactgtggcaaagcctttagtcagaaagcaggcctctttcaccatatcaagatccacacaagagacaaaccttatcagtgcactcagtgtaataaaagttttagtcggcgttccatacttactcagcatcaaggagttcataccggcgccaagccgtatgagtgcaacgagtgtggaaaagcctttgtttataactcatc

SEQ ID NO: 12931 - protein, 309 aa, Homo sapiens
MNQESRVSLSATSHFPQVSVHTGEQEMFLQETVRLRKEGEPSMSLQSMKAQPKYESPELESQQEQVLDVETGNEYGNLKQEVSEEMEPHGKTSSKFENDMSKSARCGETREPEEITEEPSACSREDKQPTCDENGVSLTENSDHTEHQRICPGEESYGCDDCGKAFSQHSHLIEHQRIHTGDRPYKCEECGKAFRGRTVLIRHKIIHTGEKPYKCNECGKAFGRWSALNQHQRLHTGEKHYHCNDCGKAFSQKAGLFHHIKIHTRDKPYQCTQCNKSFSRRSILTQHQGVHTGAKPYECNECGKAFVYN

SEQ ID NO: 12932 - DNA, 2240 bp, Homo sapiens
gatctcggggtttccagaagaaaagatcaagggagaattatcaagaatagattatttttctgaatagttaaacctttgatggccataaccttgacccttcagactgcagagatgcaggaaggacttctggcagtgaaggtaaaggaggaagaggaggaacattcctgtgggccagaatcaggcctgtcaagaaataaccctcataccagagagatctttcgtagacgcttcaggcagttctgctatcaggagtcccctgggccccgggaggctcttcaaagactccaggagctctgccatcagtggctgagaccagagatgcacaccaaggagcagatcctagagctgctggtgctggagcagttcctgactatcctgcctgaggagctccaggcctgggtcagacagcaccgtcctgtgagtggagaggaggcagtgactgtgctggaggatttggagagagagctggatgacccaggagagcagatggcaaggctgggacttggaatgtggagttagccccaaagagggagatttctcaggaagtgaaatctcttatacaagttcttggaaaacagaatggtaatattactcagattcctgagtatggagatacctgtgaccgtgagggcagattggaaaagcaaagggtgagctcttcagtggagagaccctatatctgtagtgaatgtggaaaaagcttcacccagaattccatccttatcgagcaccagagaacacacacaggtgagaagccttatgaatgtgatgagtgtgggcgggccttcagccagaggtcaggcctattccagcaccagagactccacactggggagaagcgctaccagtgcagtgtttgtggcaaagccttcagccagaatgccgggcttttccatcacctcagaattcacactggggagaagccttaccagtgcaatcagtgcaataagagttttagtcgacgttcagtcctcattaagcatcagagaattcacactggagagagaccttatgaatgtgaagaatgtggcaagaacttcatttaccattgcaacctaatccagcatcggaaagtccacccagtggctgaatcaagctagctccttggaacagacacttacacttggagccctgagacccactgtaggcatctgcaaacaacagcaacaacaaagtgggatggaaagaaaaaagaacaaaatataagaacataaaaaagaatcagacagaagatactgtgttttctgcaaattgaaagtttgtggcaaccctgcatcaagcaagtctgtcaacaccatttttccaacatcatgtgcacacttcgtgtttctgtgtcacattttggcctccctattccctgagacacacagtgttgaaatgaaaccagttaataacactacagtggcctctcagtgttcacgtgaaaggaagagtctcacatctctctctttaaattaaaagctagaaatgattaagcttagtgaggaagacatgttgaaagctgagataggttgaaagctaggcctcttgtaccaaacagccagttgtgaatgcaaaggaaaagttcttgaaggaagtaaaaccactccactgaacacatgagtgataagaaaccaaaacagctttattgctgatacggagaaagtttgagtgatctggaaagaagatcaaaccagccacaacatgcctttaagccacagcctaatccacagcagggtcctaactttcttcaattctgtgacggctgagagagatgaggaagctgcagaagaaaagttagaagctagcagaggttgcttcatgaggtttaaggaaagaagctgtctccacaacataacagtgcaaagtgaagcagcaaatgttagtgtagacactgcagcaagttattcagaaaacctagctaagatagtggatgaaggtggctatactaaacaacatatttttaatgtagatgaaacactttatattggaagaagataccatcttggacttccataactagagagaagtcagtgcctggcttcaaaggacagtctgcctttcttgataggagctaatggagctggtgacttgaagttgaagccaatgctcatttactaagctgaaaatcctagagtccttaaggatcatgctggctgggcatgctgtaatcctagcacattgagaggccaagtcaggaggattgctgagcccaggagtttgagactagcctgggcaacatggaaaaaccctgtctctac

SEQ ID NO: 12933 - protein, 146 aa, Homo sapiens
MAITLTLQTAEMQEGLLAVKVKEEEEEHSCGPESGLSRNNPHTREIFRRRFRQFCYQESPGPREALQRLQELCHQWLRPEMHTKEQILELLVLEQFLTILPEELQAWVRQHRPVSGEEAVTVLEDLERELDDPGEQMARLGLGMWS

SEQ ID NO: 12934 - DNA, 3126 bp, Homo sapiens
ctgcggttgtcaaggattcagagcagatgtgatctgcgctaggtggcatctcctctcacggatgcctcgatctcggggtttccagaagaaaagatcaagggagaattatcaagaatagattatttttctgaatagttaaacctttgatggccataaccttgacccttcagactgcagagatgcaggaaggacttctggcagtgaaggtaaaggaggaagaggaggaacattcctgtgggccagaatcaggcctgtcaagaaataaccctcataccagagagatctttcgtagacgcttcaggcagttctgctatcaggagtcccctgggccccgggaggctcttcaaagactccaggagctctgccatcagtggctgagaccagagatgcacaccaaggagcagatcctagagctgctggtgctggagcagttcctgactatcctgcctgaggagctccaggcctgggtcagacagcaccgtcctgtgagtggagaggaggcagtgactgtgctggaggatttggagagagagctggatgacccaggagagcaggtcctgagccatgctcatgaacaggaagagtttgtaaaggagaaggcaactccaggagcagctcaggagtcatcaaatgaccaattccaaaccttggaagagcaacttgggtataatttgcgagaggtgtgcccagttcaagagattgatggcaaggctgggacttggaatgtggagttagccccaaagagggagatttctcaggaagtgaaatctcttatacaagttcttggaaaacagaatggtaatattactcagattcctgagtatggagatacctgtgaccgtgagggcagattggaaaagcaaagggtgagctcttcagtggagagaccctatatctgtagtgaatgtggaaaaagcttcacccagaattccatccttatcgagcaccagagaacacacacaggtgagaagccttatgaatgtgatgagtgtgggcgggccttcagccagaggtcaggcctattccagcaccagagactccacactggggagaagcgctaccagtgcagtgtttgtggcaaagccttcagccagaatgccgggcttttccatcacctcagaattcacactggggagaagccttaccagtgcaatcagtgcaataagagttttagtcgacgttcagtcctcattaagcatcagagaattcacactggagagagaccttatgaatgtgaagaatgtggcaagaacttcatttaccattgcaacctaatccagcatcggaaagtccacccagtggctgaatcaagctagctccttggaacaggtaggggataatatttcttactttgtccctgctgtgtcctctagcatagaaaagttcaagggaaagccagtaaaaattcccttacttttatgcagagagaagcataatatcttaaatacatctgccgagttctctgatcagtgacatccacagctttgcaatactgaatgttgcctcttgtgttgatttcatcatgtatgctgtagacctagtttcacacacatctgtgcaagaagttttctatttcaggaaaacttcttcatcctagtttttaaaaactttttttaaaagtttaaaatagttatatgtaggctgagtacaaaataatctcaaatgcagttcaccgagtatttaaaaattaacttaaaaataattgtaataaaattcataatataggtttcctgacttctttccattcacataaaatatgataatttgttttgtaacctacaaaaaggggcagatgaatcctcctatataaatgtagatttatagtaagttagatttctatagattttttagttagcctttaggaaccaaggaactgaagcagccatatgttattagcagctcagtggctcctcataacaaatattgctcatgattttaaatttacgcagaggctaagaaacttagctaaaaatctgatatctcacctcagatttcttattggaaaatacaggcctctttgtatttttcccgtaacatataatgagcatttttttgtttttgcctttttctcctttattcaatattttgtatggaaaatttgaaacatattcaagattgaagagaagagtatgatcactctttcatgttgattgtttttataacctccacattttctcagcatttactattgattaccaccaagatcataaataaaaaaatttatttcccttaacattgacttagtaactctttacaaagctttacacaaggtccaggagacaaagaaatggaaaacctatggtgaaaacaatctggtttggaatacacccaaatacccaatacatagcaagtaactttagaataacagaatcactctaagggaccttagagatcacttctgcttgctcttatttgacagataagagaaaaggaagttctgggaagtaactaagatcatacagccagttaaaagcagagctggaactagaaccctgtctcctacttcctagtgtaacattctattaagccactggaggcattatatcaccaaataaaaattacaagtatatggaatttataggatttataagtcactgaagttgctcaacaaacccacccatttatatgtttcaataaagcacaactcctctatttaatttacagtggagtccaggaaagactcttctcatttattcctcattgaaagcattttatttttgtaattattatttttagcttttaaaatttaatttactcagtaggacttttttaaaaagataattcattcttcacctggttcaaaaatcaaaataatacaaaaaggtctactttccctttataagtagccattgtactagtttcttatgtatctttcagtgtttctttatgtaaatataggcaaatatgaatgtataatcttatttcttccattactcaggaagatggcatattatttatactcttctaataccttgctgttttcatgaaagaatataatctttagagatgtccacatcataacagaacttcttcattctttttataagtgaatagaattttatttgttcatactccatagtttaacaaactcctatagatgaaaaatctcactattttaaaatgtta

SEQ ID NO: 12935 - protein, 389 aa, Homo sapiens
MAITLTLQTAEMQEGLLAVKVKEEEEEHSCGPESGLSRNNPHTREIFRRRFRQFCYQESPGPREALQRLQELCHQWLRPEMHTKEQILELLVLEQFLTILPEELQAWVRQHRPVSGEEAVTVLEDLERELDDPGEQVLSHAHEQEEFVKEKATPGAAQESSNDQFQTLEEQLGYNLREVCPVQEIDGKAGTWNVELAPKREISQEVKSLIQVLGKQNGNITQIPEYGDTCDREGRLEKQRVSSSVERPYICSECGKSFTQNSILIEHQRTHTGEKPYECDECGRAFSQRSGLFQHQRLHTGEKRYQCSVCGKAFSQNAGLFHHLRIHTGEKPYQCNQCNKSFSRRSVLIKHQRIHTGERPYECEECGKNFIYHCNLIQHRKVHPVAESS

SEQ ID NO: 12936 - DNA, 908 bp, Homo sapiens
atgggagggctctggcatccgggatggaggcgcgtcgctttctgtggctggcgctggatccaccctgggtctccagccacggctgcagagagggtagcgcggtttcttaggccagagtggagtgggacaggaggtgcccagagacgactgtggtggcttgagacatggaagcgctgcagcctttgagcccagtatccagcattgcagccgccgcggcggtctaagagctcaaaccctttcaggcgcgcgcaggaggaggagcggcgggggcggcggaacaagacgaccctcacttaacgtggccgctgtcgccgtgggcatgctgggggcgtcctacgctgccgttcccctttatcggctctattgccagactactggacttggaggatcagcagtttcaggtcatgcctcagaccagattgaaaacatggtgcctgttaaggatcgaatcattaaaattaactttgatgcagatgtgcatgcaagtcttcagtggaactttagacttcagcaaacagaaatatatgtggtgccaggagacactgcactggggttttacagagctaagaatcctgctgacaaaccactaattggaatttctacatacaatgttgttccatttgaagctggacagtatttcaataaaatacagtgcttctgttttgaagaacaaaggcttaatccccaagaggaagtagatatgccagtgtttttctacattgatcctgaatttgctaaagacccaagaatgattaatgttgatcttatcactctttcttacactttttttgaagcaaaggaagggcacaatttgccagttccaggatataactgaagtcagcaactaagtcttccttcaaagttgtgatttttgggaaaatcatgtatcctatcttctcaaaggagaa

SEQ ID NO: 12937 - protein, 171 aa, Homo sapiens
MLGASYAAVPLYRLYCQTTGLGGSAVSGHASDQIENMVPVKDRIIKINFDADVHASLQWNFRLQQTEIYVVPGDTALGFYRAKNPADKPLIGISTYNVVPFEAGQYFNKIQCFCFEEQRLNPQEEVDMPVFFYIDPEFAKDPRMINVDLITLSYTFFEAKEGHNLPVPGYN

SEQ ID NO: 12938 - DNA, 1712 bp, Homo sapiens; identical to SEQ ID NO: 1298

SEQ ID NO: 12939 - protein, 72 aa, Homo sapiens
MFQQFQASCLVLFFLVGFAQQTLKPQNRKVDCNKGVTGTIYEYGALTLNGEEYIQFKQFAGKHVLFVNVAAY

SEQ ID NO: 12940 - DNA, 668 bp, Homo sapiens; identical to SEQ ID NO: 1300

SEQ ID NO: 12941 - protein, 221 aa, Homo sapiens; identical to SEQ ID NO: 1301

SEQ ID NO: 12942 - DNA, 550 bp, Homo sapiens; identical to SEQ ID NO: 1302

SEQ ID NO: 12943 - protein, 100 aa, Homo sapiens; identical to SEQ ID NO: 1303

SEQ ID NO: 12944 - DNA, 705 bp, Homo sapiens
tcttcattttactcatggggaaactgaaggccagggatgggaattgcccaggttcacaaaggaatttaacaatggagctggcttctgattcccagggcagtgttctttctactctacctgctgatgagtggagtaagaggtcagaagacctggggaaagataagcaactaagatatcctaaaaatagttcagcaatttaaaaccctcccttctcagagagtccagacaggaggccttcaatccagagccaaggagtagcctgttttttacagaagcatgtaagattacacagatgccaggaattattgttaccagtattatcacttaaaaaaaatcttccagatggattgccacaaagacgagaaaggcaccatctatgactatgaggccatcgcacttaataagaatgaatatgtttccttcaagcagtatgtgggcaagcacatcctcttcgtcaacgtggccacctactgtggtctgacagcgcaatatcctgatttccaggggaatcaatatatacttgagaactaggagcctctcagaagattccagaagtcttcttgataaatacaggacagaagacccatgtttttgagacttttgcaaggttttacagaactaaatgcactccaggaggagctgaagccctatggtctagttgtgttgggctttccctgcaaccaatttggaaagcaagaaccagga

SEQ ID NO: 12945 - protein, 62 aa, Homo sapiens
MDCHKDEKGTIYDYEAIALNKNEYVSFKQYVGKHILFVNVATYCGLTAQYPDFQGNQYILEN

SEQ ID NO: 12946 - DNA, 1469 bp, Homo sapiens
attttactcatggggaaactgaaggccagggatgggaattgcccaggttcacaaaggaatttaacaatggagctggcttctgattcccagggcagtgttctttctactctacctgctgatgagtggagtaagaggtcagaagacctggggaaagataagcaactaagatatcctaaaaatagttcagcaatttaaaaccctcccttctcagagagtccagacaggaggccttcaatccagagccaaggagtagcctgttttttacagaagcatgtaagatggattgccacaaagacgagaaaggcaccatctatgactatgaggccatcgcacttaataagaatgaatatgtttccttcaagcagtatgtgggcaagcacatcctcttcgtcaacgtggccacctactgtggtctgacagcgcaatatcctggtatgtccgtccagggggaggatttgtacctagtttccagctttttgagaaaggggatgtgaatggtgaaaaagaacagaaagtcttcagtttcttgaagcactcctgtcctcatccctctgagattttgggcacattcaaatctatatcctgggaccctgtaaaggtccatgacatccgttggaactttgaaaagttcctggtggggcctgatggaatccctgtcatgcgctggtcccaccgggctacggtcagctcagtcaagacagacatcctggcgtacttgaagcaattcaaaaccaaataggaaggtggagttaagggcaggagcaaccctacttctcaccacactctcttcctgcatgggctccacctgagtaaatcaccgccacatactgccagaattcccactctccacaaactagatttatatttggaaggctactgctcttttgcctctcaagagtatgtgggtgaagactgaaacaaatggaaacctaaaatccccagacctctgttacaggttgaatcattcatatccaccagagggaaatcatccttccacgacaatggttcagtcggccatcacatcctgaagaacattcctagacattctgactcttccatctctctctaccctggaggtgtagaaatagcaatggggtcacagtcacacaatttaggttccacttcataacattttttgtctcctaggacaaacgtgtatcatcagtttccaactgttttggctcagttttcatccatgacacctccccctaccagccattctcctgtgggagcaagaacattgcttcaaaagaagagagggcatctccatgcttgtgggacccaaaacctatctctggccctacaaaagttttcctaattgtctgatctttagtgcattcaggttatggcacctggagaggaatgccctttatcttttgaaggatgggatttcccatctcaaccctggattcctcaccttcagaacgagccctgccactgtctccaataaaatgttttctgcagcatcg

SEQ ID NO: 12947 - protein, 71 aa, Homo sapiens
MDCHKDEKGTIYDYEAIALNKNEYVSFKQYVGKHILFVNVATYCGLTAQYPGMSVQGEDLYLVSSFLRKGM

SEQ ID NO: 12948 - DNA, 4876 bp, Homo sapiens
gagcgtggctcaccgggcccggccggaacctacgggcacagctgcgggtgtgtctgcggaacctccacctgagctgtagagtgtttccctcgacccactagtctgggttccacagggtctgagctcctcagaggtgggagctgcggccgagggaagggtgcatgtgcgcggcgacaatcgggcctcttccccaggcagcttgtgagcccctctccctctccgccctcgcccaggctgctccgatcttcgtttccttgcctaggctcatacacccaggctttatttagggccaaagtatccgtcataacctcggttttctgtctcgcaagtatcttgccgctcaatttgtgaccctgaagctttagtgagtcgctctgtgctcactatttctggtcttttcagaggatggcttcactttcaatggaattgcccgagtaactgccctgtgttgtcacgtaaacaagtccttttaaactgagtctgtagttgtcctgtgttgagtgttttcttatatcaaaaactttcctgaccaagaacaaaaaaggagctcaagtaaaatcacccatttgcctagaccccaactggagagaacctttgcctgagctgtctaagctcgggatggaagcagtctctagggtcttcccagccttggctggccaggctccagaagaacaaggggagattatcaaagtaaaggttaaagaagaagaccacacttgggatcaggaatcagccctacgtaggaatttgtcttataccagggaactctctcgtcagcgcttcaggcagttctgctatcaggagacacctgggcccagggaggctctgagtcaactgcgggaactttgccgtcagtggctgaacccagagatacataccaaggagcagatcctggaattgttggtgctggagcagttcctgaccatcctgcctgaggagctccagtcttgggtgcgggagcataatcctgagagtggagaagaggtggtgactttgctggaagatttggagagggagcttgatgaacctagacagcaggtctcacagggcacatatgggcaggaagtttctatggaagaaatgatccctctggattctgcaaaggagtctttaggcacccagcttcagtctatggaagatagaatggaatgtgaatctccagagccacacccacttcaagataatgggtcatttttgtggttttccatgatgtctcaaagcatgggtggtgataacctcagtagcttagatactaatgaagcagaaattgaaccagaaaacatgagagaaaagttcttcagaagcttagcaaggttactggaaaacaaaagtaataatactaagatattttctaaagcaaagtactgtcagttgataaaggaagtgaaagaagctaaagctaaggcgaaaaaggaatcagttgactaccgtcgcttggctagatttgatgttatccttgtacaaggaaatgagaagctaattgaggctgtaaatggggaaacagataaaatacggtattacttacacagtgaggacttatttgacattctgcataatacacatctcagcattggacatggtggacgtactcgcatggagaaagagttacaagcgaaatacaagaacatcacaaaagaagttataatgctgtatctgaccctctgtaaaccatgccaacagaaaaattcaaaactcaagaaggttctaacatcaaaatcaattaaggaagttagttcaagatgccaagtagatcttatagacatgcagttgaatcctgatggggagtacagatttattttgcattatcaagatctctgtacaaagttaacttttttgcggtcattaaagtctaaaaggcctacggaagttgcacatgctcttttagatatatttacaattattggagcacccagtgtcctacaatctgacaatgggagggaattttcaagccaggttgtcagtgaactcagtaatatttggccagaattgaaaattgtccatgggaagtctcagacctgccaaagccagagttctgcagaacaaactgaggatatccgaaagaggattttctcctggatgcaaactaacaactcatcacactggactgaatttttgtggttcattcagatgtcccaaaatcagccctatcacagaagcatgcaacagactccatgtgaaagtgcatttagctctgaagctaaactgggcttgtcccattctcagctaactgaagaacttgttgccagcttgcatacagaaaatgaattagatcaggctgacaaagagttagaaaatactttaagagcccagtatgaagaaaacattgagactggaacagacagtagtgatattgaagagaatctttctgtcactcctaaggtggctgaaaaaagccctcctgagagcagactaagatttttatcctgtgtagtttgtgaaaaagaatgcacaggtgttaatagttgtatatcatgtgatggaaatatccatgcaatttgtggagtgccctctcaacatgggactgagggctgtggtcggcaaataacttgtagcctttgctatgaaaccagcacaatgaagaggaaacatgatgagattcaaagaagtttgcctgttaaaccttccaaaatgctaaagccatcagggacaccattttcaccagacaaagtaggagactggatggcgaaacaagcttcactggacttttttgtcaagaaaagacatgccttttctgaacacagtagtagtaataaaagaaatgttaacaatagaagttatcctgaagaagggaaaaccaaaagagttcatgctagtttcactcggaaatatgatccttcatatattgagtttggttttgtagctgtaattgatggtgaagtactaaaaccacagtgtattatttgtggagatgtactggctaatgaagcaatgaaaccatcaaaacttaagcgacatttatattcaaaacataaagaaataagttcacaaccaaaagaattctttgaaagaaagagtagtgaattgaaaagccaaccaaagcaggtgttcaacgtttctcatataaacattagtgctttgcgggcttcatataaagtagcacttccggttgccaagtctaaaacaccatacacaattgctgagacactagtgaaagactgcatcaaagaagtttgcttggaaatgttgggtgaatctgcagcaaagaaggtagctcaggtaccactttccaatgacaccatagctcgacgtattcaggaactggctaatgatatggaagatcaactcatagaacaaataaaactagcaaagtatttttcattgcaacttgatgaatgcagagatattgctaacatgataattcttttagtctatgtgaggtttgaacatgatgatgatataaaggaagagttctttttttcagcctctttgcctacaaacacaactagctcagaactgtatgaagctgtaaagaattatattgttaacaaatgtggtttggaatttaaattttgtgtaggagtatgttctgatggtgcagcttcaatgacaggaaaacattctgaagtggtaacccagattaaggaacttgcgccagaatgtaaaacaacacattgcttcattcatcgagaaagtcttgccatgaaaaaaatatcagctgaactaaatagtgtacttaatgatatagtaaaaattgtgaattatataaaatctaattcattgaattcaagattattctctttattatgtgataatatggaagctgatcataagcaactgttactgcatgctgagatacggtggttatcacggggaaaagttctgtcaagaatgtttgaaatacgaaatgaactcttagtgtttctgcaaggcaagaaacccatgtggtcccaactttttaaagatgtgaattggacagccagacttgcttatttgtctgatatcttcagtatttttaatgatcttaatgcttctatgcaagggaagaatgcaacttatttttcaatggcagataaagttgaaggacaaaaacagaagttagaagcttggaaaaacagaatttctacagattgttatgacatgtttcataatttaacaacaattatcaatgaagtaggtaatgatcttgatattgcacatctgcgaaaagttatcagtgaacatcttacaaatttgttagaatgttttgaattttattttccatcaaaagaagatccacgcataggaaatttgtggatccaaaatccatttctttcatcaaaagataacttaaatttaactgtaactctacaggataagttgttgaagctggctaccgacgaaggattgaaaatcagttttgaaaatacagcatcacttccttcattttggataaaagctaaaaatgactatcctgagcttgctgagattgctttaaaattgctgcttcttttcccctcaacatacctctgtgagaccggattctctactttaagtgttattaaaacaaaacatagaaacagtttaaatatacattatcccctgagggtagcattgtcatcaatccaacctagattagacaaattaacaagcaagaagcaagctcacttatcacattaaaagctttaaatattgatatgtaaggtattggttcaaagtatgcatataagcattgagtgtgaggaatttgctatttcactttaaactttctgtctagttacagttatggaagtatgagaagttatgagtgaaacagcaattttctatataaattgcctatatgtatattttcaattaagaatgtgtacagtttttataattctatttttcctcatatttgtcgtatttattaaaatataattttaaatctgttgattctaatattaaaacatttgatctt

SEQ ID NO: 12949 - protein, 1325 aa, Homo sapiens; identical to SEQ ID NO: 1305

SEQ ID NO: 12950 - DNA, 2874 bp, Homo sapiens
actggttgtgcaaacacctacggtaccagtaattctggggaggcaagtactctggaaacgacggagaattaactccggaattacctagttatctggcatcacggtgaaaagagttccacagtgtgagtagtgctggagtagatgctgctggtctgtgttttcctgtcaccgtgataaaccatcgctggcactcagacccgtggtgctcaccgcagcgacctgaaacaaaatggagaggagcatccctaaggactaccacgtcagcgaatctgtaggatcgtcccccgcctttcctcgttaatttcgggccactttcacctttccctttcaccctaaatcagacttaaaaagaaatttactccttcttcagcagcaaagcgtcagctttcctgtcagcgtgagtctcactgaagcctgacctaactctttcggatcggaactagaaagtttattatcaaggaggtatttaaccacgactatacttacctactgtacccttgtggttggtcccatggtgtaatggttagcactctggactttgaatccagcaatccgagttcgaatctcggtgggacctttcaaaggtgaacgttttacagttcctggcttggcctctgaatgtgggaaaaattcgttcctccgcttcccatcgaattctcgtcgaaaacaactttgtggtcgcgtgcacggtattgaactctccccttctatccaagcatgaaagtaccaagctctttcgcctagaagaacgctttcaaagcgtatcaaattcacgggtttggagacaaagagaaagatgctgctcttatcgacttacgaaaagctccagcagcaacgtggaaacccaattcctgtgatggagacaaacgcttcctcaaaatttcctaggttcgaagccctcctcgctgccacaaccaagtcctgcgtgtaaagtggctgagccttggtctcgggcgtgtttcttttgtttgtttttttgtttgtttttttttttttttttcgctgtggaccttgcgccccgggttacttctcgccccttttccctatcccccatcttgatgagacaattcaccctcatctgctttctctagtcccctgtacttcttagtctctccgctcaccccgactgcaacgtctggaaatccctccaaagccagcagccccggagggctcgggtccctggtatccacggcgtcgagtcttccagccggagagaaaaactcacctaggaccggacctgggcctcgccgcgctgggagctggcattcccaattcaggaccagacacggtggaggggccctacaacttgtgtgggagacaagggagatgggggtaaaaagacctctgccttcagccgttcgcctggcatctcgcctcttcagctcctagtaccagggtgaaaggagggggctccctgaccgagtcctccccagacactaccaaacactcggtccgaagcatccgggaaacagtcccttggagctgaaggtcaagaacagaaaatgtagccgctatcttgcctcccctgaactgtgtgtgtagacgaggattgaattggagatagagttgatgaaacccggaaggtctggaaaattccttatagacactaatttagctgttagaatgaggtgggaaatgtgaggtgtcaaggtgagggaaaggtgtgccctagaggacagagaggacaagaactaaattagaaacaagtatttgtgtttcgtacaaattaatctcttctatgatgtaagagacaacctttaaatccaattatttattttcagatttcttactttgacattttgattttcgcatacataccaaaaaaccaaatcgaatcctactttcaccaagtccattaaaccattaataattcattagctcatattttgaattaccattggttacacagagactctgtaactaagtttacaaaattcatgaaagcattattttggctcccgttatgtgtgcttgattgtacttcatatggtctgtaatggtgctaattgcagagggaaataacattttcttgtggtgttgccttagctagtgtggccccaccttctttccactttgttgatgttagcgtgatgagatctcacccaaagtgttctcccttttcctaatggcctaacagcctcttctgcctgtttgggatgcttataagtccagccatccttccgaccaacaccatagcctgcctgtgttactgtaagtaatcattatgatcacatccatcgtcaagcatccacttatcctagctcaaaccagtaactcagactttatcccaagcctctaaattaaggtaatggacaagacctgattggagatggtgcctgcacaacgtgacccagaactgaacagaaggccaaggagcagctgctatgaggaggcggaagcagccaccaacactgggagaggctgggagcatatgtagatgctccccctgatgccttacatgttctgtgggtctaccaattcctttaggaagctgaggaaattcccgtgggtatttataaaaactccacccttgaacaaactttagttaggttcctctgagccctcctctcaactaggtcccatccttggcttgtccagcccaatttcagcaaataatccagttgagcctagttttagcaagaatcttgctaagccaattcagtaagaattcctcacctcaaaatcctatcaagtttctctttttccacccttgatatctaatcaagttcctcgtagtcactttctatcaaatggttgtcttacccttactattagctatagatccccagctgtccctgatgtatttggatctgagtttatttaatttctctcccctattgcaattgtctggaataaagtcttccttgcctattt

SEQ ID NO: 12951 - protein, 44 aa, Homo sapiens
MLLLSTYEKLQQQRGNPIPVMETNASSKFPRFEALLAATTKSCV

SEQ ID NO: 12952 - DNA, 577 bp, Homo sapiens
gcaattgcaatacagtggtatttgtgtatccgaacatacgaaagcttctacaaggtgcggatccataaggaagatattaggaaacatctaattgaagcttgaagaaccaaaatgaggaaggcagaattaggaaagaccctgtccggtgacgcctccccttctggtttccatctgtgccccctctcaggagccgcgggaacacaagcctcgagcagaatccaaccacttgatgattcgaaatcaccgcaatgccatggaatgtaaaaactgctctcgccacgtctagagaccgatgcctcttcctccgctgggaacatggttcatctccactctccgatttcacggttttatttgccctctgggacgcgctgacattgttctaagcacattttctaagtgattgtgtgagtgtgggtgtgttttgttggacttgaagggagtctaatttctagaagttcctttcaggagtctgcctttactgcaaagttgatgtattcgaaaacacagtaactcttaatggcaacagaatttgtcacctaattaagtgcaattcggtcataaaagaagccacagaatc

SEQ ID NO: 12953 - protein, 50 aa, Homo sapiens
MRKAELGKTLSGDASPSGFHLCPLSGAAGTQASSRIQPLDDSKSPQCHGM

SEQ ID NO: 12954 - DNA, 297 bp, Homo sapiens
gctacaaagctgtacagcatgttgctgaactgaataccgtcggcaattgcaatacagtggtatttgtgtatccgaacatacgaaagcttctacaaggtgcggatccataaggaagatattaggaaacatctaattgaagcttgaagaaccaaaatgaggaaggcagaattaggaaagaccctgtccggtgacgcctccccttctggtttccatctgtgccccctctcaggagccgcgggaacacaagcctcgagcaggcaaagtctctttggatttgaaatacaaaaccgttaagtg

SEQ ID NO: 12955 - protein, 46 aa, Homo sapiens
MRKAELGKTLSGDASPSGFHLCPLSGAAGTQASSRQSLFGFEIQNR

SEQ ID NO: 12956 - DNA, 446 bp, Homo sapiens
gaggcgctctcgcagccgtggcagtctggacgaaaagaaccaggtccctttcctggtctagcctacctccctacctctcttccctcatatccagaagaagcgacggagagatggagtttcgctcttgttgcccaggctggagtgcaatggcgcgatctcggctcaccgcaacctctgcctccagggttcaagcgattctcctgccgcctcagcttcccgagtagctgggattacaggcacgcgccaccaccccagctaattttttttttgtgtgtgtgacggagtctcgctctgtcgcccaggctggagtgcagtggcgcgcgctgcaagctccgcctcccgggttcacgccattctcctgcctcagcctcccgagtagctgggactacaggcgcctgccaccacgcctggctaattttttgtattttttagtagaattggggttt

SEQ ID NO: 12957 - protein, 37 aa, Homo sapiens
MEFRSCCPGWSAMARSRLTATSASRVQAILLPPQLPE

SEQ ID NO: 12958 - DNA, 2394 bp, Homo sapiens
cagcttccttggctctttttgcccatatgccgaagagccgagcattgccgccaagcattggcaccggccatgcggagactagcgaaagctttgcaattcctctacttctcagtgatgactcgggctttctccttacattcttgatgggcatgaccggtcctgtcagctgggtggccaatttctgttcttcagcagaactgtctcccttcttgggggccgagggctttctggggaagaggatgagtttggagcaatactcattcagacgctgcacattggcctgcagggaatcggtggacttgttctgcctcctcggatccacagagatgccagtggtccgggtcaccttcttgtgaatgcccgccaccctgagctccaggctgaagcctctgccggcgcgcaccttgatgtgataacgcacagcagggcacagcacaatgggccagatgggtcccgactctccgggcgcggggcgatgcagcgccctttggcttgccgggccttgattctgcggatcttctggttgaaccacgtggccacacgctgctgccagtccttgtggaagtggggcttcaacatcatgccattcctgctgggcgccatggctgcctacggccctcctacgaaggaaacactttatagatttctatagcagtgttacatagtaaggttttatggcgagttttgtagcatggatcatactaccttaggactgatggtaaagttttagtctaaggaaagctctgaaaatttgaaaatgtgtaaccacccaatgagttcagcttgcccactgcctagacagaaccatttatcaagacgggcatgcaaagccggctgtgtgggagacccgttttattattattcaaatcagtctccccaagtggattgcagtttttaaggataatttggtgggtaggggaccagtgagttgggaaagttgattagtcgggtcggagatgaaatcagagggagtcgaagctgtcctcttgtgttggcttaatttctggatgggggccacaagaccagatgagccagtttatcgttatgggtggtgctagctgatccatagagtacaggggctgcaaaatatctcaagaactgatcttcggttttacaatagtgatgttatcctgaggagcaattgggggaggtttagaatcttgcagcctccagctgcatgactcctaaaccataatttataatcttgtggctaatttgttagtcctgcgaaagcagtctagtccccaggcaggaagcgggtttgttttggaaagggctgctattgtctttgtttcaaagctaaactataaactaagttcctcccaaagttaggtcagcctacgaccaggaatgaacaaggacagcttggaggttagaagcaagatggaattggttaggttagatctctcactgtctcagttgtaattttgcgatggtgttttcaaatgttgatttaaagaagaccataaatttgtgttgctttctcagattttgagaataaggacaaaaagtgtatgttttaatgggagaatcttaagaatttcactactgaagtggatttctctgtccattaacagtgctaaatgttttgtatttcccagttggaaaaacaaaatctgcaagctttgaatgatacttgttattaggttttggtaacagctgttgtactattcccatttcaatgctcaatagccacacgtggcatgtcatacctaccaggtggacagcacagatatagaacattttcatcattgtaaaaagccctatttgacaacactaacttaaagtattaatcttttagaagagaaagcttcagtccaacccaaattacacaattttacttttgaaaatattgttgaaacaacgttcaattttttaaaattttggaaaactgaatgaaatccatttgtaaatgcgcaaatggtactggaggtggaaaactgaagccttgctatagttttagttttttggagggttatgatcaacacagagaagaaaagattcatctacccatagagcttcttgagaaaaattttctaacaataattttgaaaatttgtagtgaatttgttcttgccattatttatgggtgctttcatgtgcgaggcacatcaaagttctggggaatgacttaggcacaaccaaatggctatcttgggaagaccaaagtcctttgctatatatgagagttttgagatggcgactacctttctgtatggtagattcttgtttttgaatatgccctctgggttttcaaaacaaattgtttttacaatacctatagtagttatctagggcatattctttagcttcaaaaattctatctttagaatgggcttcaatattcataactgagttattttcctctaataaatcattaacattttcccatgt

SEQ ID NO: 12959 - protein, 109 aa, Homo sapiens
MPKSRALPPSIGTGHAETSESFAIPLLLSDDSGFLLTFLMGMTGPVSWVANFCSSAELSPFLGAEGFLGKRMSLEQYSFRRCTLACRESVDLFCLLGSTEMPVVRVTFL

SEQ ID NO: 12960 - DNA, 413 bp, Homo sapiens
ggccttataactgttatcgccatctcgaaaaacgtgtgcgggttttttttttttttttttttgctcccagcctgcccagatttcaggaaggaaagaagatcttttgcttcttcggtcgctgggtcggctctccagtgtctgatgtttactgaaatcttgatcgtggttagcctcccccaggacttcattgtttggaagatgccttcgccaagcaatctgagctccaggccgggaagccccaaggtcacaaattttaatggagccctgaaactaaacagaaatcatccctcccactagaacaagagcccctagaggccagcgacaccgctaaaataacatgtgtagaccaatgccgtccaggtaacagtgcctggcaaacacggtagaggttcaataaatacattttaactcaa

SEQ ID NO: 12961 - protein, 51 aa, Homo sapiens
MFTEILIVVSLPQDFIVWKMPSPSNLSSRPGSPKVTNFNGALKLNRNHPSH

SEQ ID NO: 12962 - DNA, 2491 bp, Homo sapiens
aaaattcctgggcagtctggtggattctgaaatccttatatgtaggtaaacccttctcttaattattagaaattacaaacccccacaatctttgataattttctattttgtatatgctgggttcatatatgcattgcatctattcagatatatactttttggggcatctagcaacatagagctagcagatacatgtcctctacaagcaagacaaatggggagaaactccactcaatacagtggataataccagaagtggttagttcaggcatgactttccttgatctggctcttcttttcttgccacttaaaagtcttagtgggataatgtgtgagaaattctgtttcaactataaagtgccttataaatgaatggtcatgtttaccccagagtgtcagtgagtgtcacttgagccattcagctcttgtacacagatgacttatgcaactcaaaagttatgtatgacgtggggttggaaccgcgtttccctctgcagaatcagctgactcactggaaggtggaattcttgatcttggctcagttttatcccatattctaccagtctcaggcatgtggttatccctgtacttaagattcccaatccctctccccttaaagcttttggttggatgatagagccatacatcatatgaaaaaattagtgcatgactaacaacagaggttctggggtttctggtggagaccactgctttatgatgactaaccaaagcccccttagttatgtatttcctggaaaccctcatgacttccataactttgctcttttattctttcagaattaagagaggctcagttatactcagtggacgtgactctggacccagacacggcctaccccagcctgatcctctctgataatctgcggcaagtgcggtacagttacctccaacaggacctgcctgacaaccccgagaggttcaatctgtttccctgtgtcttgggctctccatgcttcatcgccgggagacattattgggaggtagaggtgggagataaagccaagtggaccataggtgtctgtgaagactcagtgtgcagaaaaggtggagtaacctcagccccccagaatggattctgggcagtgtctttgtggtatgggaaagaatattgggctcttacctccccaatgactgccctacccctgcggaccccgctccagcgggtggggattttcttggactatgatgctggtgaggtctccttctacaacgtgacagagaggtgtcacaccttcactttctctcatgctaccttttgtgggcctgtccggccctacttcagtctgagttactcgggagggaaaagtgcagctcctctgatcatctgccccatgagtgggatagatgggttttctggccatgttgggaatcatggtcattccatggagacctccccttgaggaggtgaattcaggccaaaagggctgttggctgtaatcctacgccaggcacaaggcatcttgttgccttgccacgtcctgtcacagctgggtatccttaccatgttccacgcccttgcagtgggagacaggatgtccatgttctctaccatccttttccttcccatgcagattgtgaaatgtaatgagatgtatcaagatatcctagaaataaaaaccagatgtccacctccagtgtttcatactttctggttttacacatcgctggagggataaagagtatggataatctttggatttggagagccgttcaagatacttccagcttcttggctcagcctggcttcctctggttcagccccacataatgattatggctatttgctgtcatttctgggctagggctcctttctaacaacctagactggaataaggccctgtcagcatggctccctttatcccagttttccgtctgggaacagtacctctgcccctgattcccaatgtgccatagttttattaactccattaaagaagcctgtatgtgttttggttagttacagttattttacaataatggtgggtaatggccccacctctgttatgagataatgttctaatcaatgtctctgcctttgtatcttttctgagggctttgtctgttctcttcattctaatgaaaggtgtattctagtgctgggtgcatatcatccaggataatattctgcccaactccatcctctgttactagatcccttaccagtcacatttgtggactggtggccagtcgtataccatccctggaaggattctgggacaatattccagggattcattgacttcttggctccttttctccatttcctttgggggaagggggaattgaccatgcttaagtgcatcctatcaaggggcagctccgtccccatggccattggatcatgagacactctgaagtcagaaggctggggcagatcacttcaagcaagcccccatgatggttctcagtcctgcttctctgtgggtacgtgcccctctgtttaaaaataaactgaatatggatgtttaca

SEQ ID NO: 12963 - protein, 44 aa, Homo sapiens
MYFLETLMTSITLLFYSFRIKRGSVILSGRDSGPRHGLPQPDPL

SEQ ID NO: 12964 - DNA, 2077 bp, Homo sapiens
gagcctaacccagatggagagggagaagattgtttgggagtttgagcagctgtatcactccttaaaggagcatgagtatcgcctcctggcccgccttgaggagctagacttggccatctacaatagcatcaatggtgccatcacccagttctcttgcaacatctcccacctcagcagcctgatcgctcagctagaagagaagcagcagcagcccaccagggagctcctgcaggagggctgaaagaatcaggattcctgaaccttggatcacacctccagatttgcaagagaaaatccacatttttgcccaaaaatgtctattcttgacggagagtctaaagcagttcacagaaaaaatgcagtcagatatggagaaaatccaagaattaagagaggctcagttatactcagtggacgtgactctggacccagacacggcctaccccagcctgatcctctctgataatctgcggcaagtgcggtacagttacctccaacaggacctgcctgacaaccccgagaggttcaatctgtttccctgtgtcttgggctctccatgcttcatcgccgggagacattattgggaggtagaggtgggagataaagccaagtggaccataggtgtctgtgaagactcagtgtgcagaaaaggtggagtaacctcagccccccagaatggattctgggcagtgtctttgtggtatgggaaagaatattgggctcttacctccccaatgactgccctacccctgcggaccccgctccagcgggtggggattttcttggactatgatgctggtgaggtctccttctacaacgtgacagagaggtgtcacaccttcactttctctcatgctaccttttgtgggcctgtccggccctacttcagtctgagttactcgggagggaaaagtgcagctcctctgatcatctgccccatgagtgggatagatgggttttctggccatgttgggaatcatggtcattccatggagacctccccttgaggaggtgaattcaggccaaaagggctgttggctgtaatcctacgccaggcacaaggcatcttgttgccttgccacgtcctgtcacagctgggtatccttaccatgttccacgcccttgcagtgggagacaggatgtccatgttctctaccatccttttccttcccatgcagattgtgaaatgtaatgagatgtatcaagatatcctagaaataaaaaccagatgtccacctccagtgtttcatactttctggttttacacatcgctggagggataaagagtatggataatctttggatttggagagccgttcaagatacttccagcttcttggctcagcctggcttcctctggttcagccccacataatgattatggctatttgctgtcatttctgggctagggctcctttctaacaacctagactggaataaggccctgtcagcatggctccctttatcccagttttccgtctgggaacagtacctctgcccctgattcccaatgtgccatagttttattaactccattaaagaagcctgtatgtgttttggttagttacagttattttacaataatggtgggtaatggccccacctctgttatgagataatgttctaatcaatgtctctgcctttgtatcttttctgagggctttgtctgttctcttcattctaatgaaaggtgtattctagtgctgggtgcatatcatccaggataatattctgcccaactccatcctctgttactagatcccttaccagtcacatttgtggactggtggccagtcgtataccatccctggaaggattctgggacaatattccagggattcattgacttcttggctccttttctccatttcctttgggggaagggggaattgaccatgcttaagtgcatcctatcaaggggcagctccgtccccatggccattggatcatgagacactctgaagtcagaaggctggggcagatcacttcaagcaagcccccatgatggttctcagtcctgcttctctgtgggtacgtgcccctctgtttaaaaataaactgaatatggatgtttaca

SEQ ID NO: 12965 - protein, 216 aa, Homo sapiens
MQSDMEKIQELREAQLYSVDVTLDPDTAYPSLILSDNLRQVRYSYLQQDLPDNPERFNLFPCVLGSPCFIAGRHYWEVEVGDKAKWTIGVCEDSVCRKGGVTSAPQNGFWAVSLWYGKEYWALTSPMTALPLRTPLQRVGIFLDYDAGEVSFYNVTERCHTFTFSHATFCGPVRPYFSLSYSGGKSAAPLIICPMSGIDGFSGHVGNHGHSMETSP

SEQ ID NO: 12966 - DNA, 2972 bp, Homo sapiens
ggggtttacgctgccgccggcatccgctcggacgcggccacgttgtcttgcgcgctttgcccgcctggccctgggactctgaccctcggctaccctttcctgccccactagcgtggccgcgagcctcggtgagccggccgtattcccgctctcgcttagggggcacaggcgcaggcatcggcccggccactccaagccttcggtgcgcgggcgcgtctgggatacgggcccgggaggcgccgccctccgtccgcccggtgcctctcaggaacagcgaaccggagagagcgccggagagttgggctcagtgcagagctcggcgccggggcccatgcccgtgcgcccccgcaggccggcgccatggcctccgggagtgtggccgagtgcctgcagcaggagaccacctgccccgtgtgcctgcagtacttcgcagagcccatgatgctcgactgcggccataacatctgttgcgcgtgcctcgcccgctgctggggcacggcagagactaacgtgtcgtgcccgcagtgccgggagaccttcccgcagaggcacatgcggcccaaccggcacctggccaacgtgacccaactggtaaagcagctgcgcaccgagcggccgtcggggcccggcggcgagatgggcgtgtgcgagaagcaccgcgagcccctgaagctgtactgcgaggaggaccagatgcccatctgcgtggtgtgcgaccgctcccgcgagcaccgcggccacagcgtgctgccgctcgaggaggcggtggagggcttcaaggagcaaatccagaaccagctcgaccatttaaaaagagtgaaagatttaaagaagagacgtcgggcccagggggaacaggcacgagctgaactcttgagcctaacccagatggagagggagaagattgtttgggagtttgagcagctgtatcactccttaaaggagcatgagtatcgcctcctggcccgccttgaggagctagacttggccatctacaatagcatcaatggtgccatcacccagttctcttgcaacatctcccacctcagcagcctgatcgctcagctagaagagaagcagcagcagcccaccagggagctcctgcaggacattggggacacattgagcagggctgaaagaatcaggattcctgaaccttggatcacacctccagatttgcaagagaaaatccacatttttgcccaaaaatgtctattcttgacggagagtctaaagcagttcacagaaaaaatgcagtcagatatggagaaaatccaagaattaagagaggctcagttatactcagtggacgtgactctggacccagacacggcctaccccagcctgatcctctctgataatctgcggcaagtgcggtacagttacctccaacaggacctgcctgacaaccccgagaggttcaatctgtttccctgtgtcttgggctctccatgcttcatcgccgggagacattattgggaggtagaggtgggagataaagccaagtggaccataggtgtctgtgaagactcagtgtgcagaaaaggtggagtaacctcagccccccagaatggattctgggcagtgtctttgtggtatgggaaagaatattgggctcttacctccccaatgactgccctacccctgcggaccccgctccagcgggtggggattttcttggactatgatgctggtgaggtctccttctacaacgtgacagagaggtgtcacaccttcactttctctcatgctaccttttgtgggcctgtccggccctacttcagtctgagttactcgggagggaaaagtgcagctcctctgatcatctgccccatgagtgggatagatgggttttctggccatgttgggaatcatggtcattccatggagacctccccttgaggaggtgaattcaggccaaaagggctgttggctgtaatcctacgccaggcacaaggcatcttgttgccttgccacgtcctgtcacagctgggtatccttaccatgttccacgcccttgcagtgggagacaggatgtccatgttctctaccatccttttccttcccatgcagattgtgaaatgtaatgagatgtatcaagatatcctagaaataaaaaccagatgtccacctccagtgtttcatactttctggttttacacatcgctggagggataaagagtatggataatctttggatttggagagccgttcaagatacttccagcttcttggctcagcctggcttcctctggttcagccccacataatgattatggctatttgctgtcatttctgggctagggctcctttctaacaacctagactggaataaggccctgtcagcatggctccctttatcccagttttccgtctgggaacagtacctctgcccctgattcccaatgtgccatagttttattaactccattaaagaagcctgtatgtgttttggttagttacagttattttacaataatggtgggtaatggccccacctctgttatgagataatgttctaatcaatgtctctgcctttgtatcttttctgagggctttgtctgttctcttcattctaatgaaaggtgtattctagtgctgggtgcatatcatccaggataatattctgcccaactccatcctctgttactagatcccttaccagtcacatttgtggactggtggccagtcgtataccatccctggaaggattctgggacaatattccagggattcattgacttcttggctccttttctccatttcctttgggggaagggggaattgaccatgcttaagtgcatcctatcaaggggcagctccgtccccatggccattggatcatgagacactctgaagtcagaaggctggggcagatcacttcaagcaagcccccatgatggttctcagtcctgcttctctgtgggtacgtgcccctctgtttaaaaataaactgaatatggatgtttaca

SEQ ID NO: 12967 - protein, 513 aa, Homo sapiens; identical to SEQ ID NO: 1308

SEQ ID NO: 12968 - DNA, 2692 bp, Homo sapiens
ggggtttacgctgccgccggcatccgctcggacgcggccacgttgtcttgcgcgctttgcccgcctggccctgggactctgaccctcggctaccctttcctgccccactagcgtggccgcgagcctcggtgagccggccgtattcccgctctcgcttagggggcacaggcgcaggcatcggcccggccactccaagccttcggtgcgcgggcgcgtctgggatacgggcccgggaggcgccgccctccgtccgcccggtgcctctcaggaacagcgaaccggagagagcgccggagagttgggctcagtgcagagctcggcgccggggcccatgcccgtgcgcccccgcaggccggcgccatggcctccgggagtgtggccgagtgcctgcagcaggagaccacctgccccgtgtgcctgcagtacttcgcagagcccatgatgctcgactgcggccataacatctgttgcgcgtgcctcgcccgctgctggggcacggcagagactaacgtgtcgtgcccgcagtgccgggagaccttcccgcagaggcacatgcggcccaaccggcacctggccaacgtgacccaactggtaaagcagctgcgcaccgagcggccgtcggggcccggcggcgagatgggcgtgtgcgagaagcaccgcgagcccctgaagctgtactgcgaggaggaccagatgcccatctgcgtggtgtgcgaccgctcccgcgagcaccgcggccacagcgtgctgccgctcgaggaggcggtggagggcttcaaggagcaaatccagaaccagctcgaccatttaaaaagagtgaaagatttaaagaagagacgtcgggcccagggggaacaggcacgagctgaactcttgagcctaacccagatggagagggagaagattgtttgggagtttgagcagctgtatcactccttaaaggagcatgagtatcgcctcctggcccgccttgaggagctagacttggccatctacaatagcatcaatggtgccatcacccagttctcttgcaacatctcccacctcagcagcctgatcgctcagctagaagagaagcagcagcagcccaccagggagctcctgcaggacattggggacacattgagcagggctgaaagaatcaggattcctgaaccttggatcacacctccagatttgcaagagaaaatccacatttttgcccaaaaatgtctattcttgacggagagtctaaagcagttcacagaaaaaatgcagtcagatatggagaaaatccaagaattaagagaggctcagttatactcagtggacgtgactctggacccagacacggcctaccccagcctgatcctctctgataatctgcggcaagtgcggtacagttacctccaacaggacctgcctgacaaccccgagaggtctccttctacaacgtgacagagaggtgtcacaccttcactttctctcatgctaccttttgtgggcctgtccggccctacttcagtctgagttactcgggagggaaaagtgcagctcctctgatcatctgccccatgagtgggatagatgggttttctggccatgttgggaatcatggtcattccatggagacctccccttgaggaggtgaattcaggccaaaagggctgttggctgtaatcctacgccaggcacaaggcatcttgttgccttgccacgtcctgtcacagctgggtatccttaccatgttccacgcccttgcagtgggagacaggatgtccatgttctctaccatccttttccttcccatgcagattgtgaaatgtaatgagatgtatcaagatatcctagaaataaaaaccagatgtccacctccagtgtttcatactttctggttttacacatcgctggagggataaagagtatggataatctttggatttggagagccgttcaagatacttccagcttcttggctcagcctggcttcctctggttcagccccacataatgattatggctatttgctgtcatttctgggctagggctcctttctaacaacctagactggaataaggccctgtcagcatggctccctttatcccagttttccgtctgggaacagtacctctgcccctgattcccaatgtgccatagttttattaactccattaaagaagcctgtatgtgttttggttagttacagttattttacaataatggtgggtaatggccccacctctgttatgagataatgttctaatcaatgtctctgcctttgtatcttttctgagggctttgtctgttctcttcattctaatgaaaggtgtattctagtgctgggtgcatatcatccaggataatattctgcccaactccatcctctgttactagatcccttaccagtcacatttgtggactggtggccagtcgtataccatccctggaaggattctgggacaatattccagggattcattgacttcttggctccttttctccatttcctttgggggaagggggaattgaccatgcttaagtgcatcctatcaaggggcagctccgtccccatggccattggatcatgagacactctgaagtcagaaggctggggcagatcacttcaagcaagcccccatgatggttctcagtcctgcttctctgtgggtacgtgcccctctgtttaaaaataaactgaatatggatgtttaca

SEQ ID NO: 12969 - protein, 358 aa, Homo sapiens; identical to SEQ ID NO: 1310

SEQ ID NO: 12970 - DNA, 1654 bp, Homo sapiens
aaaattcctgggcagtctggtggattctgaaatccttatatgtaggtaaacccttctcttaattattagaaattacaaacccccacaatctttgataattttctattttgtatatgctgggttcatatatgcattgcatctattcagatatatactttttggggcatctagcaacatagagctagcagatacatgtcctctacaagcaagacaaatggggagaaactccactcaatacagtggataataccagaagtggttagttcaggcatgactttccttgatctggctcttcttttcttgccacttaaaagtcttagtgggataatgtgtgagaaattctgtttcaactataaagtgccttataaatgaatggtcatgtttaccccagagtgtcagtgagtgtcacttgagccattcagctcttgtacacagatgacttatgcaactcaaaagttatgtatgacgtggggttggaaccgcgtttccctctgcagaatcagctgactcactggaaggtggaattcttgatcttggctcagttttatcccatattctaccagtctcaggcatgtggttatccctgtacttaagattcccaatccctctccccttaaagcttttggttggatgatagagccatacatcatatgaaaaaattagtgcatgactaacaacagaggttctggggtttctggtggagaccactgctttatgatgactaaccaaagcccccttagttatgtatttcctggaaaccctcatgacttccataactttgctcttttattctttcagaattaagagaggctcagttatactcagtggacgtgactctggacccagacacggcctaccccagcctgatcctctctgataatctgcggcaagtgcggtacagttacctccaacaggacctgcctgacaaccccgagaggttcaatctgtttccctgtgtcttgggctctccatgcttcatcgccgggagacattattgggaggtagaggtgggagataaagccaagtggaccataggtgtctgtgaagactcagtgtgcagaaaaggtggagtaacctcagccccccagaatggattctgggcagtgtctttgtggtatgggaaagaatattgggctcttacctccccaatgactgccctacccctgcggaccccgctccagcgggtggggattttcttggactatgatgctggtgaggtctccttctacaacgtgacagagaggtgtcacaccttcactttctctcatgctaccttttgtgggcctgtccggccctacttcagtctgagttactcgggagggaaaagtgcagctcctctgatcatctgccccatgagtgggatagatgggttttctggccatgttgggaatcatggtcattccatggagacctccccttgaggaggtgaattcaggccaaaagggctgttggctgtaatcctacgccaggcacaaggcatcttgttgccttgccacgtcctgtcacagctgggtatccttaccatgttccacgcccttgcagtgggagacaggatgtccatgttctctaccatccttttccttcccatgcagattgtgaaatgtaatgagatgtatcaagatatcctagaaataaaaaccagatgtccacctcc

SEQ ID NO: 12971 - protein, 44 aa, Homo sapiens; identical to SEQ ID NO: 12963

SEQ ID NO: 12972 - DNA, 1240 bp, Homo sapiens
gagcctaacccagatggagagggagaagattgtttgggagtttgagcagctgtatcactccttaaaggagcatgagtatcgcctcctggcccgccttgaggagctagacttggccatctacaatagcatcaatggtgccatcacccagttctcttgcaacatctcccacctcagcagcctgatcgctcagctagaagagaagcagcagcagcccaccagggagctcctgcaggagggctgaaagaatcaggattcctgaaccttggatcacacctccagatttgcaagagaaaatccacatttttgcccaaaaatgtctattcttgacggagagtctaaagcagttcacagaaaaaatgcagtcagatatggagaaaatccaagaattaagagaggctcagttatactcagtggacgtgactctggacccagacacggcctaccccagcctgatcctctctgataatctgcggcaagtgcggtacagttacctccaacaggacctgcctgacaaccccgagaggttcaatctgtttccctgtgtcttgggctctccatgcttcatcgccgggagacattattgggaggtagaggtgggagataaagccaagtggaccataggtgtctgtgaagactcagtgtgcagaaaaggtggagtaacctcagccccccagaatggattctgggcagtgtctttgtggtatgggaaagaatattgggctcttacctccccaatgactgccctacccctgcggaccccgctccagcgggtggggattttcttggactatgatgctggtgaggtctccttctacaacgtgacagagaggtgtcacaccttcactttctctcatgctaccttttgtgggcctgtccggccctacttcagtctgagttactcgggagggaaaagtgcagctcctctgatcatctgccccatgagtgggatagatgggttttctggccatgttgggaatcatggtcattccatggagacctccccttgaggaggtgaattcaggccaaaagggctgttggctgtaatcctacgccaggcacaaggcatcttgttgccttgccacgtcctgtcacagctgggtatccttaccatgttccacgcccttgcagtgggagacaggatgtccatgttctctaccatccttttccttcccatgcagattgtgaaatgtaatgagatgtatcaagatatcctagaaataaaaaccagatgtccacctcc

SEQ ID NO: 12973 - protein, 216 aa, Homo sapiens; identical to SEQ ID NO: 12965

SEQ ID NO: 12974 - DNA, 2135 bp, Homo sapiens
ggggtttacgctgccgccggcatccgctcggacgcggccacgttgtcttgcgcgctttgcccgcctggccctgggactctgaccctcggctaccctttcctgccccactagcgtggccgcgagcctcggtgagccggccgtattcccgctctcgcttagggggcacaggcgcaggcatcggcccggccactccaagccttcggtgcgcgggcgcgtctgggatacgggcccgggaggcgccgccctccgtccgcccggtgcctctcaggaacagcgaaccggagagagcgccggagagttgggctcagtgcagagctcggcgccggggcccatgcccgtgcgcccccgcaggccggcgccatggcctccgggagtgtggccgagtgcctgcagcaggagaccacctgccccgtgtgcctgcagtacttcgcagagcccatgatgctcgactgcggccataacatctgttgcgcgtgcctcgcccgctgctggggcacggcagagactaacgtgtcgtgcccgcagtgccgggagaccttcccgcagaggcacatgcggcccaaccggcacctggccaacgtgacccaactggtaaagcagctgcgcaccgagcggccgtcggggcccggcggcgagatgggcgtgtgcgagaagcaccgcgagcccctgaagctgtactgcgaggaggaccagatgcccatctgcgtggtgtgcgaccgctcccgcgagcaccgcggccacagcgtgctgccgctcgaggaggcggtggagggcttcaaggagcaaatccagaaccagctcgaccatttaaaaagagtgaaagatttaaagaagagacgtcgggcccagggggaacaggcacgagctgaactcttgagcctaacccagatggagagggagaagattgtttgggagtttgagcagctgtatcactccttaaaggagcatgagtatcgcctcctggcccgccttgaggagctagacttggccatctacaatagcatcaatggtgccatcacccagttctcttgcaacatctcccacctcagcagcctgatcgctcagctagaagagaagcagcagcagcccaccagggagctcctgcaggacattggggacacattgagcagggctgaaagaatcaggattcctgaaccttggatcacacctccagatttgcaagagaaaatccacatttttgcccaaaaatgtctattcttgacggagagtctaaagcagttcacagaaaaaatgcagtcagatatggagaaaatccaagaattaagagaggctcagttatactcagtggacgtgactctggacccagacacggcctaccccagcctgatcctctctgataatctgcggcaagtgcggtacagttacctccaacaggacctgcctgacaaccccgagaggttcaatctgtttccctgtgtcttgggctctccatgcttcatcgccgggagacattattgggaggtagaggtgggagataaagccaagtggaccataggtgtctgtgaagactcagtgtgcagaaaaggtggagtaacctcagccccccagaatggattctgggcagtgtctttgtggtatgggaaagaatattgggctcttacctccccaatgactgccctacccctgcggaccccgctccagcgggtggggattttcttggactatgatgctggtgaggtctccttctacaacgtgacagagaggtgtcacaccttcactttctctcatgctaccttttgtgggcctgtccggccctacttcagtctgagttactcgggagggaaaagtgcagctcctctgatcatctgccccatgagtgggatagatgggttttctggccatgttgggaatcatggtcattccatggagacctccccttgaggaggtgaattcaggccaaaagggctgttggctgtaatcctacgccaggcacaaggcatcttgttgccttgccacgtcctgtcacagctgggtatccttaccatgttccacgcccttgcagtgggagacaggatgtccatgttctctaccatccttttccttcccatgcagattgtgaaatgtaatgagatgtatcaagatatcctagaaataaaaaccagatgtccacctcc

SEQ ID NO: 12975 - protein, 513 aa, Homo sapiens; identical to SEQ ID NO: 1308

SEQ ID NO: 12976 - DNA, 1855 bp, Homo sapiens
ggggtttacgctgccgccggcatccgctcggacgcggccacgttgtcttgcgcgctttgcccgcctggccctgggactctgaccctcggctaccctttcctgccccactagcgtggccgcgagcctcggtgagccggccgtattcccgctctcgcttagggggcacaggcgcaggcatcggcccggccactccaagccttcggtgcgcgggcgcgtctgggatacgggcccgggaggcgccgccctccgtccgcccggtgcctctcaggaacagcgaaccggagagagcgccggagagttgggctcagtgcagagctcggcgccggggcccatgcccgtgcgcccccgcaggccggcgccatggcctccgggagtgtggccgagtgcctgcagcaggagaccacctgccccgtgtgcctgcagtacttcgcagagcccatgatgctcgactgcggccataacatctgttgcgcgtgcctcgcccgctgctggggcacggcagagactaacgtgtcgtgcccgcagtgccgggagaccttcccgcagaggcacatgcggcccaaccggcacctggccaacgtgacccaactggtaaagcagctgcgcaccgagcggccgtcggggcccggcggcgagatgggcgtgtgcgagaagcaccgcgagcccctgaagctgtactgcgaggaggaccagatgcccatctgcgtggtgtgcgaccgctcccgcgagcaccgcggccacagcgtgctgccgctcgaggaggcggtggagggcttcaaggagcaaatccagaaccagctcgaccatttaaaaagagtgaaagatttaaagaagagacgtcgggcccagggggaacaggcacgagctgaactcttgagcctaacccagatggagagggagaagattgtttgggagtttgagcagctgtatcactccttaaaggagcatgagtatcgcctcctggcccgccttgaggagctagacttggccatctacaatagcatcaatggtgccatcacccagttctcttgcaacatctcccacctcagcagcctgatcgctcagctagaagagaagcagcagcagcccaccagggagctcctgcaggacattggggacacattgagcagggctgaaagaatcaggattcctgaaccttggatcacacctccagatttgcaagagaaaatccacatttttgcccaaaaatgtctattcttgacggagagtctaaagcagttcacagaaaaaatgcagtcagatatggagaaaatccaagaattaagagaggctcagttatactcagtggacgtgactctggacccagacacggcctaccccagcctgatcctctctgataatctgcggcaagtgcggtacagttacctccaacaggacctgcctgacaaccccgagaggtctccttctacaacgtgacagagaggtgtcacaccttcactttctctcatgctaccttttgtgggcctgtccggccctacttcagtctgagttactcgggagggaaaagtgcagctcctctgatcatctgccccatgagtgggatagatgggttttctggccatgttgggaatcatggtcattccatggagacctccccttgaggaggtgaattcaggccaaaagggctgttggctgtaatcctacgccaggcacaaggcatcttgttgccttgccacgtcctgtcacagctgggtatccttaccatgttccacgcccttgcagtgggagacaggatgtccatgttctctaccatccttttccttcccatgcagattgtgaaatgtaatgagatgtatcaagatatcctagaaataaaaaccagatgtccacctcc

SEQ ID NO: 12977 - protein, 358 aa, Homo sapiens; identical to SEQ ID NO: 1310

SEQ ID NO: 12978 - DNA, 465 bp, Homo sapiens
tcagctcccagatggatcctggacaggatgctgcaggtggtgcaggaggggaatcctgccccatttatcatcaacacagtaaaaaggggtcgaagagaccgagagcgccagaggacgccatgggctccacatccacttggattccagggaaggcggtacatctacgaaagccctaatcatagagggaaagactcctcgttcctggcccagaaatgagatgagaaatccagggccccgtacaggaaggcctttcgcaaagtccagactcaattgccttcgcagcccttaaagtttccttaggaaggtctgtgggagaacgaggttggtttaggaattggcccctgccttgtactacgtagttttgtcatccaaagtgttttagaagtgaattgaatcatagttacgccttattttgaaacactgtaattcagagaacgtaaaaccttattaaaatgcctcataatc

SEQ ID NO: 12979 - protein, 62 aa, Homo sapiens
MLQVVQEGNPAPFIINTVKRGRRDRERQRTPWAPHPLGFQGRRYIYESPNHRGKDSSFLAQK

SEQ ID NO: 12980 - DNA, 1458 bp, Homo sapiens
cttcaggattctcagtcttccctccgggagacttttggccagtcttgtctcgctccaacctcctacccccaccccattcctcagtgcattcgtgaatttctccaagcaggcctttccagatcgacactaagttccaatcccgagctgtgtgacccagcaccaattcagtcacgatgatgacttgcaattgcttaatcagttggcctttcctcctagctgtgaagtttaccgtgcaggattgcaaacaccagagagaaaatcagtctctggaatgatgcctttgatggaccaagatgcagctgatgaagcattgaaccaattagcacctagcaggagggcacccttgctctgtgtccttgaaggttaaagctgtcaaaaagtggtctccctcaagttcggccatcttgctctcagagatctagaactggtaggagaatatagccttgatagtggagaggaaactattgctgttgtgagggactgagagaaccaggcagagagcccagattgacacagcaggtgacaaaagaggcgcgcctaccttggggaatacggaggaacagaggaaagtgagaccaggagaaagagcaggggggcgggtgtgcaggccgggcgccgtggctcacgcctgtaatcccagcactttgggaggccaaggcaggcggatcacaaggtcaggagttcgagaccagcctggccaatatggtgaaaccctgtctctactaaaaatacaaaaattagctgggcgtggtggcgaatgcctgtagtcccagctactcggaaggctgaggcaggagaatcgcttgaacccggaacccgggaggcagaggttgcagtgagccgagatggcgccattgcactctagcctgggcgacggactgagacttcgtctcaaaaaagggagtgactgtgttgcttttgctttcttggaaatcttttttcttagtaattttcctaaagtaatttccttaggaaataatgtattgctaagagtattgcaacttttagtattgacgaggtacttttactgaatcagtataagtcaacaagcaaccaccagaagctggaaaaggccaggataggattttactctaaagtttctagagggagctggacgcagcccacaccttgattttggcccacatactgattgtggatttctggccttcagaaatacatatctgttgtaagagaatacatatctgttgtttttagacagtttctgataatttgttacagtaaccacaggaaattaacaccaggcactatgcagtaaattccgtatgaacaactcaaatataagaatttgtaagacagccgggcgcggtggctcacgcctgtaatcccagcactttgggaggcgcggtggctcacgcctgtaatcccagcactttgggaggcgcggtggctcacgcctgtaatcccagcactttgggaggccgaggcgggcggatcacc

SEQ ID NO: 12981 - protein, 33 aa, Homo sapiens
MMTCNCLISWPFLLAVKFTVQDCKHQRENQSLE

SEQ ID NO: 12982 - DNA, 317 bp, Homo sapiens
tctgtgtccttgaaggttaaagctgtcaaaaagtggtctccctcaagttcggccatcttgctctcagagatctagaactggactcagtcaaaattttgggccaaggagaccgacgcgctgtcgcctgcactaagagaaacgcaacgaacaactttgtcaatgcattgcattatactatagcagcaactatacttttaaatgattcgaatcttgaggtttcaaactgaaccgtcttgtgccttttgcccggcgggcatttctgcggggaccgcgggtcaccttctgaatttttaccttcataaacagcaaggactgcg

SEQ ID NO: 12983 - protein, 38 aa, Homo sapiens
MIRILRFQTEPSCAFCPAGISAGTAGHLLNFYLHKQQG

SEQ ID NO: 12984 - DNA, 2190 bp, Homo sapiens
atgcaggagatttcattaatactgtgctatattgactcttggcttacttatcttccctcagctctattacctgctccatatcctgccttcactaaagatggaagccaaggaaacctgccgcaagcagatatcacactaatgagccaggcccaagagtcagtgacatttgaggatgtagctgtgaacttcactaacagggagtggcagtgtctgacctacgctcaaaggcatctctataaggatgtgatgttggaaaattatgggaacatggtatcacttggatttccatttcctaaacctcctttaatctctcatctggagcgagaagtagacccctgtgtgcaggatccacaggacagggagtccctaagctgctcctacccagtgtcagctgacaagatgtggcctgagaatgaaaaggcaagttcacaacaagagatttttgaaaatggagaagcctactggatgaaatttaacagtctcctaaaagttgattcccgggatcctaaggttagagaagtttgtgttcaggatgtcaaattagagaatcaatgggaaacatctataagggagaaactgagagaagagaaagaaggctctgaggaagtgacctgcaaaaaaggaaagaaccagaaagtgcttagtaaaaacttgaatccaaactcaaaacatagtcaatgtaataaagttcttatagcacagaaactccatgaatgtgccaggtgtggcaaaaacttcagttggcactcagatctaattctccatgagcaaattcattctggtgagaaaccccatgtgtgtaatgagtgtgggaaagcattcaagaccagaaatcagctttctatgcaccggataatccacacaggggagaaaccttttaattgcacccagtgtgggaaggctttcaacagtagatcagctctttgccgacataaaaaaacccacagtggggagaagcctcacgagtgcagggactgtgggaaggccttcaagaccaggaaccgtctctgtatgcatcagcttatccacaccggggagaagccttacaaatgtaactgctgtgggaaggccttccagtttaagcattcccttaccatccatggcagaatccacactggggagaagccatatgaatgtgaggagtgcgggaaggccttcagtgggagttcagacctcaccaaacacataagaatccacactggggaacgaccttatgagtgcagcaagtgtggaagggccttcagtcggagctcagacctaagcaaacacaaacgaatccatactcgggagaaacactatgggtgtccccagtgtggaaaagacttcagcatcaaggcagaactcaccaaacacagaaggatccacactgaagagaaacgttacaggtgtgaggagtgtgggaaagcctttcgtcataactgtaagcgcagggctcatgaacgagagcatacaggggagaagccctatcaatgcagggattgtgggaaaaccttccaagataagcactgccttaccatccatcagagaatccacactggagagaaaccttacaaatgtttagagtgtgggaaagctttcagtgggaagtcaaacttgaccaatcatcgaagaattcacactggagagaagcctcacaaatgtgaggtatgtggaatggccttccatcatagttcagtcctgaggcagcacaaaagaatccacactggtgagaagccatacacctgcagtgagtgtggcacgtccttccgtcagggctcagctctgattggacataagcgagttcatactggggagaaaccttatgaatgtgaggaatgtggaaaagcttttagagtgagctcaaatcttactggacataagaaaagaaaacatcaagtatggagtacccatgaacttgatgggagtaggaaatccctctctccagtgactgtttctcagacctcagtagtcagtattttgaccagtgcctgagtataacgattctggtgttactttctgtttttcctacctcttaggctggtccttctgtctcttatattagttattcctgatttcctgacccttaattgtgagattccccaaagacattgtcctttaccttcttattcactattttttcagtgagcacatttacttccaagagtttatcaatcacttcctaatattaataaacacttattagtgcttgct

SEQ ID NO: 12985 - protein, 656 aa, Homo sapiens
MQEISLILCYIDSWLTYLPSALLPAPYPAFTKDGSQGNLPQADITLMSQAQESVTFEDVAVNFTNREWQCLTYAQRHLYKDVMLENYGNMVSLGFPFPKPPLISHLEREVDPCVQDPQDRESLSCSYPVSADKMWPENEKASSQQEIFENGEAYWMKFNSLLKVDSRDPKVREVCVQDVKLENQWETSIREKLREEKEGSEEVTCKKGKNQKVLSKNLNPNSKHSQCNKVLIAQKLHECARCGKNFSWHSDLILHEQIHSGEKPHVCNECGKAFKTRNQLSMHRIIHTGEKPFNCTQCGKAFNSRSALCRHKKTHSGEKPHECRDCGKAFKTRNRLCMHQLIHTGEKPYKCNCCGKAFQFKHSLTIHGRIHTGEKPYECEECGKAFSGSSDLTKHIRIHTGERPYECSKCGRAFSRSSDLSKHKRIHTREKHYGCPQCGKDFSIKAELTKHRRIHTEEKRYRCEECGKAFRHNCKRRAHEREHTGEKPYQCRDCGKTFQDKHCLTIHQRIHTGEKPYKCLECGKAFSGKSNLTNHRRIHTGEKPHKCEVCGMAFHHSSVLRQHKRIHTGEKPYTCSECGTSFRQGSALIGHKRVHTGEKPYECEECGKAFRVSSNLTGHKKRKHQVWSTHELDGSRKSLSPVTVSQTSVVSILTSA

SEQ ID NO: 12986 - DNA, 627 bp, Homo sapiens
ggagaagcctactggatgaaatttaacagtctcctaaaagttgattcccgggatcctaaggttagagaagtttgtgttcaggatgtcaaattagagaatcaatgggaaacatctataagggagaaactgagagaagagaaagaaggctctgaggaagtgacctgcagtgagtgtggcacgtccttccgtcagggctcagctctgattggacataagcgagttcatactggggagaaaccttatgaatgtgaggaatgtggaaaagcttttagagtgagctcaaatcttactggacataagaaaagaaaacatcaagtatggagtacccatgaacttgatgggagtaggaaatccctctctccagtgactgtttctcagacctcagtagtcagtattttgaccagtgcctgagtataacgattctggtgttactttctgtttttcctacctcttaggctggtccttctgtctcttatattagttattcctgatttcctgacccttaattgtgagattccccaaagacattgtcctttaccttcttattcactattttttcagtgagcacatttacttccaagagtttatcaatcacttcctaatattaataaacacttattagtgctt

SEQ ID NO: 12987 - protein, 131 aa, Homo sapiens
MKFNSLLKVDSRDPKVREVCVQDVKLENQWETSIREKLREEKEGSEEVTCSECGTSFRQGSALIGHKRVHTGEKPYECEECGKAFRVSSNLTGHKKRKHQVWSTHELDGSRKSLSPVTVSQTSVVSILTSA

SEQ ID NO: 12988 - DNA, 3027 bp, Homo sapiens
gagaccggagtcttgctcttgtcgcctcctgacccattctttttattcttctctacagcatccattcatatattcattcagtcagctaatttttaatccagcacatactattgcaagcgctgttttaggcgttgagaatacaactgtgaacaagacgacaaaaattcctgccctcatggagcctaagagcctagattttagcgaaggtagaaccaccgtaaacaatgtatatattaataagtaacttatgcaccatactggaaaattataaagtgctatagaggaaaagaagaattcatgtaaagcaaggaggctggcatcaactggagccacttcacagcttgtttgagaactggatctgaccagtaggaagaaaccaggacagcagtggaagactgttaaagaaacctgagtaaaaagatgcaggaggtaagaagaggagggtctgtgatacatcacaaggaggaagaaggagaagttgtgctgttggatgagagttcaggaccaccaagccagctgctttggacccgccaggatacccagctccctcaggaaagcgctctattacctgctccatatcctgccttcactaaagatggaagccaaggaaacctgccgcaagcagatatcacactaatgagccaggcccaagtgagctgaggcccctttcctcctccttgaaaatacatcactacctccaaaatatggccttgttttcactgcgttctctggctgtgcaactcctaaatcaatgttctccctctcataaggaacattttgttgcatgataaaccacttgtgggttgttttctctttcattattttttgctatcaaaaccccatgctccctttcatctcatttgtacatacccaccaaaagggaagagcctttcacttctataaacctcctccttgcaaattcctttcttctgcctctgtttcctgaggaaactatggcgttttctccaggatagcaggagcatattatttcaggagtcagtgacatttgaggatgtagctgtgaacttcactaacagggagtggcagtgtctgacctacgctcaaaggcatctctataaggatgtgatgttggaaaattatgggaacatggtatcacttggatttccatttcctaaacctcctttaatctctcatctggagcgagaagtagacccctgtgtgcaggatccacaggacagggagtccctaagctgctcctacccagtgtcagctgacaagatgtggcctgagaatgaaaaggcaagttcacaacaagagatttttgaaaatggagaagcctactggatgaaatttaacagtctcctaaaagttgattcccgggatcctaaggttagagaagtttgtgttcaggatgtcaaattagagaatcaatgggaaacatctataagggagaaactgagagaagagaaagaaggctctgaggaagtgacctgcaaaaaaggaaagaaccagaaagtgcttagtaaaaacttgaatccaaactcaaaacatagtcaatgtaataaagttcttatagcacagaaactccatgaatgtgccaggtgtggcaaaaacttcagttggcactcagatctaattctccatgagcaaattcattctggtgagaaaccccatgtgtgtaatgagtgtgggaaagcattcaagaccagaaatcagctttctatgcaccggataatccacacaggggagaaaccttttaattgcacccagtgtgggaaggctttcaacagtagatcagctctttgccgacataaaaaaacccacagtggggagaagcctcacgagtgcagggactgtgggaaggccttcaagaccaggaaccgtctctgtatgcatcagcttatccacaccggggagaagccttacaaatgtaactgctgtgggaaggccttccagtttaagcattcccttaccatccatggcagaatccacactggggagaagccatatgaatgtgaggagtgcgggaaggccttcagtgggagttcagacctcaccaaacacataagaatccacactggggaacgaccttatgagtgcagcaagtgtggaagggccttcagtcggagctcagacctaagcaaacacaaacgaatccatactcgggagaaacactatgggtgtccccagtgtggaaaagacttcagcatcaaggcagaactcaccaaacacagaaggatccacactgaagagaaacgttacaggtgtgaggagtgtgggaaagcctttcgtcataactgtaagcgcagggctcatgaacgagagcatacaggggagaagccctatcaatgcagggattgtgggaaaaccttccaagataagcactgccttaccatccatcagagaatccacactggagagaaaccttacaaatgtttagagtgtgggaaagctttcagtgggaagtcaaacttgaccaatcatcgaagaattcacactggagagaagcctcacaaatgtgaggtatgtggaatggccttccatcatagttcagtcctgaggcagcacaaaagaatccacactggtgagaagccatacacctgcagtgagtgtggcacgtccttccgtcagggctcagctctgattggacataagcgagttcatactggggagaaaccttatgaatgtgaggaatgtggaaaagcttttagagtgagctcaaatcttactggacataagaaaagaaaacatcaagtatggagtacccatgaacttgatgggagtaggaaatccctctctccagtgactgtttctcagacctcagtagtcagtattttgaccagtgcctgagtataacgattctggtgttactttctgtttttcctacctcttaggctggtccttctgtctcttatattagttattcctgatttcctgacccttaattgtgagattccccaaagacattgtcctttaccttcttattcactattttttcagtgagcacatttacttccaagagtttatcaatcacttcctaatattaataaacacttattagtgctt

SEQ ID NO: 12989 - protein, 574 aa, Homo sapiens
MLENYGNMVSLGFPFPKPPLISHLEREVDPCVQDPQDRESLSCSYPVSADKMWPENEKASSQQEIFENGEAYWMKFNSLLKVDSRDPKVREVCVQDVKLENQWETSIREKLREEKEGSEEVTCKKGKNQKVLSKNLNPNSKHSQCNKVLIAQKLHECARCGKNFSWHSDLILHEQIHSGEKPHVCNECGKAFKTRNQLSMHRIIHTGEKPFNCTQCGKAFNSRSALCRHKKTHSGEKPHECRDCGKAFKTRNRLCMHQLIHTGEKPYKCNCCGKAFQFKHSLTIHGRIHTGEKPYECEECGKAFSGSSDLTKHIRIHTGERPYECSKCGRAFSRSSDLSKHKRIHTREKHYGCPQCGKDFSIKAELTKHRRIHTEEKRYRCEECGKAFRHNCKRRAHEREHTGEKPYQCRDCGKTFQDKHCLTIHQRIHTGEKPYKCLECGKAFSGKSNLTNHRRIHTGEKPHKCEVCGMAFHHSSVLRQHKRIHTGEKPYTCSECGTSFRQGSALIGHKRVHTGEKPYECEECGKAFRVSSNLTGHKKRKHQVWSTHELDGSRKSLSPVTVSQTSVVSILTSA

SEQ ID NO: 12990 - DNA, 697 bp, Homo sapiens
agcatccattcatatattcattcagtcagctaatttttaatccagcacatactattgcaagcgctgttttaggcgttgagaatacaactgtgaacaagacgacaaaaattcctgccctcatggagcctaagagcctagattttagcgaaggtagaaccaccgtaaacaatgtatatattaataagtaacttatgcaccatactggaaaattataaagtgctatagaggaaaagaagaattcatgtaaagcaagggaaacaagatgtgagatcacagcggtttagtgttgctaatgaaccccaaatccagggcagtgtttgacacattaagccaaacagtagcggcactgtgggtcaagaagggccctttggctggcaccaccaaaacatgtgttctccaaaggaggctggcatcaactggagccacttcacagcttgtttgagaactggatctgaccagtaggaagaaaccaggacagcagtggaagactgttaaagaaacctgagtaaaaagatgcaggaggttgtgctgttggatgagagttcaggaccaccaagccagctgctttggacccgccaggatacccagctccctcaggaaagcgctctattacctgctccatatcctgccttcactaaagatggaagccaaggaaacctgccgcaagcagatatcacactaatgagccaggcccaag

SEQ ID NO: 12991 - protein, 60 aa, Homo sapiens
MQEVVLLDESSGPPSQLLWTRQDTQLPQESALLPAPYPAFTKDGSQGNLPQADITLMSQA

SEQ ID NO: 12992 - DNA, 963 bp, Homo sapiens
atggaccaaagcaattatagttctttacatggttttattctgcttggcttctctaaccatccaaaaatggagatgatcctgtcaggagttgtcgccatcttctacttaattacattggtgggtaacacagccatcattcttgcatctctcctggattcccagcttcatacaccaatgtactttttcctcagaaatttatctttcctagatctatgtttcacaaccagcatcatccctcagatgctggtcaacttgtggggacctgataagaccatcagctatgtgggttgtatcatccaactctatgtttacatgtggttgggctcagttgagtgccttctcctggctgttatgtcctatgatcgttttacagctatatgtaagcccttgcattattttgtagtcatgaacccacatctatgtctaaagatgattatcatgatctggagtattagtttggccaattctgtagtattatgtacactcactctgaatttgcccacatgtggaaacaacattctggatcatttcttgtgtgagttgccagctctggtcaagatagcttgtgtagacaccacaacagttgaaatgtctgttttcgctttaggcattataattgtcctcacacctctcatccttattcttatatcctatggctacattgccaaagctgtgctgagaacgaagtcaaaagcaagccagcgaaaagcaatgaatacctgtggatctcatcttactgtagtgtctatgttctatggaactattatctacatgtacctgcaaccaggtaacagggcttccaaagaccagggcaagttcctcaccctcttttacaccgtcatcactccaagtctcaacccgctcatttacaccttaagaaataaggacatgaaggatgccctgaagaaactgatgagatttcaccacaaatctacaaaaataaagaggaattgcaagtcatag

SEQ ID NO: 12993 - protein, 320 aa, Homo sapiens; identical to SEQ ID NO: 1314

SEQ ID NO: 12994 - DNA, 1272 bp, Homo sapiens
aataatttgactttttaaagtaaaaaatcatttttcataaatattgtgttcctgattatggactatcttagtcttcattaatccaaatgttaattcagggatgtatataaagaactcagtaacttgagaagctattgcttgtatctgtagctggataaatatctcaatgaagcatataaagggaactgtataaaaattctactaccattatggtgcacactctctggaagtgggatacttttgtcttcaatctgtttgcaagtgagcggttgacaatgcatggacagactttgagtttatgtggttctttctttaggtataagaaaaagatgaatgatgattaaaaaaaatgcaagttcggaagacttctttattctacttggattttctaattggcctcagctggaagtagttctctttgtggttatcttgatcttctacctgatgacactgacaggaaacctgttcatcatcatcctgtcatacgtggactcccatctccacacaccaatgtacttcttcctttcaaacctctcatttctggatctctgctacaccaccagctctatccctcagttgctggtgaatctccggggcccggaaaagaccatctcgtatgctggttgcatggttcaactttactttgttcttgcactgggaatcacagagtgtgtcctactggtggtgatgtcatatgatcgttatgtagctgtgtgtagacctttgcattacactgtcctcatgcaccctcgtttctgccacttgttggttgcggcttcttgggtaattggttttactatctcagcacttcattcctcctttactttctgggtacccctttgtggacatcgcctagtggatcacttcttctgtgaagttccagcacttctgcgtttatcatgtgttgacacccatgcaaatgagctgaccctcatggtcatgagctccatttttgttctcatacctctcattctcattctcactacctatggtgccattgcccgggctgtactgagcatgcaatcaaccactgggcttcagaaagtgtttaggacatgtggagcccatcttatggttgtatctctctttttcattccagtcatgtgcatgtatctccagccaccatcagaaaattctcctgatcagggcaagttcattgccctcttttatactgttgtcacaccgagtcttaatcctctaatctacactctcagaaacaagcatgtaaaaggggcagcgaagagactattggggtgggagtgggggaagtga

SEQ ID NO: 12995 - protein, 312 aa, Homo sapiens
MMIKKNASSEDFFILLGFSNWPQLEVVLFVVILIFYLMTLTGNLFIIILSYVDSHLHTPMYFFLSNLSFLDLCYTTSSIPQLLVNLRGPEKTISYAGCMVQLYFVLALGITECVLLVVMSYDRYVAVCRPLHYTVLMHPRFCHLLVAASWVIGFTISALHSSFTFWVPLCGHRLVDHFFCEVPALLRLSCVDTHANELTLMVMSSIFVLIPLILILTTYGAIARAVLSMQSTTGLQKVFRTCGAHLMVVSLFFIPVMCMYLQPPSENSPDQGKFIALFYTVVTPSLNPLIYTLRNKHVKGAAKRLLGWEWGK

SEQ ID NO: 12996 - DNA, 386 bp, Homo sapiens
gtgctatggaggacctgcttactgctatgaggtgttactttatagaggtcctggagaagctgattgaggccacgtcaatgttgcaaggagacatgagactcacatcagagttctatggcttaacatgggggatggtgtgaaaagaaacagagatcgttggagaaatgtctgattataagatatttctaagcctggtgaagaaatatataagagaagcctggagaagaaccagtaataccagaaatcagggaggggccctgaagagaaaaggataacaaaaggatgaagacctgtccaagggacccagcagctaacttgaaagagctctcaatgggtaaagctggagcaatttcaacaacaaaataaataacatatcactggattat

SEQ ID NO: 12997 - protein, 44 aa, Homo sapiens
MEDLLTAMRCYFIEVLEKLIEATSMLQGDMRLTSEFYGLTWGMV

SEQ ID NO: 12998 - DNA, 464 bp, Homo sapiens
aagctgagtgaggccatgtctgttaccaggagacatgagactcacagcagatctctctggcttaacatgggagatggcggcattgaccaacatctgtgggactatatttgtggtgtaacaaagatccaagatagccagatttctaagaaagaaatatatgggggtttggagatgtttatccagtaatggcagcaggataaggaccatatttcccatcaaagaaattgcatagaagaaaaagacaaccccagagatgatcatctccagctgaggcttcccagggaacccaaggagcataagccaaccaaaatgttggaattcctggaaaatgtggcgttcttaatagtcataaaagtactaaatatatactgcaaaatgctaggtgtgtctctgagatttaggacaacttctgaaagtactgtcattaacggagaagctggaataaaaagaaaagtcactccaga

SEQ ID NO: 12999 - protein, 56 aa, Homo sapiens
MSVTRRHETHSRSLWLNMGDGGIDQHLWDYICGVTKIQDSQISKKEIYGGLEMFIQ

SEQ ID NO: 13000 - DNA, 365 bp, Homo sapiens
aggagacatgagactcacagcagatctctctggcttaacatgggagatggcgactttataaagtgctccagttcttatggtgttttctgaccaggatctgtaccaagcagatgaacgtgccaagatgtcttcgttctccctggctgcacatcctcctgtagtcttcatgccggccttcgtttgacctgtttttgggaagttctgccttttccttctattttaatctacactctgttgccaccattacatatccatgcatgtagagttgatggtagtatactaaaactttttagaagagaagatatgaaaacccaaatggagtgaatagctaaccagaagacatatattaaataagcaaaattccc

SEQ ID NO: 13001 - protein, 35 aa, Homo sapiens [sequence omitted]

SEQ ID NO: 13002 - DNA, 1048 bp, Homo sapiens
gtcatgctattgcagcatatgattcatttttataatctggtcttctctttgcccaattcctgaaaggaaaccaggcgacatcatggaaagaaagaatcaaacagctataactgaattcatcatcttgggattctccaacctaaatgaattgcagtttttactattcaccatcttctttctgacttatttctgtactttgggaggaaatatattaattatcttgacgactgtgactgatccacacctgcatacacctatgtattattttctagggaacttggcctttattgacatctgctacaccaccagcaatgtcccccagatgatggtgcacctcctctcaaagaaaaaaagcatttcttatgtggggtgtgtggttcaactttttgcatttgttttctttgtaggatcagagtgtctcctactggcagcaatggcatatgatcgttacattgcaatctgcaatcctttaaggtattcagttattctgagcaaggttctatgcaatcaattagcagcctcatgctgggctgctggtttccttaactcagtggtgcatacagtgttgacattctgcctgcccttctgtggcaacaatcagattaattacttcttctgtgacatcccccctttgctgatcttgtcttgtggaaacacttctgtcaatgagttggcactgctatccactggggtcttcattggttggactcctttcctttgtatcgtactttcctacatttgcataatctccaccatcttgaggatccagtcctcagagggaagacgaaaagccttctctacatgtgcctcccacctggccattgtctttctcttttatggcagcgccatctttacatatgtacggcccatctcaacttactcattaaagaaagataggttggtttcagtgttgtacagtgttgttacccccatgctaaaccctataatttacacattgaggaataaggacatcaaagaagctgtcaaaactatagggagcaagtggcagccaccaatttcctctttggatagtaaactcacttattga

SEQ ID NO: 13003 - protein, 321 aa, Homo sapiens; identical to SEQ ID NO: 1324

SEQ ID NO: 13004 - DNA, 385 bp, Homo sapiens
gagctgaaggtaggaaattccaacattctgaagtcttcagcaaatcttagcagatcatctcctcctcacagtcctgtctttagagaacagggtcgatatttcggcttctgcgaactcagatgtcatcttttcttccctaaagtttttaaagttcctattgatatattcccctgcctagagggtttggtggtcgttttcttcctcttaactttattaaggtcatgctattgcagcatatgattcatttttataatctggtcttctctttgcccaattcctgaaaggaaaccaggcgacatcatggaaagaaagaatcaaacagctataactgaattcatcatcttgggattctccaacctaaatgaattgcagtttttactattca

SEQ ID NO: 13005 - protein, 79 aa, Homo sapiens
ELKVGNSNILKSSANLSRSSPPHSPVFREQGRYFGFCELRCHLFFPKVFKVPIDIFPCLEGLVVVFFLLTLLRSCYCSI

SEQ ID NO: 13006 - DNA, 1869 bp, Homo sapiens
agcaatggagaatgtcactacaatgaatgagtttcttctacttggcctgactggtgttcaggagctgcagcctttcttctttgggattttcttaatcatttacctgataaacttgattggaaatggatctatattggtgatggttgttttggaaccacaactccactcccctatgtatttttttctgggaaacctttcttgtctggatatttcttattcttcagtgacactgcccaagctgctcgtaaacctcgtgtgcagtcgcagggctatatcttttctaggctgtatcacccagctacacttcttccactttttgggaagcacagaggccattttactggctatcatggcctttgaccgttttgttgccatctgcaatcctcttcgctacactgtcatcatgaacccccaggtgtgtattctgttggcagctgcggcctggctcatcagcttcttttacgctctgatgcattctgtcatgactgcacacctgagtttttgtggctctcagaaactcaatcacttcttctacgatgtcaagccgctcttagaattggcctgtagtgacacattactcaatcaatggcttctttccattgtcacaggcagcatatccatgggagctttctttctgactcttctctcctgcttctatgtaattggcttccttctgtttaagaacaggtcctgcagaatactccacaaggctctgtccacttgtgcctcccattttatggtggtatgtcttttctatggacctgtgggcttcacatatattcgtcctgcttcagccacctccatgattcaggaccggataatggccatcatgtatagcgccgtcacccctgtactgaatccactaatctacacccttaggaacaaagaagtgatgatggctctgaagaaaatctttggtaggaagttgtttaaagactggcagcaacaccactaggactaatgagggatatctgatttctattaagactgatttccatcacttcactgtaagaaatgatttgtttacctggtttatatttttctttcaaaaattttgagcacatattatattaggcagtgtagtaggttcaagaaacacaggagcaagcaaaacaaattccataatgtcatcaaacataaagtttaatgtgatggaggccccaaataaccaaacgcgtaagtacatatgtcaggataattcggtggcaaggagaactaaggaggtaggaagtatggggagggttagagtaggaatctgctgtgtaaaaaagaatgtggcatttctcctaggacaaaaacctttggaattttccaagtaatagaagtatcttactgaaattccatatgagataatctttatttttgcctattttttttccttttgtgtttccttcagcaggaaagtactgatgataatttttctcacaacagtttttatctagaatatcatttttgttaatcttaattcttgaagagaatttttaatgggtatttaattttagggagagatttttctagccattgaaaatatcttgtttttccccagcttattgaagtataattaacaaataaaaattgcatatatttaggcttcacaacatgatgctttagtatatgtatacattgtgaagagactaccacaatcaagctaaacctacattactgtccctgcattagtttactgttgaatactagaagttcttcattctatctaactgcattttcatacccattaagccaatgtgacaagctctttgtttcagttggagtgtttgcacaatttaaatttgataaatttttgatagaattaaatttaaatttatcctccaactaaatttttgatagaattaaatttaaatttgtcctcca

SEQ ID NO: 13007 - protein, 316 aa, Homo sapiens; identical to SEQ ID NO: 1326

SEQ ID NO: 13008 - DNA, 924 bp, Homo sapiens; identical to SEQ ID NO: 1327

SEQ ID NO: 13009 - protein, 307 aa, Homo sapiens; identical to SEQ ID NO: 1328

SEQ ID NO: 13010 - DNA, 2229 bp, Homo sapiens
ctctaataacgttaggcttggtatagaagatgcagagacatgctaaaatttctcccccaattattgccaagcagaaacttggacgatcgacatggaaattgtctccacaggaaacgaaactattactgaatttgtcctccttggcttctatgacatccctgaactgcatttcttgttttttattgtattcactgctgtctatgtcttcatcatcatagggaatatgctgattattgtagcagtggttagctcccagaggctccacaaacccatgtatattttcttggcgaatctgtccttcctggatattctctacacctccgcagtgatgccaaaaatgctggagggcttcctgcaagaagcaactatctctgtggctggttgcttgctccagttctttatcttcggctctctagccacagctgaatgcttactgctggctgtcatggcatatgaccgctacctggcaatttgctacccactccactacccactcctgatggggcccagacggtacatggggctggtggtcacaacctggctctctggatttgtggtagatggactggttgtggccctggtggcccagctgaggttctgtggccccaaccacattgaccagttttactgtgactttatgcttttcgtgggcctggcttgctcggatcccagagtggctcaggtgacaactctcattctgtctgtgttctgcctcactattccttttggactgattctgacatcttatgccagaattgtggtggcagtgctgagagttcctgctggggcaagcaggagaagggctttctccacatgctcctcccacctagctgtagtgaccacattctatggaacgctcatgatcttttatgttgcaccctctgctgtccattcccagctcctctccaaggtcttctccctgctctacactgtggtcacccctctcttcaatcctgtgatctataccatgaggaacaaggaggtgcatcaggcacttcggaagattctctgtatcaaacaaactgaaacacttgattgaaggagagtaatgaagatgttattttggacttcggacacctccactggggactcttccaggatgggttggagaggagtaactttgtcttattcgaccattctctttgaactcttctgcagttatactaaaaatgaaaatgatagggcaacaattttttaacttttattttaagttcaagggtacatgtgcaggtttgttacataggtaaacttgtgtcatgggggtttactgtacagattatttcatcacccaggtattaagcctagtactcattaatcatttttcctgatcttctccctcctcccaacctccaccctcaagtaggattcagtgtgttgttcccctctatgtatccatatgttttcataatttagctcccacttatgagtgaagacatacggtatttgattttctgttcctgtgttagtttgcgaaggatagtagcctccaattccatccatgtcaaataatcaaaattatttaaactttgattagttctttattaaatatgtcataaatatttaaaaataatacagcaataccaaaataaacctagaaatattgttttttatattattgttgtatgacatttaaaaatttctttctatgtgtatttatatttatacatacaagttggatcatggagtttgtaatctggttttccactgaacactgtgtcacgaacaactttttctattaacaagcatctatttctttattcttctgggcttcatcgtatggctaaacatgatttgttattctattttgggaatttttagttgtattctattcttttactgtacattgtttacatctggattttcctgtaataaacttttagcacctaaattgcaagatctaaggatatgtgtttttaaaaatctaaagctgaattccttttcttttaaacttcttttcttgtagaacatttcaaacatacataaaagagaagagcacagtgaacccccatgtactccatgtagccaccatccagcttcaacatcaacattttgctaatcttattttaattagctacagctccttgtttgttagttttcatggaaaattttagggcaaattccagatgttgtataactattatgttgtgtaagttatgtatgtacatattccacatatgtatttagtataatctgtgactaataaagacattttaaaaaaccatgcccaca

SEQ ID NO: 13011 - protein, 315 aa, Homo sapiens; identical to SEQ ID NO: 1330

SEQ ID NO: 13012 - DNA, 344 bp, Homo sapiens
caactcttaattggccctcaaaacttagcctacttgcttctatcttcagaaagccttccccgaccttgatcccacaccttctgccccacaaccccaggctgggtttggtccttctctgctcccatggcacctacttccttccctattaccatttaccacattttcactaccaactcctgaatgacttgatgaaactactatttaaggaaggcaataagtgaagaatatataagaattatccgaggaacagttgctctaataacgttaggcttggtatagaagatgcagagacatgctaaaatttctcccccaattattgccaagcagaaacttggacgatcgac

SEQ ID NO: 13013 - protein, 51 aa, Homo sapiens
PTCFYLQKAFPDLDPTPSAPQPQAGFGPSLLPWHLLPSLLPFTTFSLPTPE

SEQ ID NO: 13014 - DNA, 473 bp, Homo sapiens
catcctagcagtgaatggaaacacacatatggggagaaactaaggctccctactaaaaacgtgcaacatgtgactgggacatcttgttgagctcaagcagggagggagctgaaggtaggaaattccaacattctgaagtcttcagcaaatcttagcagatcatctcctcctcacagtcctgtctttagagaacagggtcgatatttcgggaatcctatagaaagactccaagcctcagaatgagtttggaccagataaaataatctagagttaaagatggcccacatagggagtgccagattcactcacaaggaaatgcagatgggatcaaaggttaataaacacatattgctttgaatagcatatgaaaaccttccagcagctctaataacgttaggcttggtatagaagatgcagagacatgctaaaatttctcccccaattattgccaagcagaaacttggacgatcgac

SEQ ID NO: 13015 - protein, 50 aa, Homo sapiens
AQAGRELKVGNSNILKSSANLSRSSPPHSPVFREQGRYFGNPIERLQASE

SEQ ID NO: 13016 - DNA, 2879 bp, Homo sapiens
gtttgcttttagttctcattgtgagatcacaagtggaggctccaaccagtccagaagttcctttctatggggaagctgtggcagcaaggccgtgaagagagtctgacttaattgcaaagacgaggtttcaccatgttgaccaggctgatctcaaacatctgacctcaggaagtcagaggcaccaatgtgaggttccacctgctttccagcacattcttggtttcctcacttctgctagacaacgtttgatcagaaggaacagggaacgagaaggagctgctggatgacgataagcctgggaaagggaggctgggtgagcagagacagaaaagaaacacctacctgctgtgacctcacaaacacccaggctgagttttgataagacaggttgaatcacactggggtgacagcctcatccctccaggtacaaacaagaacaggccatggttaaccaaagctcccccatgggcttcctccttctgggcttctctgaacacccagcactggaaaggactctctttgtggttgtcttcacttcctacctcttgaccctggtgggcaacacactcatcatcctgctgtctgtactgtaccccaggctccactctccaatgtactttttcctctctgacctctccttcttggacctctgctttaccacaagttgtgtcccccagatgctggtcaacctctggggcccaaagaagaccatcagcttcctgggatgctctgtccagctcttcatcttcctgtccctggggaccactgagtgcatcctcctgacagtgatggcctttgaccgatacgtggctgtctgccagcccctccactatgccaccatcatccacccccgcctgtgctggcagctggcatctgtggcctgggttatgagtctggttcaatcgatagtccagacaccatccaccctccacttgcccttctgtccccaccagcagatagatgactttttatgtgaggtcccatctctgattcgactctcctgtggagatacctcctacaatgaaatccagttggctgtgtccagtgtcatcttcgtggttgtgcctctcagcctcatccttgcctcttatggagccactgcccaggcagtgctgaggattaactctgccacagcatggagaaaggcctttgggacctgctcctcccatctcactgtggtcaccctcttctacagctcagtcattgctgtctacctccagcccaaaaatccgtatgcccaagggaggggcaagttctttggtctcttctatgcagtgggcactccttcacttaaccctctcgtatacaccctgaggaacaaggagataaagcgagcactcaggaggttactagggaaggaaagagactccagggaaagctggagagctgcttaatatactttcgaaagtaagaagagtttcttcaagatttatgaacatgttaagttttccagactactacccttcccacatacacctgagccactgtggtgggtcacagtgtggctatgttatctatgagagggagaatgagaaagagagggacagagagataaaagaaattgggtgagaggagataggtagctccataaggcacacaaattcaaatattatcattcctatcactgtccattcttaatatttctatcctccattctgttctttttactgtcatcacttctatagatttcctaactccaccatgcctatttctggttatataattgctctccaattgtcatgtcagtgtaggggaactactccatcatagcattctggacaccttgcatgtatctacgtaggtcatgtaagcaaaggcttgaagaacagctaatctgagatttagaagaatgctttttgatcctcctggaatatgagaggatgggaggccctttagaacctgcctcaatgccatctctcactctccttcttatatccctgggagtatgtcatgtgacaagtctttactgtctcccaggttttggatggagcatggggttttctgccccacaccctttaggatatagctgaagaatataatgaggaatagctggattctagaactgactcctcaccagtggtatattccacaacagtgtcacagtcgtctggcccctttggtttccgtgtcatcctttttggtgtgtaggacaaggagccagggaattggcacgtttggcttttacttcttttttatatgtaaataataagccatctaagtgtaaaagtggctcatatcttctccagccaaatcagctaggccatggccttgccttgcttctcatgagtgtgcttgacagtcatcaccgtcactctatcttcatttctggttcttaccgtgttagcttagttcattcaagctactatcacaagctacacataaattgggtggtttataaataacaaacatttctttcttacagttctggaggctggaaactccaagattaaggcagatttcatgcctattgagggcctgctttctgattatagaaggtgacttcttgctgtgcccacacatggtgaaagggactaccaactctctggagtctcttttatgagggcactaattccaattatgaagcctcttccctcatgacctaatcactgcccaaaggccccatgttctaatgccatcatcttggtggtttaggatttcaacatatgaattttggaaggacataagcattcaaccccctgcacatgtcttctttcctacttcctcaaggttctttctgtccagttgctccttcttctattgacccttttttgccttctctttctccttcactgcctcaagttacagccagaggaaaggaggaactaaaacttagcaaatctataatcacatgcaaatacacagaatggattgttacaacc

SEQ ID NO: 13017 - protein, 316 aa, Homo sapiens; identical to SEQ ID NO: 1334

SEQ ID NO: 13018 - DNA, 2994 bp, Homo sapiens
gtttgcttttagttctcattgtgagatcacaagtggaggctccaaccagtccagaagttcctttctatggggaagctgtggcagcaaggccgtgaagagagtctgacttaattgcaaagacgaggtttcaccatgttgaccaggctgatctcaaacatctgacctcaggaagtcagaggcaccaatgtgaggttccacctgctttccagcacattcttggtttcctcacttctgctagacaacgtttgatcagaaggaacagggaacgagaaggagctgctggatgacgataagcctgggaaagggaggctgggtgagcagagacagaaaagaaacacctacctgctgtgacctcacaaacacccaggctgagttttgataagacaggttgaatcacactggggtgacagcctcatccctccaggtacaaacaagaacaggccatggttaaccaaagctcccccatgggcttcctccttctgggcttctctgaacacccagcactggaaaggactctctttgtggttgtcttcacttcctacctcttgaccctggtgggcaacacactcatcatcctgctgtctgtactgtaccccaggctccactctccaatgtactttttcctctctgacctctccttcttggacctctgctttaccacaagttgtgtcccccagatgctggtcaacctctggggcccaaagaagaccatcagcttcctgggatgctctgtccagctcttcatcttcctgtccctggggaccactgagtgcatcctcctgacagtgatggcctttgaccgatacgtggctgtctgccagcccctccactatgccaccatcatccacccccgcctgtgctggcagctggcatctgtggcctgggttatgagtctggttcaatcgatagtccagacaccatccaccctccacttgcccttctgtccccaccagcagatagatgactttttatgtgaggtcccatctctgattcgactctcctgtggagatacctcctacaatgaaatccagttggctgtgtccagtgtcatcttcgtggttgtgcctctcagcctcatccttgcctcttatggagccactgcccaggcagtgctgaggattaactctgccacagcatggagaaaggcctttgggacctgctcctcccatctcactgtggtcaccctcttctacagctcagtcattgctgtctacctccagcccaaaaatccgtatgcccaagggaggggcaagttctttggtctcttctatgcagtgggcactccttcacttaaccctctcgtatacaccctgaggaacaaggagataaagcgagcactcaggaggttactagggaaggaaagagactccagggaaagctggagagctgcttaatatactttcgaaagtaagaagagtttcttcaagatttatgaacatgttaagttttccagactactacccttcccacatacacctgagccactgtggtgggtcacagtgtggctatgttatctatgagagggagaatgagaaagagagggacagagagataaaagaaattgggtgagaggagataggtagctccataaggcacacaaattcaaatattatcattcctatcactgtccattcttaatatttctatcctccattctgttctttttactgtcatcacttctatagatttcctaactccaccatgcctatttctggttatataattgctctccaattgtcatgtcagtgtaggggaactactccatcatagcattctggacaccttgcatgtatctacgtaggtcatgtaagcaaaggcttgaagaacagctaatctgagatttagaagaatgctttttgatcctcctggaatatgagaggatgggaggccctttagaacctgcctcaatgccatctctcactctccttcttatatccctgggagtatgtcatgtgacaagtctttactgtctcccaggttttggatggagcatggggttttctgccccacaccctttaggatatagctgaagaatataatgaggaatagctggattctagaactgactcctcaccagtggtatattccacaacagtgtcacagtcgtctggcccctttggtttccgtgtcatcctttttggtgtgtaggacaaggagccagggaattggcacgtttggcttttacttcttttttatatgtaaataataagccatctaagtgtaaaagtggctcatatcttctccagccaaatcagctaggccatggccttgccttgcttctcatgagtgtgcttgacagtcatcaccgtcactctatcttcatttctggttcttaccgtgttagcttagttcattcaagctactatcacaagctacacataaattgggtggtttataaataacaaacatttctttcttacagttctggaggctggaaactccaagattaaggcagatttcatgcctattgagggcctgctttctgattatagaaggtgacttcttgctgtgcccacacatggtgaaagggactaccaactctctggagtctcttttatgagggcactaattccaattatgaagcctcttccctcatgacctaatcactgcccaaaggccccatgttctaatgccatcatcttggtggtttaggatttcaacatatgaattttggaaggacataagcattcaaccccctgcacatgtcttctttcctacttcctcaaggttctttctgtccagttgctccttcttctattgacccttttttgccttctctttctccttcactgcctcaagttacagccagaggaaaggaggaactaaaacttagcaaatctataatcacatgcaaatacacagaatggattgttacaaccaaaatgcaggctctattgttttcaatttagcagcctttcaaatgtatatggttctggccacattaaagttgcaaataacactttttttgagactgaaataaaggtgaaatattgg

SEQ ID NO: 13019 - protein, 316 aa, Homo sapiens; identical to SEQ ID NO: 1334

SEQ ID NO: 13020 - DNA, 2133 bp, Homo sapiens
tcatgtgtctcagcacagtcttttacagcaaaaatgcatgtcacctcctcctaaaggctttccgtggcccacccacccagattcctcctttattgtgcagactctttcctaacccacacctcatcttaatttatttgccttcaattctgggcggcggtgttggggagggtctcaattttcccatgtatttcccagtgtttattgaatacatgaggccatactcttctagtctctctgcttctcatgctaggaactgaaccgaccagcctatactttaaggcttgttatttcactgactaaggaaaggctacttaagagggcaagctcagacatacataatctggagtggatcttccatgggaaaacacgtatataacagaaattattggcaaaactataagtatggtctacagactttctttgccctcaaccaggaagtcagaggcaccaatgtgaggttccacctgctttccagcacattcttggtttcctcacttctgctagacaacgtttgatcagaaggaacagggaacgagaaggagctgctggatgacgataagcctgggaaagggaggctgggtgagcagagacagaaaagaaacacctacctgctgtgacctcacaaacacccaggctgagttttgataagacaggttgaatcacactggggtgacagcctcatccctccaggtacaaacaagaacaggccatggttaaccaaagctcccccatgggcttcctccttctgggcttctctgaacacccagcactggaaaggactctctttgtggttgtcttcacttcctacctcttgaccctggtgggcaacacactcatcatcctgctgtctgtactgtaccccaggctccactctccaatgtactttttcctctctgacctctccttcttggacctctgctttaccacaagttgtgtcccccagatgctggtcaacctctggggcccaaagaagaccatcagcttcctgggatgctctgtccagctcttcatcttcctgtccctggggaccactgagtgcatcctcctgacagtgatggcctttgaccgatacgtggctgtctgccagcccctccactatgccaccatcatccacccccgcctgtgctggcagctggcatctgtggcctgggttatgagtctggttcaatcgatagtccagacaccatccaccctccacttgcccttctgtccccaccagcagatagatgactttttatgtgaggtcccatctctgattcgactctcctgtggagatacctcctacaatgaaatccagttggctgtgtccagtgtcatcttcgtggttgtgcctctcagcctcatccttgcctcttatggagccactgcccaggcagtgctgaggattaactctgccacagcatggagaaaggcctttgggacctgctcctcccatctcactgtggtcaccctcttctacagctcagtcattgctgtctacctccagcccaaaaatccgtatgcccaagggaggggcaagttctttggtctcttctatgcagtgggcactccttcacttaaccctctcgtatacaccctgaggaacaaggagataaagcgagcactcaggaggttactagggaaggaaagagactccagggaaagctggagagctgcttaatatactttcgaaattctggaggctggaaactccaagattaaggcagatttcatgcctattgagggcctgctttctgattatagaaggtgacttcttgctgtgcccacacatggtgaaagggactaccaactctctggagtctcttttatgagggcactaattccaattatgaagcctcttccctcatgacctaatcactgcccaaaggccccatgttctaatgccatcatcttggtggtttaggatttcaacatatgaattttggaaggacataagcattcaaccccctgcacatgtcttctttcctacttcctcaaggttctttctgtccagttgctccttcttctattgacccttttttgccttctctttctccttcactgcctcaagttacagccagaggaaaggaggaactaaaacttagcaaatctataatcacatgcaaatacacagaatggattgttacaaccaaa

SEQ ID NO: 13021 - protein, 52 aa, Homo sapiens
MGKHVYNRNYWQNYKYGLQTFFALNQEVRGTNVRFHLLSSTFLVSSLLLDNV

SEQ ID NO: 13022 - DNA, 973 bp, Homo sapiens
gaagtcagaggcaccaatgtgaggttccacctgctttccagcacattcttggtttcctcacttctgctagacaacgtttgatcagaaggaacagggaacgagaaggagctgctggatgacgataagcctgggaaagggaggctgggtgagcagagacagaaaagaaacacctacctgctgtgacctcacaaacacccaggctgagttttgataagacaggttgaatcacactggggtgacagcctcatccctccagatgctggtcaacctctggggcccaaagaagaccatcagcttcctgggatgctctgtccagctcttcatcttcctgtccctggggaccactgagtgcatcctcctgacagtgatggcctttgaccgatacgtggctgtctgccagcccctccactatgccaccatcatccacccccgcctgtgctggcagctggcatctgtggcctgggttatgagtctggttcaatcgatagtccagacaccatccaccctccacttgcccttctgtccccaccagcagatagatgactttttatgtgaggtcccatctctgattcgactctcctgtggagatacctcctacaatgaaatccagttggctgtgtccagtgtcatcttcgtggttgtgcctctcagcctcatccttgcctcttatggagccactgcccaggcagtgctgaggattaactctgccacagcatggagaaaggcctttgggacctgctcctcccatctcactgtggtcaccctcttctacagctcagtcattgctgtctacctccagcccaaaaatccgtatgcccaagggaggggcaagttctttggtctcttctatgcagtgggcactccttcacttaaccctctcgtatacaccctgaggaacaaggagataaagcgagcactcaggaggttactagggaaggaaagagactccagggaaagctggagagctgcttaa

SEQ ID NO: 13023 - protein, 238 aa, Homo sapiens
MLVNLWGPKKTISFLGCSVQLFIFLSLGTTECILLTVMAFDRYVAVCQPLHYATIIHPRLCWQLASVAWVMSLVQSIVQTPSTLHLPFCPHQQIDDFLCEVPSLIRLSCGDTSYNEIQLAVSSVIFVVVPLSLILASYGATAQAVLRINSATAWRKAFGTCSSHLTVVTLFYSSVIAVYLQPKNPYAQGRGKFFGLFYAVGTPSLNPLVYTLRNKEIKRALRRLLGKERDSRESWRAA

SEQ ID NO: 13024 - DNA, 1137 bp, Homo sapiens; identical to SEQ ID NO: 1335

SEQ ID NO: 13025 - protein, 378 aa, Homo sapiens; identical to SEQ ID NO: 1336

SEQ ID NO: 13026 - DNA, 488 bp, Homo sapiens
gcttgcttccccttggtgttctgccataaattttatcatttctggattgctgtctgtcattttgggaagaaaatcaaacaagcatctgccctgctcagtcctgggtggagaagctaccagaaccacatctcctgtctgtcccaccataagtctctgcttcattcacgctttcatgtgtcgtgcatcaagcaagcatttgcctgtaggcttggggagctctgagaggggttgagagtgaacaaaattaatcaaatcgtataacagaagaggaagtcccatcctgccgaggatcctggatgtgagaacctgctgctggcctggtgggatcgtggtgccccaggagcatgaactgctcaggagcagaccctgaccagatcccctgcaggcctggaacagcctgatcagcagcctcctaagccccatggctgccacagtgggcctcattgtccttccctatcacctagccggggtgttcccagctgccagac

SEQ ID NO: 13027 - protein, 73 aa, Homo sapiens
ACFPLVFCHKFYHFWIAVCHFGKKIKQASALLSPGWRSYQNHISCLSHHKSLLHSRFHVSCIKQAFACRLGEL

SEQ ID NO: 13028 - DNA, 686 bp, Homo sapiens
agcatttgcctgtaggcttggggagctctgagaggggttgagagtgaacaaaattaatcaaatcgtataacagaagaggaagtcccatcctgccgaggatcctggatgtgagaacctgctgctggcctggtgggatcgtggtgccccaggagcatgaactgctcaggagcagaccctgaccagatcccctgcaggcctggaacagcctgatcagcagcctcctaagccccatggctgccacagtgggcctcattgtccttccctatcacctagccggggtgttcccagctgccagacagtgccaactggtggtgcctgcccatcagtgccccaagacagccactacttttcgaagaatgagaccaccagctgctttgtggccagctccagcttactgaatgtgtttcctgacccaaagtgacacagtgatcaccagcatgccccaggcagcatttgctgacaccgtcctggagatgaacaaggagtgcacccttagtgtgggggcagagagagagagagcacattgtctgcaggagtcagctgaatgatctcacagaccccacctgctgggctcttccattttatcacaattattccgcctgttcacgtgcagagagaacacttggggcagattttaagaccttagagagtaacttgtttacaaataaaatatctctttgatgatg

SEQ ID NO: 13029 - protein, 55 aa, Homo sapiens
MAATVGLIVLPYHLAGVFPAARQCQLVVPAHQCPKTATTFRRMRPPAALWPAPAY

SEQ ID NO: 13030 - DNA, 2777 bp, Homo sapiens
actgcccagcctgatggctccacatctcaggagtaggctctgattccttggggccccaggagcctctcaggagtctacatcccaagatgttctaacttccagagtctccaagcccatcaagagcaagttttgctaaaagtgttctgagagcttatgaagcacatggacaaggaagggttgtgcatccggctttccaccttaaactggtttctatggtgcttcatcgatgagataaggatgcataggagaccccaggccaggagttccttcaggacacactgtcctaggcctgggccctggaggaggacatggtgatgaggcaccctgaggcctccatgggggaactgagaagcatgcactgtgacctgcacacccaggtgggcttcagcaccaagtctcctcctgtgtcaccctgcggggcagtaaatagtgggaagtgcccagacctcaccagccctgctccctgggccttcctccagcccctcctctccctcctcctctaagaagcttctgaaaccaggctgcctgagcctagggcaaaagctgaccttgggtttactggacatgcctcagagacaatgagacgtgagcaagactcttccaagcccctcccctgtaccctcctgctctcactcctgaaagccccagaaggacactggaggggtcagatccatctgtgcaagcccacaaccacacctgtgagtaccagcagccctggagagcagcagggggccttcactcctgagcacccctccaagggcctaaaatcagtgtcagagaccctaagagaatctagggagagggcataggtgaaaccctggcccagagccagaattgattgctcagctgagtgtgggaacagtccagccctggcatggagatcccccagaggagtggagggtgtctcatccactgtggagataagcccccatattgcgtggcaaaggggctaggtaacagttaaggcctcatccatctgagctctgaatcaaggctaaagcccaggctaagcagccctggggcaagagtgtgaggcaggaagactgagtcagcctgaaccctgggggctgtccctggagtgacttgagcttccctgacagcttccccactctaggctgcacacacacctcgctctgggagtagcagcctgcaggagtgtcctcagcattagaccagggggaccacacggggaccctgaggactgcagggacccaggtctgtggggtccagcctggcaaaagcaagatgttctcaatggaaaagctgaccaaatctgctttcctttcagccaaacctgagcaagcacccccaccacccaggcctctgcagatatcccccagcattgagaccctccccaaggggatgggctgcttctccctggcccacagcccagctccagcagcccatgggtatagccctcctgaaacaggagcctcatcctccctcaccctcacctggctatgctgtacccaaggccaaagcccagaggcataagggagcttctgcagagcccaggacagcaggctgctctctgggggccctggggactcagagtgtggccagcccatccccagctcaggatagaccacagagtgcttggtgattcctgcattggaactccctctctaagctccccatggacctggacctcagaggcctgtggttttcacagtagagcttggagcagagatgctaggcccctatcacttccatatgtgtcctggacacctctaagatcataggactggcctagcccccaataccagacactgcccagccccctgatagcccagaggtagggccagagacaactctcctgcatgtgatgcctacagctgatcactcttggcagacagtgaacatcacggcccagaaggagccagggcagcacttggcaagctgccccaaagccccagagagctccttagacatggaaagtcaatactgatggggaagctggacacttggaggccactggagggaggggtgagcatggtgtccccacagcccaggccacccagcagcatgccctgcatccatggtcccaacctgtagggcagaacccccctctcaacgcacaattcctagacccagagggccctagcccagactcaacctgagccctgaaagggaaggggcaccaggggtgccttggggcctccagcagcagccaagatacacaggagatggagccccctgtggccctggccagaactagtatttggcttaaggcggagcaagcccccttggagcactgcgtacatacccggggcctatgtgtgcctggcaaggccaagctgatgatgttaccaagctcaaactaccactggccaccttggtgagggtggggcagaaacacgtggaccagccaccaacctcatccattcaaggaagcagaaatggtcaggctcctgcaggataagtggccaccaccagaccaccaatggggcagagttctgaggcccaagcagatggcactggggccctgcttccagggtccacaatctgctccaggacacaagactgaagaaaactaagcaaatgagagtccaggaggctggatccctcatctgccattcttggcagttgcattttgtggtcagaaaaagtcaggaaacttggctctactcactgcaggaggctccaaggtgggaccagagcttccagcatagattcaacaatgcctaagaatgcctcttcttggggaaaaggaccccttccttggcctcaaagcccccacttattttgattaaagcacaataaagtctttgttgtta

SEQ ID NO: 13031 - protein, 53 aa, Homo sapiens
MKHMDKEGLCIRLSTLNWFLWCFIDEIRMHRRPQARSSFRTHCPRPGPWRRTW

SEQ ID NO: 13032 - DNA, 402 bp, Homo sapiens
caggagcctctcaggagtctacatcccaagatgttctaacttccagagtctccaagcccatcaagagcaagttttgctaaaagtgttctgagagcttatgaagcacatggacaaggaagggttgtgcatccggctttccaccttaaactggtttctatggtgcttcatcgatgagataaggatgcataggagaccccaggccaggagttccttcaggacacactgtcctaggcctgggccctggaggaggacatggtgatgaggcaccctgaggcctccatgggggaactgagaagcatgcactgtgacctgcacacccagccaaacctgagcaagcacccccaccacccaggcctctgcagatatcccccagcattgagaccctccccaaggggatgggct

SEQ ID NO: 13033 - protein, 53 aa, Homo sapiens; identical to SEQ ID NO: 13031

SEQ ID NO: 13034 - DNA, 1087 bp, Homo sapiens
gattgcttgaggagagaagtatgtgatcagaaagcattctttgtctattaactcctgcccagcaaaagtgaaagaaaattcatgggagcatgcaagaacaaagagcacagcaaagctggacaaacacagcaatccaggcaggggatttccaactcaactctggtatataagctgcatgcaaagtcctttttctgtctctggtttctggccccttgtctgcagagatggctcccaatgcttcctgcctctgtgtgcatgtccgttccgaggaatgggatttaatgacctttgatgccaacccatatgacagcgtgaaaaaaatcaaagaacatgtccggtctaagaccaaggttcctgtgcaggaccaggttcttttgctgggctccaagatcttaaagccacggagaagcctctcatcttatggcattgacaaagagaagaccatccaccttaccctgaaagtggtgaagcccagtgatgaggagctgcccttgtttcttgtggagtcaggtgatgaggcaaagaggcacctcctccaggtgcgaaggtccagctcagtggcacaagtgaaagcaatgatcgagactaagacgggtataatccctgagacccagattgtgacttgcaatggaaagagactggaagatgggaagatgatggcagattacggcatcagaaagggcaacttactcttcctggcatgttattgtattggagggtgaccaccctgggcatggggtgttggcaggggtcaaaaagcttatttcttttaatctcttactcaacgaacacatcttctgatgatttcccaaaattaatgagaatgagatgagtagagtaagatttgggtgggatgggtaggatgaagtatattgcccaactctatgtttctttgattctaacacaattaattaagtgacatgatttttactaatgtattactgagactagtaaataaatttttaaggcaaaatagagcattcaaagccagcttggaatttaattctgtcttgataccttgttatttatgcaaaaactcctatctcctttcctttatgacaagagagtaagttttaggttgggatcc

SEQ ID NO: 13035 - protein, 165 aa, Homo sapiens
MAPNASCLCVHVRSEEWDLMTFDANPYDSVKKIKEHVRSKTKVPVQDQVLLLGSKILKPRRSLSSYGIDKEKTIHLTLKVVKPSDEELPLFLVESGDEAKRHLLQVRRSSSVAQVKAMIETKTGIIPETQIVTCNGKRLEDGKMMADYGIRKGNLLFLACYCIGG

SEQ ID NO: 13036 - DNA, 3524 bp, Homo sapiens
ctcctcctcctcccctccgtcggtcagtcagtccgcgaggagagtccgcggtggcggcgacggtggcgagagccgcgggggccgtaggaagccaaccttccctgcttctccggggccctcgccccctcctccccacaaaatcagggatggaggcgcctccccggcaccctcttagcagccctccccaggaaaagtgtcccccctgagctcctaacgctccccaacagctacccctgccccccacgccatggggcccggggccccttttgcccgggtggggtggccactgccgcttctggttgtgatggcggcaggggtggctccggtgtgggcctcccactccccccatctcccgcggcctcactcgcgggtccccccgcacccctcctcagaacggcgcgcagtgtacatcggggcactgtttcccatgagcgggggctggccagggggccaggcctgccagcccgcggtggagatggcgctggaggacgtgaatagccgcagggacatcctgccggactatgagctcaagctcatccaccacgacagcaagtgtgatccaggccaagccaccaagtacctatatgagctgctctacaacgaccctatcaagatcatccttatgcctggctgcagctctgtctccacgctggtggctgaggctgctaggatgtggaacctcattgtgctttcctatggctccagctcaccagccctgtcaaaccggcagcgtttccccactttcttccgaacgcacccatcagccacactccacaaccctacccgcgtgaaactctttgaaaagtggggctggaagaagattgctaccatccagcagaccactgaggtcttcacttcgactctggacgacctggaggaacgagtgaaggaggctggaattgagattactttccgccagagtttcttctcagatccagctgtgcccgtcaaaaacctgaagcgccaggatgcccgaatcatcgtgggacttttctatgagactgaagcccggaaagttttttgtgaggtgtacaaggagcgtctctttgggaagaagtacgtctggttcctcattgggtggtatgctgacaattggttcaagatctacgacccttctatcaactgcacagtggatgagatgactgaggcggtggagggccacatcacaactgagattgtcatgctgaatcctgccaatacccgcagcatttccaacatgacatcccaggaatttgtggagaaactaaccaagcgactgaaaagacaccctgaggagacaggaggcttccaggaggcaccgctggcctatgatgccatctgggccttggcactggccctgaacaagacatctggaggaggcggccgttctggtgtgcgcctggaggacttcaactacaacaaccagaccattaccgaccaaatctaccgggcaatgaactcttcgtcctttgagggtgtctctggccatgtggtgtttgatgccagcggctctcggatggcatggacgcttatcgagcagcttcagggtggcagctacaagaagattggctactatgacagcaccaaggatgatctttcctggtccaaaacagataaatggattggagggtcccccccagctgaccagaccctggtcatcaagacattccgcttcctgtcacagaaactctttatctccgtctcagttctctccagcctgggcattgtcctagctgttgtctgtctgtcctttaacatctacaactcacatgtccgttatatccagaactcacagcccaacctgaacaacctgactgctgtgggctgctcactggctttagctgctgtcttccccctggggctcgatggttaccacattgggaggaaccagtttcctttcgtctgccaggcccgcctctggctcctgggcctgggctttagtctgggctacggttccatgttcaccaagatttggtgggtccacacggtcttcacaaagaaggaagaaaagaaggagtggaggaagactctggaaccctggaagctgtatgccacagtgggcctgctggtgggcatggatgtcctcactctcgccatctggcagatcgtggaccctctgcaccggaccattgagacatttgccaaggaggaacctaaggaagatattgacgtctctattctgccccagctggagcattgcagctccaggaagatgaatacatggcttggcattttctatggttacaaggggctgctgctgctgctgggaatcttccttgcttatgagaccaagagtgtgtccactgagaagatcaatgatcaccgggctgtgggcatggctatctacaatgtggcagtcctgtgcctcatcactgctcctgtcaccatgattctgtccagccagcaggatgcagcctttgcctttgcctctcttgccatagttttctcctcctatatcactcttgttgtgctctttgtgcccaagatgcgcaggctgatcacccgaggggaatggcagtcggaggcgcaggacaccatgaagacagggtcatcgaccaacaacaacgaggaggagaagtcccggctgttggagaaggagaaccgtgaactggaaaagatcattgctgagaaagaggagcgtgtctctgaactgcgccatcaactccagtctcggcagcagctccgctcccggcgccacccaccgacacccccagaaccctctgggggcctgcccaggggaccccctgagccccccgaccggcttagctgtgatgggagtcgagtgcatttgctttataagtgagggtgcatgtccgttccgaggaatgggatttaatgacctttgatgccaacccatatgacagcgtgaaaaaaatcaaagaacatgtccggtctaagaccaaggttcctgtgcaggaccaggttcttttgctgggctccaagatcttaaagccacggagaagcctctcatcttatggcattgacaaagagaagaccatccaccttaccctgaaagtggtgaagcccagtgatgaggagctgcccttgtttcttgtggagtcaggtgatgaggcaaagaggcacctcctccaggtgcgaaggtccagctcagtggcacaagtgaaagcaatgatcgagactaagacgggtataatccctgagacccagattgtgacttgcaatggaaagagactggaagatgggaagatgatggcagattacggcatcagaaagggcaacttactcttcctggcatgttattgtattggagggtgaccaccctgggcatggggtgttggcaggggtcaaaaagcttatttcttttaatctcttactcaacgaacacatcttctgatgatttcccaaaattaatgagaatgagatgagtagagtaagatttgggtgggatgggtaggatgaagtatattgcccaactctatgtttctttgattctaacacaattaattaagtgacatgatttttactaatgtattactgagactagtaaataaatttttaaggcaaaatagagcattcaaagccag

SEQ ID NO: 13037 - protein, 844 aa, Homo sapiens; identical to SEQ ID NO: 1344

SEQ ID NO: 13038 - DNA, 989 bp, Homo sapiens
gattgcttgaggagagaagtatgtgatcagaaagcattctttgtctattaactcctgcccagcaaaagtgaaagaaaattcatgggagcatgcaagaacaaagagcacagcaaagctggacaaacacagcaatccaggcaggggatttccaactcaactctggtatataagctgcatgcaaagtcctttttctgtctctggtttctggccccttgtctgcagagatggctcccaatgcttcctgcctctgtgtgcatgtccgttccgaggaatgggatttaatgacctttgatgccaacccatatgacagcgtgaaaaaaatcaaagaacatgtccggtctaagaccaaggttcctgtgcaggaccaggttcttttgctgggctccaagatcttaaagccacggagaagcctctcatcttatggcattgacaaagagaagaccatccaccttaccctgaaagtggtgaagcccagtgatgaggagctgcccttgtttcttgtggagtcaggtgatgaggcaaagaggcacctcctccaggtgcgaaggtccagctcagtggcacaagtgaaagcaatgatcgagactaagacgggtataatccctgagacccagattgtgacttgcaatggaaagagactggaagatgggaagatgatggcagattacggcatcagaaagggcaacttactcttcctggcatgttattgtattggagggtgaccaccctgggcatggggtgttggcaggggtcaaaaagcttatttcttttaatctcttactcaacgaacacatcttctgatgatttcccaaaattaatgagaatgagatgagtagagtaagatttgggtgggatgggtaggatgaagtatattgcccaactctatgtttctttgattctaacacaattaattaagtgacatgatttttactaatgtattactgagactagtaaataaatttttaaggcaaaatagagcattcaaagcc

SEQ ID NO: 13039 - protein, 165 aa, Homo sapiens; identical to SEQ ID NO: 13035

SEQ ID NO: 13040 - DNA, 498 bp, Homo sapiens
tgaggtttcttttgggagtaatgaaatattctggaagtaaatggtgttggttgcacaacttgtgaatatactttaaaccactaaattacacacttcaaaagggcgaattttatggaagtcagaggcaccagtgtgagtatccatctgctgtccagtacattcatggattcctcactctcactagacaatgtttgaccaggaagaacagggaatgagaaggagctgctggatggtgatgagccttggaaagggaggctgggcgagcagagacagaagagaaacacctacctgctgtgacctcacaaacacccaggctgagttttgataagacaggttgaatcacactggagtgacagcctcatccctccaggtacaaacaagaacaggccatggttaaccaaagctccacaccgggcttcctccttctgggcttctctgaacacccagggctggaaaggactctcttcgtggttgtcctcacttcctacctcctaaccc

SEQ ID NO: 13041 - protein, 45 aa, Homo sapiens
MFDQEEQGMRRSCWMVMSLGKGGWASRDRRETPTCCDLTNTQAEF

SEQ ID NO: 13042 - DNA, 1429 bp, Homo sapiens
ttctataaaattcattcaaccaatagagcaataattgagcctacagagacaacttatcagaaaattcattcaatataccttacgagatcatccaatagataagagacaactctagaacagcattcagaacatagtggcactcaataaatttcccctgaatgaatgaattaatgaattagtgcatattttaatcagcctcctttgccctcacccaggaagtcagaggcaccagtgtgagtatccatctgctgtccagtacattcatggattcctcactctcactagacaatgtttgaccaggaagaacagggaatgagaaggagctgctggatggtgatgagccttggaaagggaggctgggcgagcagagacagaagagaaacacctacctgctgtgacctcacaaacacccaggctgagttttgataagacaggttgaatcacactggagtgacagcctcatccctccaggtacaaacaagaacaggccatggttaaccaaagctccacaccgggcttcctccttctgggcttctctgaacacccagggctggaaaggactctcttcgtggttgtcctcacttcctacctcctaaccctagtgggcaacacactcatcatcctgctgtctgcgctggaccccaagctccactctccaatgtactttttcctctccaacctctccttcttggacctctgtttcaccacgagttgtgttccccaaatgctggtcaacctctggggcccaaagaagaccatcagcttcctggactgctctgtccagatcttcatcttcctgtccctggggacaactgagtgcatcctcttgacagtgatggcttttgatcgctacgtggctgtctgccagcccctccactatgccaccatcatccacccccgcctgtgctggcagctggcatctgtggcctgggtcattgggctagtggagtcagtggtccagacaccatccaccctgcacctgcccttctgccccgatcggcaggtggatgattttgtctgtgaggtcccagctctaattcgactctcctgtgaagacacctcctacaatgagatccaggtggctgttgccagtgtcttcatcttggttgtgcctctcagcctcatccttgtctcttacggagccattacctgggcagtgctgaggattaactctgcaaaagggcggaggaaagcttttgggacctgctcctcccatctcactgtggtcaccctcttctacagctcagtcattgctgtctacctccagcccaaaaatccctatgcccaagagaggggcaagttctttggtctcttctatgcagtgggcactccttcacttaaccctctcatatacaccctgaggaacaaggaggtaaccagggcattcaggagattgctggggaaggaaatggggctcacacaaagctga

SEQ ID NO: 13043 - protein, 312 aa, Homo sapiens; identical to SEQ ID NO: 1340

SEQ ID NO: 13044 - DNA, 1923 bp, Homo sapiens
tttctcaatctatatttgaggatgatcctgaatttggatccttttcaaagggaaagttcaccaggaaactgtctgcatagactccctcccatgggaagtaaactctggatcttgtctgagcctgcagacctgagactccctcaatgtgtctttccctctaggtcctgtgcctcatcactgctcctgtcaccatgattctgtccagccagcaggatgcagcctttgcctttgcctctcttgccatagttttctcctcctatatcactcttgttgtgctctttgtgcccaagatgcgcaggctgatcacccgaggggaatggcagtcggaggcgcaggacaccatgaagacagggtcatcgaccaacaacaacgaggaggagaagtcccggctgttggagaaggagaaccgtgaactggaaaagatcattgctgagaaagaggagcgtgtctctgaactgcgccatcaactccagtctcggcagcagctccgctcccggcgccacccaccgacacccccagaaccctctgggggcctgcccaggggaccccctgagccccccgaccggcttagctgtgatgggagtcgagtgcatttgctttataagtgagggtagggtgagggaggacaggccagtagggggagggaaagggagaggggaagggcaggggactcaggaagcagggggtccccatccccagctgggaagaacatgctatccaatctcatctcttgtaaatacatgtccccctgtgagttctgggctgatttgggtctctcatacctctgggaaacagacctttttctctcttactgcttcatgtaattttgtatcacctcttcacaatttagttcgtacctggcttgaagctgctcactgctcacacgctgcctcctcagcagcctcactgcatctttctcttcccatgcaacaccctcttctagttaccacggcaacccctgcagctcctctgcctttgtgctctgttcctgtccagcaggggtctcccaacaagtgctctttccaccccaaaggggcctctccttttctccactgtcataatctctttccatcttacttgcccttctatactttctcacatgtggctccccctgaattttgcttcctttgggagctcattcttttcgccaaggctcacatgctccttgcctctgctctgtgcactcacgctcagcacacatgcatcctcccctctcctgcgtgtgcccactgaacatgctcatgtgtacacacgcttttcccgtatgctttcttcatgttcagtcacatgtgctctcgggtgccctgcattcacagctacgtgtgcccctctcatggtcatgggtctgcccttgagcgtgtttgggtaggcatgtgcaatttgtctagcatgctgagtcatgtctttcctatttgcacacgtccatgtttatccatgtactttccctgtgtaccctccatgtaccttgtgtactttcttcccttaaatcatggtattcttctgacagagccatatgtaccctaccctgcacattgttatgcacttttccccaattcatgtttggtggggccatccacaccctctccttgtcacagaatctccatttctgctcagattccccccatctccattgcattcatgtactaccctcagtctacactcacaatcatcttctcccaagactgctcccttttgttttgtgtttttttgaggggaattaaggaaaaataagtgggggcaggtttggagagctgcttccagtggatagttgatgagaatcctgaccaaaggaaggcacccttgactgttgggatagacagatggacctatggggtgggaggtggtgtccctttcacactgtggtgtctcttggggaaggatctccccgaatctcaataaaccagtgaacagtgtgactcggca

SEQ ID NO: 13045 - protein, 138 aa, Homo sapiens [sequence omitted]

SEQ ID NO: 13046 - DNA, 4072 bp, Homo sapiens
agtcagtccgcgaggagagtccgcggtggcggcgacggtggcgagagccgcgggggccgtaggaagccaaccttccctgcttctccggggccctcgccccctcctccccacaaaatcagggatggaggcgcctccccggcaccctcttagcagccctccccaggaaaagtgtcccccctgagctcctaacgctccccaacagctacccctgccccccacgccatggggcccggggccccttttgcccgggtggggtggccactgccgcttctggttgtgatggcggcaggggtggctccggtgtgggcctcccactccccccatctcccgcggcctcactcgcgggtccccccgcacccctcctcagaacggcgcgcagtgtacatcggggcactgtttcccatgagcgggggctggccagggggccaggcctgccagcccgcggtggagatggcgctggaggacgtgaatagccgcagggacatcctgccggactatgagctcaagctcatccaccacgacagcaagtgtgatccaggccaagccaccaagtacctatatgagctgctctacaacgaccctatcaagatcatccttatgcctggctgcagctctgtctccacgctggtggctgaggctgctaggatgtggaacctcattgtgctttcctatggctccagctcaccagccctgtcaaaccggcagcgtttccccactttcttccgaacgcacccatcagccacactccacaaccctacccgcgtgaaactctttgaaaagtggggctggaagaagattgctaccatccagcagaccactgaggtcttcacttcgactctggacgacctggaggaacgagtgaaggaggctggaattgagattactttccgccagagtttcttctcagatccagctgtgcccgtcaaaaacctgaagcgccaggatgcccgaatcatcgtgggacttttctatgagactgaagcccggaaagttttttgtgaggtgtacaaggagcgtctctttgggaagaagtacgtctggttcctcattgggtggtatgctgacaattggttcaagatctacgacccttctatcaactgcacagtggatgagatgactgaggcggtggagggccacatcacaactgagattgtcatgctgaatcctgccaatacccgcagcatttccaacatgacatcccaggaatttgtggagaaactaaccaagcgactgaaaagacaccctgaggagacaggaggcttccaggaggcaccgctggcctatgatgccatctgggccttggcactggccctgaacaagacatctggaggaggcggccgttctggtgtgcgcctggaggacttcaactacaacaaccagaccattaccgaccaaatctaccgggcaatgaactcttcgtcctttgagggtgtctctggccatgtggtgtttgatgccagcggctctcggatggcatggacgcttatcgagcagcttcagggtggcagctacaagaagattggctactatgacagcaccaaggatgatctttcctggtccaaaacagataaatggattggagggtcccccccagctgaccagaccctggtcatcaagacattccgcttcctgtcacagaaactctttatctccgtctcagttctctccagcctgggcattgtcctagctgttgtctgtctgtcctttaacatctacaactcacatgtccgttatatccagaactcacagcccaacctgaacaacctgactgctgtgggctgctcactggctttagctgctgtcttccccctggggctcgatggttaccacattgggaggaaccagtttcctttcgtctgccaggcccgcctctggctcctgggcctgggctttagtctgggctacggttccatgttcaccaagatttggtgggtccacacggtcttcacaaagaaggaagaaaagaaggagtggaggaagactctggaaccctggaagctgtatgccacagtgggcctgctggtgggcatggatgtcctcactctcgccatctggcagatcgtggaccctctgcaccggaccattgagacatttgccaaggaggaacctaaggaagatattgacgtctctattctgccccagctggagcattgcagctccaggaagatgaatacatggcttggcattttctatggttacaaggggctgctgctgctgctgggaatcttccttgcttatgagaccaagagtgtgtccactgagaagatcaatgatcaccgggctgtgggcatggctatctacaatgtggcagtcctgtgcctcatcactgctcctgtcaccatgattctgtccagccagcaggatgcagcctttgcctttgcctctcttgccatagttttctcctcctatatcactcttgttgtgctctttgtgcccaagatgcgcaggctgatcacccgaggggaatggcagtcggaggcgcaggacaccatgaagacagggtcatcgaccaacaacaacgaggaggagaagtcccggctgttggagaaggagaaccgtgaactggaaaagatcattgctgagaaagaggagcgtgtctctgaactgcgccatcaactccagtctcggcagcagctccgctcccggcgccacccaccgacacccccagaaccctctgggggcctgcccaggggaccccctgagccccccgaccggcttagctgtgatgggagtcgagtgcatttgctttataagtgagggtagggtgagggaggacaggccagtagggggagggaaagggagaggggaagggcaggggactcaggaagcagggggtccccatccccagctgggaagaacatgctatccaatctcatctcttgtaaatacatgtccccctgtgagttctgggctgatttgggtctctcatacctctgggaaacagacctttttctctcttactgcttcatgtaattttgtatcacctcttcacaatttagttcgtacctggcttgaagctgctcactgctcacacgctgcctcctcagcagcctcactgcatctttctcttcccatgcaacaccctcttctagttaccacggcaacccctgcagctcctctgcctttgtgctctgttcctgtccagcaggggtctcccaacaagtgctctttccaccccaaaggggcctctccttttctccactgtcataatctctttccatcttacttgcccttctatactttctcacatgtggctccccctgaattttgcttcctttgggagctcattcttttcgccaaggctcacatgctccttgcctctgctctgtgcactcacgctcagcacacatgcatcctcccctctcctgcgtgtgcccactgaacatgctcatgtgtacacacgcttttcccgtatgctttcttcatgttcagtcacatgtgctctcgggtgccctgcattcacagctacgtgtgcccctctcatggtcatgggtctgcccttgagcgtgtttgggtaggcatgtgcaatttgtctagcatgctgagtcatgtctttcctatttgcacacgtccatgtttatccatgtactttccctgtgtaccctccatgtaccttgtgtactttcttcccttaaatcatggtattcttctgacagagccatatgtaccctaccctgcacattgttatgcacttttccccaattcatgtttggtggggccatccacaccctctccttgtcacagaatctccatttctgctcagattccccccatctccattgcattcatgtactaccctcagtctacactcacaatcatcttctcccaagactgctcccttttgttttgtgtttttttgaggggaattaaggaaaaataagtgggggcaggtttggagagctgcttccagtggatagttgatgagaatcctgaccaaaggaaggcacccttgactgttgggatagacagatggacctatggggtgggaggtggtgtccctttcacactgtggtgtctcttggggaaggatctccccgaatctcaataaaccagtgaacagtgtgactcggca

SEQ ID NO: 13047 - protein, 844 aa, Homo sapiens; identical to SEQ ID NO: 1344

SEQ ID NO: 13048 - DNA, 4361 bp, Homo sapiens
cccttgcaccctccttcttccctccgcccgggagctctccctggtccccggcgccgcctccttccctcccggctccccgctccccgctcccgtggctgccgccgccccggggaagaagagacaggggtggggtttgggggaagcgagagaggaggggagagaccctggccaggctggagcctggattcgaggggaggagggacgggaggaggagaaaggtggaggagaagggaggggggagcggggaggagcggccgggcctggggccttgaggcccggggagagccggggagccgggcccgcgcgccgagatgttgctgctgctgctactggcgccactcttcctccgccccccgggcgcgggcggggcgcagacccccaacgccacctcagaaggttgccagatcatacacccgccctgggaagggggcatcaggtaccggggcctgactcgggaccaggtgaaggctatcaacttcctgccagtggactatgagattgagtatgtgtgccggggggagcgcgaggtggtggggcccaaggtccgcaagtgcctggccaacggctcctggacagatatggacacacccagccgctgtgtccgaatctgctccaagtcttatttgaccctggaaaatgggaaggttttcctgacgggtggggacctcccagctctggacggagcccgggtggatttccggtgtgaccccgacttccatctggtgggcagctcccggagcatctgtagtcagggccagtggagcacccccaagccccactgccaggtgaatcgaacgccacactcagaacggcgcgcagtgtacatcggggcactgtttcccatgagcgggggctggccagggggccaggcctgccagcccgcggtggagatggcgctggaggacgtgaatagccgcagggacatcctgccggactatgagctcaagctcatccaccacgacagcaagtgtgatccaggccaagccaccaagtacctatatgagctgctctacaacgaccctatcaagatcatccttatgcctggctgcagctctgtctccacgctggtggctgaggctgctaggatgtggaacctcattgtgctttcctatggctccagctcaccagccctgtcaaaccggcagcgtttccccactttcttccgaacgcacccatcagccacactccacaaccctacccgcgtgaaactctttgaaaagtggggctggaagaagattgctaccatccagcagaccactgaggtcttcacttcgactctggacgacctggaggaacgagtgaaggaggctggaattgagattactttccgccagagtttcttctcagatccagctgtgcccgtcaaaaacctgaagcgccaggatgcccgaatcatcgtgggacttttctatgagactgaagcccggaaagttttttgtgaggtgtacaaggagcgtctctttgggaagaagtacgtctggttcctcattgggtggtatgctgacaattggttcaagatctacgacccttctatcaactgcacagtggatgagatgactgaggcggtggagggccacatcacaactgagattgtcatgctgaatcctgccaatacccgcagcatttccaacatgacatcccaggaatttgtggagaaactaaccaagcgactgaaaagacaccctgaggagacaggaggcttccaggaggcaccgctggcctatgatgccatctgggccttggcactggccctgaacaagacatctggaggaggcggccgttctggtgtgcgcctggaggacttcaactacaacaaccagaccattaccgaccaaatctaccgggcaatgaactcttcgtcctttgagggtgtctctggccatgtggtgtttgatgccagcggctctcggatggcatggacgcttatcgagcagcttcagggtggcagctacaagaagattggctactatgacagcaccaaggatgatctttcctggtccaaaacagataaatggattgttatatccagaactcacagcccaacctgaacaacctgactgctgtgggctgctcactggctttagctgctgtcttccccctggggctcgatggttaccacattgggaggaaccagtttcctttcgtctgccaggcccgcctctggctcctgggcctgggctttagtctgggctacggttccatgttcaccaagatttggtgggtccacacggtcttcacaaagaaggaagaaaagaaggagtggaggaagactctggaaccctggaagctgtatgccacagtgggcctgctggtgggcatggatgtcctcactctcgccatctggcagatcgtggaccctctgcaccggaccattgagacatttgccaaggaggaacctaaggaagatattgacgtctctattctgccccagctggagcattgcagctccaggaagatgaatacatggcttggcattttctatggttacaaggggctgctgctgctgctgggaatcttccttgcttatgagaccaagagtgtgtccactgagaagatcaatgatcaccgggctgtgggcatggctatctacaatgtggcagtcctgtgcctcatcactgctcctgtcaccatgattctgtccagccagcaggatgcagcctttgcctttgcctctcttgccatagttttctcctcctatatcactcttgttgtgctctttgtgcccaagatgcgcaggctgatcacccgaggggaatggcagtcggaggcgcaggacaccatgaagacagggtcatcgaccaacaacaacgaggaggagaagtcccggctgttggagaaggagaaccgtgaactggaaaagatcattgctgagaaagaggagcgtgtctctgaactgcgccatcaactccagtctcggcagcagctccgctcccggcgccacccaccgacacccccagaaccctctgggggcctgcccaggggaccccctgagccccccgaccggcttagctgtgatgggagtcgagtgcatttgctttataagtgagggtagggtgagggaggacaggccagtagggggagggaaagggagaggggaagggcaggggactcaggaagcagggggtccccatccccagctgggaagaacatgctatccaatctcatctcttgtaaatacatgtccccctgtgagttctgggctgatttgggtctctcatacctctgggaaacagacctttttctctcttactgcttcatgtaattttgtatcacctcttcacaatttagttcgtacctggcttgaagctgctcactgctcacacgctgcctcctcagcagcctcactgcatctttctcttcccatgcaacaccctcttctagttaccacggcaacccctgcagctcctctgcctttgtgctctgttcctgtccagcaggggtctcccaacaagtgctctttccaccccaaaggggcctctccttttctccactgtcataatctctttccatcttacttgcccttctatactttctcacatgtggctccccctgaattttgcttcctttgggagctcattcttttcgccaaggctcacatgctccttgcctctgctctgtgcactcacgctcagcacacatgcatcctcccctctcctgcgtgtgcccactgaacatgctcatgtgtacacacgcttttcccgtatgctttcttcatgttcagtcacatgtgctctcgggtgccctgcattcacagctacgtgtgcccctctcatggtcatgggtctgcccttgagcgtgtttgggtaggcatgtgcaatttgtctagcatgctgagtcatgtctttcctatttgcacacgtccatgtttatccatgtactttccctgtgtaccctccatgtaccttgtgtactttcttcccttaaatcatggtattcttctgacagagccatatgtaccctaccctgcacattgttatgcacttttccccaattcatgtttggtggggccatccacaccctctccttgtcacagaatctccatttctgctcagattccccccatctccattgcattcatgtactaccctcagtctacactcacaatcatcttctcccaagactgctcccttttgttttgtgtttttttgaggggaattaaggaaaaataagtgggggcaggtttggagagctgcttccagtggatagttgatgagaatcctgaccaaaggaaggcacccttgactgttgggatagacagatggacctatggggtgggaggtggtgtccctttcacactgtggtgtctcttggggaaggatctccccgaatctcaataaaccagtgaacagtgtgactcggca

SEQ ID NO: 13049 - protein, 578 aa, Homo sapiens
MLLLLLLAPLFLRPPGAGGAQTPNATSEGCQIIHPPWEGGIRYRGLTRDQVKAINFLPVDYEIEYVCRGEREVVGPKVRKCLANGSWTDMDTPSRCVRICSKSYLTLENGKVFLTGGDLPALDGARVDFRCDPDFHLVGSSRSICSQGQWSTPKPHCQVNRTPHSERRAVYIGALFPMSGGWPGGQACQPAVEMALEDVNSRRDILPDYELKLIHHDSKCDPGQATKYLYELLYNDPIKIILMPGCSSVSTLVAEAARMWNLIVLSYGSSSPALSNRQRFPTFFRTHPSATLHNPTRVKLFEKWGWKKIATIQQTTEVFTSTLDDLEERVKEAGIEITFRQSFFSDPAVPVKNLKRQDARIIVGLFYETEARKVFCEVYKERLFGKKYVWFLIGWYADNWFKIYDPSINCTVDEMTEAVEGHITTEIVMLNPANTRSISNMTSQEFVEKLTKRLKRHPEETGGFQEAPLAYDAIWALALALNKTSGGGGRSGVRLEDFNYNNQTITDQIYRAMNSSSFEGVSGHVVFDASGSRMAWTLIEQLQGGSYKKIGYYDSTKDDLSWSKTDKWIVISRTHSPT

SEQ ID NO: 13050 - DNA, 4512 bp, Homo sapiens
cccttgcaccctccttcttccctccgcccgggagctctccctggtccccggcgccgcctccttccctcccggctccccgctccccgctcccgtggctgccgccgccccggggaagaagagacaggggtggggtttgggggaagcgagagaggaggggagagaccctggccaggctggagcctggattcgaggggaggagggacgggaggaggagaaaggtggaggagaagggaggggggagcggggaggagcggccgggcctggggccttgaggcccggggagagccggggagccgggcccgcgcgccgagatgttgctgctgctgctactggcgccactcttcctccgccccccgggcgcgggcggggcgcagacccccaacgccacctcagaaggttgccagatcatacacccgccctgggaagggggcatcaggtaccggggcctgactcgggaccaggtgaaggctatcaacttcctgccagtggactatgagattgagtatgtgtgccggggggagcgcgaggtggtggggcccaaggtccgcaagtgcctggccaacggctcctggacagatatggacacacccagccgctgtgtccgaatctgctccaagtcttatttgaccctggaaaatgggaaggttttcctgacgggtggggacctcccagctctggacggagcccgggtggatttccggtgtgaccccgacttccatctggtgggcagctcccggagcatctgtagtcagggccagtggagcacccccaagccccactgccaggtgaatcgaacgccacactcagaacggcgcgcagtgtacatcggggcactgtttcccatgagcgggggctggccagggggccaggcctgccagcccgcggtggagatggcgctggaggacgtgaatagccgcagggacatcctgccggactatgagctcaagctcatccaccacgacagcaagtgtgatccaggccaagccaccaagtacctatatgagctgctctacaacgaccctatcaagatcatccttatgcctggctgcagctctgtctccacgctggtggctgaggctgctaggatgtggaacctcattgtgctttcctatggctccagctcaccagccctgtcaaaccggcagcgtttccccactttcttccgaacgcacccatcagccacactccacaaccctacccgcgtgaaactctttgaaaagtggggctggaagaagattgctaccatccagcagaccactgaggtcttcacttcgactctggacgacctggaggaacgagtgaaggaggctggaattgagattactttccgccagagtttcttctcagatccagctgtgcccgtcaaaaacctgaagcgccaggatgcccgaatcatcgtgggacttttctatgagactgaagcccggaaagttttttgtgaggtgtacaaggagcgtctctttgggaagaagtacgtctggttcctcattgggtggtatgctgacaattggttcaagatctacgacccttctatcaactgcacagtggatgagatgactgaggcggtggagggccacatcacaactgagattgtcatgctgaatcctgccaatacccgcagcatttccaacatgacatcccaggaatttgtggagaaactaaccaagcgactgaaaagacaccctgaggagacaggaggcttccaggaggcaccgctggcctatgatgccatctgggccttggcactggccctgaacaagacatctggaggaggcggccgttctggtgtgcgcctggaggacttcaactacaacaaccagaccattaccgaccaaatctaccgggcaatgaactcttcgtcctttgagggtgtctctggccatgtggtgtttgatgccagcggctctcggatggcatggacgcttatcgagcagcttcagggtggcagctacaagaagattggctactatgacagcaccaaggatgatctttcctggtccaaaacagataaatggattggagggtcccccccagctgaccagaccctggtcatcaagacattccgcttcctgtcacagaaactctttatctccgtctcagttctctccagcctgggcattgtcctagctgttgtctgtctgtcctttaacatctacaactcacatgtccgttatatccagaactcacagcccaacctgaacaacctgactgctgtgggctgctcactggctttagctgctgtcttccccctggggctcgatggttaccacattgggaggaaccagtttcctttcgtctgccaggcccgcctctggctcctgggcctgggctttagtctgggctacggttccatgttcaccaagatttggtgggtccacacggtcttcacaaagaaggaagaaaagaaggagtggaggaagactctggaaccctggaagctgtatgccacagtgggcctgctggtgggcatggatgtcctcactctcgccatctggcagatcgtggaccctctgcaccggaccattgagacatttgccaaggaggaacctaaggaagatattgacgtctctattctgccccagctggagcattgcagctccaggaagatgaatacatggcttggcattttctatggttacaaggggctgctgctgctgctgggaatcttccttgcttatgagaccaagagtgtgtccactgagaagatcaatgatcaccgggctgtgggcatggctatctacaatgtggcagtcctgtgcctcatcactgctcctgtcaccatgattctgtccagccagcaggatgcagcctttgcctttgcctctcttgccatagttttctcctcctatatcactcttgttgtgctctttgtgcccaagatgcgcaggctgatcacccgaggggaatggcagtcggaggcgcaggacaccatgaagacagggtcatcgaccaacaacaacgaggaggagaagtcccggctgttggagaaggagaaccgtgaactggaaaagatcattgctgagaaagaggagcgtgtctctgaactgcgccatcaactccagtctcggcagcagctccgctcccggcgccacccaccgacacccccagaaccctctgggggcctgcccaggggaccccctgagccccccgaccggcttagctgtgatgggagtcgagtgcatttgctttataagtgagggtagggtgagggaggacaggccagtagggggagggaaagggagaggggaagggcaggggactcaggaagcagggggtccccatccccagctgggaagaacatgctatccaatctcatctcttgtaaatacatgtccccctgtgagttctgggctgatttgggtctctcatacctctgggaaacagacctttttctctcttactgcttcatgtaattttgtatcacctcttcacaatttagttcgtacctggcttgaagctgctcactgctcacacgctgcctcctcagcagcctcactgcatctttctcttcccatgcaacaccctcttctagttaccacggcaacccctgcagctcctctgcctttgtgctctgttcctgtccagcaggggtctcccaacaagtgctctttccaccccaaaggggcctctccttttctccactgtcataatctctttccatcttacttgcccttctatactttctcacatgtggctccccctgaattttgcttcctttgggagctcattcttttcgccaaggctcacatgctccttgcctctgctctgtgcactcacgctcagcacacatgcatcctcccctctcctgcgtgtgcccactgaacatgctcatgtgtacacacgcttttcccgtatgctttcttcatgttcagtcacatgtgctctcgggtgccctgcattcacagctacgtgtgcccctctcatggtcatgggtctgcccttgagcgtgtttgggtaggcatgtgcaatttgtctagcatgctgagtcatgtctttcctatttgcacacgtccatgtttatccatgtactttccctgtgtaccctccatgtaccttgtgtactttcttcccttaaatcatggtattcttctgacagagccatatgtaccctaccctgcacattgttatgcacttttccccaattcatgtttggtggggccatccacaccctctccttgtcacagaatctccatttctgctcagattccccccatctccattgcattcatgtactaccctcagtctacactcacaatcatcttctcccaagactgctcccttttgttttgtgtttttttgaggggaattaaggaaaaataagtgggggcaggtttggagagctgcttccagtggatagttgatgagaatcctgaccaaaggaaggcacccttgactgttgggatagacagatggacctatggggtgggaggtggtgtccctttcacactgtggtgtctcttggggaaggatctccccgaatctcaataaaccagtgaacagtgtgactcggca

SEQ ID NO: 13051 - protein, 961 aa, Homo sapiens; identical to SEQ ID NO: 1342

SEQ ID NO: 13052 - DNA, 4326 bp, Homo sapiens
cccttgcaccctccttcttccctccgcccgggagctctccctggtccccggcgccgcctccttccctcccggctccccgctccccgctcccgtggctgccgccgccccggggaagaagagacaggggtggggtttgggggaagcgagagaggaggggagagaccctggccaggctggagcctggattcgaggggaggagggacgggaggaggagaaaggtggaggagaagggaggggggagcggggaggagcggccgggcctggggccttgaggcccggggagagccggggagccgggcccgcgcgccgagatgttgctgctgctgctactggcgccactcttcctccgccccccgggcgcgggcggggcgcagacccccaacgccacctcagaaggttgccagatcatacacccgccctgggaagggggcatcaggtaccggggcctgactcgggaccaggtgaaggctatcaacttcctgccagtggactatgagattgagtatgtgtgccggggggagcgcgaggtggtggggcccaaggtccgcaagtgcctggccaacggctcctggacagatatggacacacccagccgctgtgtgaatcgaacgccacactcagaacggcgcgcagtgtacatcggggcactgtttcccatgagcgggggctggccagggggccaggcctgccagcccgcggtggagatggcgctggaggacgtgaatagccgcagggacatcctgccggactatgagctcaagctcatccaccacgacagcaagtgtgatccaggccaagccaccaagtacctatatgagctgctctacaacgaccctatcaagatcatccttatgcctggctgcagctctgtctccacgctggtggctgaggctgctaggatgtggaacctcattgtgctttcctatggctccagctcaccagccctgtcaaaccggcagcgtttccccactttcttccgaacgcacccatcagccacactccacaaccctacccgcgtgaaactctttgaaaagtggggctggaagaagattgctaccatccagcagaccactgaggtcttcacttcgactctggacgacctggaggaacgagtgaaggaggctggaattgagattactttccgccagagtttcttctcagatccagctgtgcccgtcaaaaacctgaagcgccaggatgcccgaatcatcgtgggacttttctatgagactgaagcccggaaagttttttgtgaggtgtacaaggagcgtctctttgggaagaagtacgtctggttcctcattgggtggtatgctgacaattggttcaagatctacgacccttctatcaactgcacagtggatgagatgactgaggcggtggagggccacatcacaactgagattgtcatgctgaatcctgccaatacccgcagcatttccaacatgacatcccaggaatttgtggagaaactaaccaagcgactgaaaagacaccctgaggagacaggaggcttccaggaggcaccgctggcctatgatgccatctgggccttggcactggccctgaacaagacatctggaggaggcggccgttctggtgtgcgcctggaggacttcaactacaacaaccagaccattaccgaccaaatctaccgggcaatgaactcttcgtcctttgagggtgtctctggccatgtggtgtttgatgccagcggctctcggatggcatggacgcttatcgagcagcttcagggtggcagctacaagaagattggctactatgacagcaccaaggatgatctttcctggtccaaaacagataaatggattggagggtcccccccagctgaccagaccctggtcatcaagacattccgcttcctgtcacagaaactctttatctccgtctcagttctctccagcctgggcattgtcctagctgttgtctgtctgtcctttaacatctacaactcacatgtccgttatatccagaactcacagcccaacctgaacaacctgactgctgtgggctgctcactggctttagctgctgtcttccccctggggctcgatggttaccacattgggaggaaccagtttcctttcgtctgccaggcccgcctctggctcctgggcctgggctttagtctgggctacggttccatgttcaccaagatttggtgggtccacacggtcttcacaaagaaggaagaaaagaaggagtggaggaagactctggaaccctggaagctgtatgccacagtgggcctgctggtgggcatggatgtcctcactctcgccatctggcagatcgtggaccctctgcaccggaccattgagacatttgccaaggaggaacctaaggaagatattgacgtctctattctgccccagctggagcattgcagctccaggaagatgaatacatggcttggcattttctatggttacaaggggctgctgctgctgctgggaatcttccttgcttatgagaccaagagtgtgtccactgagaagatcaatgatcaccgggctgtgggcatggctatctacaatgtggcagtcctgtgcctcatcactgctcctgtcaccatgattctgtccagccagcaggatgcagcctttgcctttgcctctcttgccatagttttctcctcctatatcactcttgttgtgctctttgtgcccaagatgcgcaggctgatcacccgaggggaatggcagtcggaggcgcaggacaccatgaagacagggtcatcgaccaacaacaacgaggaggagaagtcccggctgttggagaaggagaaccgtgaactggaaaagatcattgctgagaaagaggagcgtgtctctgaactgcgccatcaactccagtctcggcagcagctccgctcccggcgccacccaccgacacccccagaaccctctgggggcctgcccaggggaccccctgagccccccgaccggcttagctgtgatgggagtcgagtgcatttgctttataagtgagggtagggtgagggaggacaggccagtagggggagggaaagggagaggggaagggcaggggactcaggaagcagggggtccccatccccagctgggaagaacatgctatccaatctcatctcttgtaaatacatgtccccctgtgagttctgggctgatttgggtctctcatacctctgggaaacagacctttttctctcttactgcttcatgtaattttgtatcacctcttcacaatttagttcgtacctggcttgaagctgctcactgctcacacgctgcctcctcagcagcctcactgcatctttctcttcccatgcaacaccctcttctagttaccacggcaacccctgcagctcctctgcctttgtgctctgttcctgtccagcaggggtctcccaacaagtgctctttccaccccaaaggggcctctccttttctccactgtcataatctctttccatcttacttgcccttctatactttctcacatgtggctccccctgaattttgcttcctttgggagctcattcttttcgccaaggctcacatgctccttgcctctgctctgtgcactcacgctcagcacacatgcatcctcccctctcctgcgtgtgcccactgaacatgctcatgtgtacacacgcttttcccgtatgctttcttcatgttcagtcacatgtgctctcgggtgccctgcattcacagctacgtgtgcccctctcatggtcatgggtctgcccttgagcgtgtttgggtaggcatgtgcaatttgtctagcatgctgagtcatgtctttcctatttgcacacgtccatgtttatccatgtactttccctgtgtaccctccatgtaccttgtgtactttcttcccttaaatcatggtattcttctgacagagccatatgtaccctaccctgcacattgttatgcacttttccccaattcatgtttggtggggccatccacaccctctccttgtcacagaatctccatttctgctcagattccccccatctccattgcattcatgtactaccctcagtctacactcacaatcatcttctcccaagactgctcccttttgttttgtgtttttttgaggggaattaaggaaaaataagtgggggcaggtttggagagctgcttccagtggatagttgatgagaatcctgaccaaaggaaggcacccttgactgttgggatagacagatggacctatggggtgggaggtggtgtccctttcacactgtggtgtctcttggggaaggatctccccgaatctcaataaaccagtgaacagtgtgactcggca

SEQ ID NO: 13053 - protein, 899 aa, Homo sapiens
MLLLLLLAPLFLRPPGAGGAQTPNATSEGCQIIHPPWEGGIRYRGLTRDQVKAINFLPVDYEIEYVCRGEREVVGPKVRKCLANGSWTDMDTPSRCVNRTPHSERRAVYIGALFPMSGGWPGGQACQPAVEMALEDVNSRRDILPDYELKLIHHDSKCDPGQATKYLYELLYNDPIKIILMPGCSSVSTLVAEAARMWNLIVLSYGSSSPALSNRQRFPTFFRTHPSATLHNPTRVKLFEKWGWKKIATIQQTTEVFTSTLDDLEERVKEAGIEITFRQSFFSDPAVPVKNLKRQDARIIVGLFYETEARKVFCEVYKERLFGKKYVWFLIGWYADNWFKIYDPSINCTVDEMTEAVEGHITTEIVMLNPANTRSISNMTSQEFVEKLTKRLKRHPEETGGFQEAPLAYDAIWALALALNKTSGGGGRSGVRLEDFNYNNQTITDQIYRAMNSSSFEGVSGHVVFDASGSRMAWTLIEQLQGGSYKKIGYYDSTKDDLSWSKTDKWIGGSPPADQTLVIKTFRFLSQKLFISVSVLSSLGIVLAVVCLSFNIYNSHVRYIQNSQPNLNNLTAVGCSLALAAVFPLGLDGYHIGRNQFPFVCQARLWLLGLGFSLGYGSMFTKIWWVHTVFTKKEEKKEWRKTLEPWKLYATVGLLVGMDVLTLAIWQIVDPLHRTIETFAKEEPKEDIDVSILPQLEHCSSRKMNTWLGIFYGYKGLLLLLGIFLAYETKSVSTEKINDHRAVGMAIYNVAVLCLITAPVTMILSSQQDAAFAFASLAIVFSSYITLVVLFVPKMRRLITRGEWQSEAQDTMKTGSSTNNNEEEKSRLLEKENRELEKIIAEKEERVSELRHQLQSRQQLRSRRHPPTPPEPSGGLPRGPPEPPDRLSCDGSRVHLLYK

SEQ ID NO: 13054 - DNA, 750 bp, Homo sapiens
gcacaaagtgctttgggggcaaagaagggaacacagttcactgctggcgtgattgggtggacctcactgaagaggtggcatttgaatactgaaggacaaataggattttatcagctagagaaatagaggaaggctacttcaggggcatagggagcatcgtgtggctagaaaatacatgaaagagagtagatgaagagaaagtgagtagttcagcatggctggagcgtggggtaggtgtggggctgggagatgagcctagctggacaggtggatgggagcatgttgtgaagggtctgtgtcatatccagaagtgttcaggctataacttatagatattggggagtggttggaggtttttggccactaaagccaggaggttttagcaagatcaccctggtggtgtggaagtagagggtggatgggaggaattgttcaaggtggggagactgctctcctcctgccgctccccgtcctgctcacattttcgcatcctccctgtgccaccatgagctccctgcccgtgctccctgcccactctcccttagggttctgcccatccttactgcagtcccggctactactctaccctgttctgcctgtgccctctcttcctttctaggcccgcctctggctcctgggcctgggctttagtctgggctacggttccatgttcaccaagatttggtgggtccacacggtcttcacaaagaaggaagaaaagaaggagtggaggaagactctggaaccctg

SEQ ID NO: 13055 - protein, 66 aa, Homo sapiens
MGGIVQGGETALLLPLPVLLTFSHPPCATMSSLPVLPAHSPLGFCPSLLQSRLLLYPVLPVPSLPF

SEQ ID NO: 13056 - DNA, 1802 bp, Homo sapiens
cccttgcaccctccttcttccctccgcccgggagctctccctggtccccggcgccgcctccttccctcccggctccccgctccccgctcccgtggctgccgccgccccggggaagaagagacaggggtggggtttgggggaagcgagagaggaggggagagaccctggccaggctggagcctggattcgaggggaggagggacgggaggaggagaaaggtggaggagaagggaggggggagcggggaggagcggccgggcctggggccttgaggcccggggagagccggggagccgggcccgcgcgccgagatgttgctgctgctgctactggcgccactcttcctccgccccccgggcgcgggcggggcgcagacccccaacgccacctcagaaggttgccagatcatacacccgccctgggaagggggcatcaggtaccggggcctgactcgggaccaggtgaaggctatcaacttcctgccagtggactatgagattgagtatgtgtgccggggggagcgcgaggtggtggggcccaaggtccgcaagtgcctggccaacggctcctggacagatatggacacacccagccgctgtgtccgaatctgctccaagtcttatttgaccctggaaaatgggaaggttttcctgacgggtggggacctcccagctctggacggagcccgggtggatttccggtgtgaccccgacttccatctggtgggcagctcccggagcatctgtagtcagggccagtggagcacccccaagccccactgccagggtgaggggaacagctgcctgcatgcagctgatgaggacgcttgtgtgaggatgggagtggggtgggaatggataatgggaaagaatggagagctataaaaatgtgggggaggacactggaaaggggagatgaaagtccctttttcctccatcacctgcctcaaacttcctcttgcagtccccggtatcctctgtaggttgggggcttccttcctttaccttttaaaaaaatcttcctgctcccgattcttagacctcacgttttctcttttcctttatgaatctcacctctctcaccttcttcaggtttaaatactccaattttccctttctctaaacttagaaatttccatgcatcaccctcttctagaattcatccctcaccattccttatataattgatttattgtaaagactcagaaataaatcaaacattctactaagaaaaattgagaaggggagctctgggggtggaaacatattagggtaaaagacttaaaattggaggcagcattatcagaagatgaagaacaactcagggatggggtgggaagaagacaggtccttttctgtacttcctagacaacctccattattccctaagggaatcagtgttgtgtctgtctacttttttttttttttttttgccacgtaattttacaaactctcccttttctaggcacccgaactctctgccatcttctctcctgggatgcagtcatcccatttgtatgcctcatacttcctctaccctggtagattctttcaagatccttgggctttactttcctcacataactcagttattctgcttctagtttaccattttattctggaaattgagagtcccatccaggggtggacttatgacactactgaaacttagacttcaaggttcctcacctacagggccctcttcctgtgctctaataatatagagggctcgatggatatgtgttcatatggtaacaggcttttgtaaaaattgcagaaataagattttaacagcaattgctt

SEQ ID NO: 13057 - protein, 190 aa, Homo sapiens [sequence omitted]

SEQ ID NO: 13058 - DNA, 993 bp, Homo sapiens
gggagagcacgacgtgcgcgcaccctctccccttgtccactgctgccgcctccttcttctgccgctcctggtgctgcttgtgtgctcgtttggagcggacctggtacctcttttgtgaagcggcagctgaggagactccggcgctcgccatggccgaagaaaagcccaaggaaggagtcaagactgagaacaacgatcatattaatttgaaggtggcggggcaggatggttctgtggtgcagtttaagattaagaggcatacaccacttagtaaactaatgaaagcctattgtgaacgacagttggaaatggaggatgaagatacaattgatgtgttccaacagcagacgggaggtgtctactgaaaagggaacctgcttctttactccagaactctgttctttaaagaccaagattacattctcaattagaaaactgcaatttgcttccaccacatcctgactactaccgtatagttttctctattctttcatttcccccttccccattcctttactgtacataaagtaactggtatatgtgcacaagcatattactttttttttttaaaactaaacagccaatggtatgttttgattgacatcaagtggagacggggcggaaaaatactgattctgtgaaaataccccctttctccattagtggcatgctcattcagctcttatctttatattccagtaagttattttgctctcactgttttaacaacaacaacaaaaaaacaacaacataaaaatccttgcataccttgttcaattggagaattttaatgtttttcatttatcattgtaaaaccaaggacaattttataacttttttgtacttagctgttacatgcagagcaatctgtctttaagtagggataaattactctaaaacaaaaaagaatcctagatagttttcccttcaagtcaagcgtcttgttgtttaaataaacttcttgtttaaaaaaaaaaaaagtaaaaaagaaaa

SEQ ID NO: 13059 - protein, 71 aa, Homo sapiens
MAEEKPKEGVKTENNDHINLKVAGQDGSVVQFKIKRHTPLSKLMKAYCERQLEMEDEDTIDVFQQQTGGVY

SEQ ID NO: 13060 - DNA, 1783 bp, Homo sapiens
ccttttgtgtgagtgcctggcaagggtgacgtggggctgtttctgcgggcacagctgcagcaattaccggagtggaggcagggcccaggcagcactgccctccaagatcttcccttgggcttttcagcagtaaggggacatgcaccccaagggcctccacttggcctgaccttgctgcgggggctctctgtccccaggaacagtagagatggcaagcttatcaagaccctctctgcccagctgcctctgctccttcctcctcctcctcctcctccaagtgtcttccagctatgcagggcagttcagagtgataggaccaagacaccctatccgggctctggtcggggatgaagtggaattgccatgtcgcatatctcctgggaagaacgctacaggcatggaggtggggtggtaccgcccccccttctctagggtggttcatctctacagaaatggcaaggaccaagatggagaccaggcacctgaatatcggggccggacagagctgctgaaagatgctattggtgagggaaaggtgactctcaggatccggaatgtaaggttctcagatgaaggaggtttcacctgcttcttccgagatcattcttaccaagaggaggcagcaatggaattgaaagtagaagatcctttctactgggtgagccctggagtgctggttctcctcgcggtgctgcctgtgctcctcctgcagatcactgttggcctcatcttcctctgcctgcagtacagactgagaggaaaacttcgagcagagatagagaatctccaccggacttttgagtcctttggtgttctaggaccccaggttaaggaaccaaaaaagacagggcaattccttgaagagctactcttccacctggaagccctctctggctaaggacaggcaggtgcccctctctccatcagaggacacctgtactggagagcaacacaggatggtctctgccatgaactggaggccaggaatctcctcactgaaaattacagtatggtaactttgcaaatggtggttgtttcttccaagactccagccctgattgcgcaaaactgaaaggcatgtgaagggaaggaagaggaagagtgcaaaacattgaagagagagctgagtgagctgaagagtgaggatatgagtagccccaacccaaacctggagatggggagaaacctacagaatactagccagagctcctccttgtcttggcagcctactagggacctggggaagcaaaaacgaaagctgggcaacatgcctgctttagaatgttttccttctacttacacatcttccacaggtctcagaatctttccttcctctcatccttttctcctatcttcatatctatcagagtatccactgtttattcaacaactactacttgatggtcagacacaaacaaacaagctaggtgctaattaataaagatacgagttttggccgggtgcggtggctcacgcctgtaatcccagcactttgggaggccgaggcgggcgaatcacgaggtcaggagttcaagaccagcctggccaacatggtgaaaccccatctctactaaaaatacaaacaattaactgagcatagtggtgggcacctataataccagctactccggaggctgaggcaggagaatcgcttgaacccaggaggcagaggttgcagtgagctgagatcgtgccactgcactctagccggagtgacagagtaagactctgtctcaaaaataaataaataaataaataaataaataaataaataaataaataa

SEQ ID NO: 13061 - protein, 229 aa, Homo sapiens; identical to SEQ ID NO: 1360

SEQ ID NO: 13062 - DNA, 1735 bp, Homo sapiens
ccttttgtgtgagtgcctggcaagggtgacgtggggctgtttctgcgggcacagctgcagcaattaccggagtggaggcagggcccaggcagcactgccctccaagatcttcccttgggcttttcagcagtaaggggacatgcaccccaagggcctccacttggcctgaccttgctgcgggggctctctgtccccaggaacagtagagatggcaagcttatcaagaccctctctgcccagctgcctctgctccttcctcctcctcctcctcctccaagtgtcttccagctatgcagggcagttcagagtgataggaccaagacaccctatccgggctctggtcggggatgaagtggaattgccatgtcgcatatctcctgggaagaacgctacaggcatggaggtggggtggtaccgcccccccttctctagggtggttcatctctacagaaatggcaaggaccaagatggagaccaggcacctgaatatcggggccggacagagctgctgaaagatgctattggtgagggaaaggtgactctcaggatccggaatgtaaggttctcagatgaaggaggtttcacctgcttcttccgagatcattcttaccaagaggaggcagcaatggaattgaaagtagaagatcctttctactgggtgagccctggagtgctggttctcctcgcggtgctgcctgtgctcctcctgcagatcactgttggcctcatcttcctctgcctgcagtacagactgagaggaaaacttcgagcagagatagagaatctccaccggacttttgggcaattccttgaagagctactcttccacctggaagccctctctggctaaggacaggcaggtgcccctctctccatcagaggacacctgtactggagagcaacacaggatggtctctgccatgaactggaggccaggaatctcctcactgaaaattacagtatggtaactttgcaaatggtggttgtttcttccaagactccagccctgattgcgcaaaactgaaaggcatgtgaagggaaggaagaggaagagtgcaaaacattgaagagagagctgagtgagctgaagagtgaggatatgagtagccccaacccaaacctggagatggggagaaacctacagaatactagccagagctcctccttgtcttggcagcctactagggacctggggaagcaaaaacgaaagctgggcaacatgcctgctttagaatgttttccttctacttacacatcttccacaggtctcagaatctttccttcctctcatccttttctcctatcttcatatctatcagagtatccactgtttattcaacaactactacttgatggtcagacacaaacaaacaagctaggtgctaattaataaagatacgagttttggccgggtgcggtggctcacgcctgtaatcccagcactttgggaggccgaggcgggcgaatcacgaggtcaggagttcaagaccagcctggccaacatggtgaaaccccatctctactaaaaatacaaacaattaactgagcatagtggtgggcacctataataccagctactccggaggctgaggcaggagaatcgcttgaacccaggaggcagaggttgcagtgagctgagatcgtgccactgcactctagccggagtgacagagtaagactctgtctcaaaaataaataaataaataaataaataaataaataaataaataaataa

SEQ ID NO: 13063 - protein, 213 aa, Homo sapiens; identical to SEQ ID NO: 1358

SEQ ID NO: 13064 - DNA, 1985 bp, Homo sapiens
ccttttgtgtgagtgcctggcaagggtgacgtggggctgtttctgcgggcacagctgcagcaattaccggagtggaggcagggcccaggcagcactgccctccaagatcttcccttgggcttttcagcagtaaggggacatgcaccccaagggcctccacttggcctgaccttgctgcgggggctctctgtccccaggaacagtagagatggcaagcttatcaagaccctctctgcccagctgcctctgctccttcctcctcctcctcctcctccaagtgtcttccagctatgcagggcagttcagagtgataggaccaagacaccctatccgggctctggtcggggatgaagtggaattgccatgtcgcatatctcctgggaagaacgctacaggcatggaggtggggtggtaccgcccccccttctctagggtggttcatctctacagaaatggcaaggaccaagatggagaccaggcacctgaatatcggggccggacagagctgctgaaagatgctattggtgagggaaaggtgactctcaggatccggaatgtaaggttctcagatgaaggaggtttcacctgcttcttccgagatcattcttaccaagaggaggcagcaatggaattgaaagtagaagatcctttctactgggtgagccctggagtgctggttctcctcgcggtgctgcctgtgctcctcctgcagatcactgttggcctcatcttcctctgcctgcagtacagactgagaggaaaacttcgagcagagatagagaatctccaccggacttttgggcaattccttgaagagctacgaaatcccttctgagtgatgtcacatcttggcaggggtggaggagagcctggttgcccagggatttgtccttggggacatctcatccatcaagttgcacactcactggcatctttgctatggggacattccaatttgcactttcaggaacactctgaattccaagtagaattgatttcccttcttctgtcatctaccttttctcttcattttcccatttttattacccttctttccatttctctctccagtcttccacctggaagccctctctggctaaggacaggcaggtgcccctctctccatcagaggacacctgtactggagagcaacacaggatggtctctgccatgaactggaggccaggaatctcctcactgaaaattacagtatggtaactttgcaaatggtggttgtttcttccaagactccagccctgattgcgcaaaactgaaaggcatgtgaagggaaggaagaggaagagtgcaaaacattgaagagagagctgagtgagctgaagagtgaggatatgagtagccccaacccaaacctggagatggggagaaacctacagaatactagccagagctcctccttgtcttggcagcctactagggacctggggaagcaaaaacgaaagctgggcaacatgcctgctttagaatgttttccttctacttacacatcttccacaggtctcagaatctttccttcctctcatccttttctcctatcttcatatctatcagagtatccactgtttattcaacaactactacttgatggtcagacacaaacaaacaagctaggtgctaattaataaagatacgagttttggccgggtgcggtggctcacgcctgtaatcccagcactttgggaggccgaggcgggcgaatcacgaggtcaggagttcaagaccagcctggccaacatggtgaaaccccatctctactaaaaatacaaacaattaactgagcatagtggtgggcacctataataccagctactccggaggctgaggcaggagaatcgcttgaacccaggaggcagaggttgcagtgagctgagatcgtgccactgcactctagccggagtgacagagtaagactctgtctcaaaaataaataaataaataaataaataaataaataaataaataaataa

SEQ ID NO: 13065 - protein, 208 aa, Homo sapiens; identical to SEQ ID NO: 1362

SEQ ID NO: 13066 - DNA, 1852 bp, Homo sapiens
ccttttgtgtgagtgcctggcaagggtgacgtggggctgtttctgcgggcacagctgcagcaattaccggagtggaggcagggcccaggcagcactgccctccaagatcttcccttgggcttttcagcagtaaggggacatgcaccccaagggcctccacttggcctgaccttgctgcgggggctctctgtccccaggaacagtagagatggcaagcttatcaagaccctctctgcccagctgcctctgctccttcctcctcctcctcctcctccaagtgtcttccagctatgcagggcagttcagagtgataggaccaagacaccctatccgggctctggtcggggatgaagtggaattgccatgtcgcatatctcctgggaagaacgctacaggcatggaggtggggtggtaccgcccccccttctctagggtggttcatctctacagaaatggcaaggaccaagatggagaccaggcacctgaatatcggggccggacagagctgctgaaagatgctattggtgagggaaaggtgactctcaggatccggaatgtaaggttctcagatgaaggaggtttcacctgcttcttccgagatcattcttaccaagaggaggcagcaatggaattgaaagtagaagatcctttctactgggtgagccctggagtgctggttctcctcgcggtgctgcctgtgctcctcctgcagatcactgttggcctcatcttcctctgcctgcagtacagactgagaggaaaacttcgagcagagatagagaatctccaccggacttttgatccccactttctgagggtgccctgctggaagataaccctgtttgtaattgtgccggttcttggacccttggttgccttgatcatctgctacaactggctacatcgaagactagcagggcaattccttgaagagctactcttccacctggaagccctctctggctaaggacaggcaggtgcccctctctccatcagaggacacctgtactggagagcaacacaggatggtctctgccatgaactggaggccaggaatctcctcactgaaaattacagtatggtaactttgcaaatggtggttgtttcttccaagactccagccctgattgcgcaaaactgaaaggcatgtgaagggaaggaagaggaagagtgcaaaacattgaagagagagctgagtgagctgaagagtgaggatatgagtagccccaacccaaacctggagatggggagaaacctacagaatactagccagagctcctccttgtcttggcagcctactagggacctggggaagcaaaaacgaaagctgggcaacatgcctgctttagaatgttttccttctacttacacatcttccacaggtctcagaatctttccttcctctcatccttttctcctatcttcatatctatcagagtatccactgtttattcaacaactactacttgatggtcagacacaaacaaacaagctaggtgctaattaataaagatacgagttttggccgggtgcggtggctcacgcctgtaatcccagcactttgggaggccgaggcgggcgaatcacgaggtcaggagttcaagaccagcctggccaacatggtgaaaccccatctctactaaaaatacaaacaattaactgagcatagtggtgggcacctataataccagctactccggaggctgaggcaggagaatcgcttgaacccaggaggcagaggttgcagtgagctgagatcgtgccactgcactctagccggagtgacagagtaagactctgtctcaaaaataaataaataaataaataaataaataaataaataaataaataa

SEQ ID NO: 13067 - protein, 252 aa, Homo sapiens; identical to SEQ ID NO: 1354

SEQ ID NO: 13068 - DNA, 2552 bp, Homo sapiens
ccttttgtgtgagtgcctggcaagggtgacgtggggctgtttctgcgggcacagctgcagcaattaccggagtggaggcagggcccaggcagcactgccctccaagatcttcccttgggcttttcagcagtaaggggacatgcaccccaagggcctccacttggcctgaccttgctgcgggggctctctgtccccaggaacagtagagatggcaagcttatcaagaccctctctgcccagctgcctctgctccttcctcctcctcctcctcctccaagtgtcttccagctatgcagggcagttcagagtgataggaccaagacaccctatccgggctctggtcggggatgaagtggaattgccatgtcgcatatctcctgggaagaacgctacaggcatggaggtggggtggtaccgcccccccttctctagggtggttcatctctacagaaatggcaaggaccaagatggagaccaggcacctgaatatcggggccggacagagctgctgaaagatgctattggtgagggaaaggtgactctcaggatccggaatgtaaggttctcagatgaaggaggtttcacctgcttcttccgagatcattcttaccaagaggaggcagcaatggaattgaaagtagaagatcctttctactgggtgagccctggagtgctggttctcctcgcggtgctgcctgtgctcctcctgcagatcactgttggcctcatcttcctctgcctgcagtacagactgagaggaaaacttcgagcagagatagagaatctccaccggacttttgatccccactttctgagggtgccctgctggaagataaccctgtttgtaattgtgccggttcttggacccttggttgccttgatcatctgctacaactggctacatcgaagactagcagggcaattccttgaagagctacgtaagttctcttctctctgttataagcagagaataaaaagccaggaaagggagacagaagcaacaagaggaagaggcgggctattgagggatcacattcccagaggaaaggaggagctggagagcctgggtggagggaagactcctcctgggaggtagagggcaaagaagccagctgttagagacacatttacaggtggcagagaagctggaggcactcctatctgccacctgatccattcctccttcactgcccctaagcaggaatccaaccctagctggtctcattgcccattccacagcaactgcccagtgcctcacctctcagatcaaccattgaggcaggaatggagacaagatgaccccaagggcttttcttctccctagttcaatggttttatgatacaaactactgacatacgtttttcaagttattttctccttcttctaggaaatcccttctgagtgatgtcacatcttggcaggggtggaggagagcctggttgcccagggatttgtccttggggacatctcatccatcaagttgcacactcactggcatctttgctatggggacattccaatttgcactttcaggaacactctgaattccaagtagaattgatttcccttcttctgtcatctaccttttctcttcattttcccatttttattacccttctttccatttctctctccagtcttccacctggaagccctctctggctaaggacaggcaggtgcccctctctccatcagaggacacctgtactggagagcaacacaggatggtctctgccatgaactggaggccaggaatctcctcactgaaaattacagtatggtaactttgcaaatggtggttgtttcttccaagactccagccctgattgcgcaaaactgaaaggcatgtgaagggaaggaagaggaagagtgcaaaacattgaagagagagctgagtgagctgaagagtgaggatatgagtagccccaacccaaacctggagatggggagaaacctacagaatactagccagagctcctccttgtcttggcagcctactagggacctggggaagcaaaaacgaaagctgggcaacatgcctgctttagaatgttttccttctacttacacatcttccacaggtctcagaatctttccttcctctcatccttttctcctatcttcatatctatcagagtatccactgtttattcaacaactactacttgatggtcagacacaaacaaacaagctaggtgctaattaataaagatacgagttttggccgggtgcggtggctcacgcctgtaatcccagcactttgggaggccgaggcgggcgaatcacgaggtcaggagttcaagaccagcctggccaacatggtgaaaccccatctctactaaaaatacaaacaattaactgagcatagtggtgggcacctataataccagctactccggaggctgaggcaggagaatcgcttgaacccaggaggcagaggttgcagtgagctgagatcgtgccactgcactctagccggagtgacagagtaagactctgtctcaaaaataaataaataaataaataaataaataaataaataaataaataa

SEQ ID NO: 13069 - protein, 295 aa, Homo sapiens
MASLSRPSLPSCLCSFLLLLLLQVSSSYAGQFRVIGPRHPIRALVGDEVELPCRISPGKNATGMEVGWYRPPFSRVVHLYRNGKDQDGDQAPEYRGRTELLKDAIGEGKVTLRIRNVRFSDEGGFTCFFRDHSYQEEAAMELKVEDPFYWVSPGVLVLLAVLPVLLLQITVGLIFLCLQYRLRGKLRAEIENLHRTFDPHFLRVPCWKITLFVIVPVLGPLVALIICYNWLHRRLAGQFLEELRKFSSLCYKQRIKSQERETEATRGRGGLLRDHIPRGKEELESLGGGKTPPGR

SEQ ID NO: 13070 - DNA, 2137 bp, Homo sapiens
ccttttgtgtgagtgcctggcaagggtgacgtggggctgtttctgcgggcacagctgcagcaattaccggagtggaggcagggcccaggcagcactgccctccaagatcttcccttgggcttttcagcagtaaggggacatgcaccccaagggcctccacttggcctgaccttgctgcgggggctctctgtccccaggaacagtagagatggcaagcttatcaagaccctctctgcccagctgcctctgctccttcctcctcctcctcctcctccaagtgtcttccagctatgcagggcagttcagagtgataggaccaagacaccctatccgggctctggtcggggatgaagtggaattgccatgtcgcatatctcctgggaagaacgctacaggcatggaggtggggtggtaccgcccccccttctctagggtggttcatctctacagaaatggcaaggaccaagatggagaccaggcacctgaatatcggggccggacagagctgctgaaagatgctattggtgagggaaaggtgactctcaggatccggaatgtaaggttctcagatgaaggaggtttcacctgcttcttccgagatcattcttaccaagaggaggcagcaatggaattgaaagtagaagatcctttctactgggtgagccctggagtgctggttctcctcgcggtgctgcctgtgctcctcctgcagatcactgttggcctcatcttcctctgcctgcagtacagactgagaggaaaacttcgagcagagatagagaatctccaccggacttttgatccccactttctgagggtgccctgctggaagataaccctgtttgtaattgtgccggttcttggacccttggttgccttgatcatctgctacaactggctacatcgaagactagcagggcaattccttgaagagctacgaaatcccttctgagtgatgtcacatcttggcaggggtggaggagagcctggttgcccagggatttgtccttggggacatctcatccatcaagttgcacactcactggcatctttgctatggggacattccaatttgcactttcaggaacactctgaattccaagtagaattgatttcccttcttctgtcatctaccttttctcttcattttcccatttttattacccttctttccatttctctctccagtcttccacctggaagccctctctggctaaggacaggcaggtgcccctctctccatcagaggacacctgtactggagagcaacacaggatggtctctgccatgaactggaggccaggaatctcctcactgaaaattacagtatggtaactttgcaaatggtggttgtttcttccaagactccagccctgattgcgcaaaactgaaaggcatgtgaagggaaggaagaggaagagtgcaaaacattgaagagagagctgagtgagctgaagagtgaggatatgagtagccccaacccaaacctggagatggggagaaacctacagaatactagccagagctcctccttgtcttggcagcctactagggacctggggaagcaaaaacgaaagctgggcaacatgcctgctttagaatgttttccttctacttacacatcttccacaggtctcagaatctttccttcctctcatccttttctcctatcttcatatctatcagagtatccactgtttattcaacaactactacttgatggtcagacacaaacaaacaagctaggtgctaattaataaagatacgagttttggccgggtgcggtggctcacgcctgtaatcccagcactttgggaggccgaggcgggcgaatcacgaggtcaggagttcaagaccagcctggccaacatggtgaaaccccatctctactaaaaatacaaacaattaactgagcatagtggtgggcacctataataccagctactccggaggctgaggcaggagaatcgcttgaacccaggaggcagaggttgcagtgagctgagatcgtgccactgcactctagccggagtgacagagtaagactctgtctcaaaaataaataaataaataaataaataaataaataaataaataaataaaaaataataatacaagttttcataagcacacttct

SEQ ID NO: 13071 - protein, 247 aa, Homo sapiens; identical to SEQ ID NO: 1356

SEQ ID NO: 13072 - DNA, 1984 bp, Homo sapiens
gtgtgagtgcctggcaagggtgacgtggggctgtttctgcgggcacagctgcagcaattaccggagtggaggcagggcccaggcagcactgccctccaagatcttcccttgggcttttcagcagtaaggggacatgcaccccaagggcctccacttggcctgaccttgctgcgggggctctctgtccccaggaacagtagagatggcaagcttatcaagaccctctctgcccagctgcctctgctccttcctcctcctcctcctcctccaagtgtcttccagctatgcagggcagttcagagtgataggaccaagacaccctatccgggctctggtcggggatgaagtggaattgccatgtcgcatatctcctgggaagaacgctacaggcatggaggtggggtggtaccgcccccccttctctagggtggttcatctctacagaaatggcaaggaccaagatggagaccaggcacctgaatatcggggccggacagagctgctgaaagatgctattggtgagggaaaggtgactctcaggatccggaatgtaaggttctcagatgaaggaggtttcacctgcttcttccgagatcattcttaccaagaggaggcagcaatggaattgaaagtagaagtgtctcactctgtcacccaggattggttgcagtggcacgatcatggctcattgcagcctccacctcccaggctcaagtgatcctcctgactcagcctcttgaatagctgagaccacaggcttgtgtcaccatgcccagatcctttctactgggtgagccctggagtgctggttctcctcgcggtgctgcctgtgctcctcctgcagatcactgttggcctcatcttcctctgcctgcagtacagactgagaggaaaacttcgagcagagatagagaatctccaccggacttttgatccccactttctgagggtgccctgctggaagataaccctgtttgtaattgtgccggttcttggacccttggttgccttgatcatctgctacaactggctacatcgaagactagcagggcaattccttgaagagctactcttccacctggaagccctctctggctaaggacaggcaggtgcccctctctccatcagaggacacctgtactggagagcaacacaggatggtctctgccatgaactggaggccaggaatctcctcactgaaaattacagtatggtaactttgcaaatggtggttgtttcttccaagactccagccctgattgcgcaaaactgaaaggcatgtgaagggaaggaagaggaagagtgcaaaacattgaagagagagctgagtgagctgaagagtgaggatatgagtagccccaacccaaacctggagatggggagaaacctacagaatactagccagagctcctccttgtcttggcagcctactagggacctggggaagcaaaaacgaaagctgggcaacatgcctgctttagaatgttttccttctacttacacatcttccacaggtctcagaatctttccttcctctcatccttttctcctatcttcatatctatcagagtatccactgtttattcaacaactactacttgatggtcagacacaaacaaacaagctaggtgctaattaataaagatacgagttttggccgggtgcggtggctcacgcctgtaatcccagcactttgggaggccgaggcgggcgaatcacgaggtcaggagttcaagaccagcctggccaacatggtgaaaccccatctctactaaaaatacaaacaattaactgagcatagtggtgggcacctataataccagctactccggaggctgaggcaggagaatcgcttgaacccaggaggcagaggttgcagtgagctgagatcgtgccactgcactctagccggagtgacagagtaagactctgtctcaaaaataaataaataaataaataaataaataaataaataaataaataa

SEQ ID NO: 13073 - protein, 171 aa, Homo sapiens; identical to SEQ ID NO: 1364

SEQ ID NO: 13074 - DNA, 2234 bp, Homo sapiens
gtgtgagtgcctggcaagggtgacgtggggctgtttctgcgggcacagctgcagcaattaccggagtggaggcagggcccaggcagcactgccctccaagatcttcccttgggcttttcagcagtaaggggacatgcaccccaagggcctccacttggcctgaccttgctgcgggggctctctgtccccaggaacagtagagatggcaagcttatcaagaccctctctgcccagctgcctctgctccttcctcctcctcctcctcctccaagtgtcttccagctatgcagggcagttcagagtgataggaccaagacaccctatccgggctctggtcggggatgaagtggaattgccatgtcgcatatctcctgggaagaacgctacaggcatggaggtggggtggtaccgcccccccttctctagggtggttcatctctacagaaatggcaaggaccaagatggagaccaggcacctgaatatcggggccggacagagctgctgaaagatgctattggtgagggaaaggtgactctcaggatccggaatgtaaggttctcagatgaaggaggtttcacctgcttcttccgagatcattcttaccaagaggaggcagcaatggaattgaaagtagaagtgtctcactctgtcacccaggattggttgcagtggcacgatcatggctcattgcagcctccacctcccaggctcaagtgatcctcctgactcagcctcttgaatagctgagaccacaggcttgtgtcaccatgcccagatcctttctactgggtgagccctggagtgctggttctcctcgcggtgctgcctgtgctcctcctgcagatcactgttggcctcatcttcctctgcctgcagtacagactgagaggaaaacttcgagcagagatagagaatctccaccggacttttgatccccactttctgagggtgccctgctggaagataaccctgtttgtaattgtgccggttcttggacccttggttgccttgatcatctgctacaactggctacatcgaagactagcagggcaattccttgaagagctacgaaatcccttctgagtgatgtcacatcttggcaggggtggaggagagcctggttgcccagggatttgtccttggggacatctcatccatcaagttgcacactcactggcatctttgctatggggacattccaatttgcactttcaggaacactctgaattccaagtagaattgatttcccttcttctgtcatctaccttttctcttcattttcccatttttattacccttctttccatttctctctccagtcttccacctggaagccctctctggctaaggacaggcaggtgcccctctctccatcagaggacacctgtactggagagcaacacaggatggtctctgccatgaactggaggccaggaatctcctcactgaaaattacagtatggtaactttgcaaatggtggttgtttcttccaagactccagccctgattgcgcaaaactgaaaggcatgtgaagggaaggaagaggaagagtgcaaaacattgaagagagagctgagtgagctgaagagtgaggatatgagtagccccaacccaaacctggagatggggagaaacctacagaatactagccagagctcctccttgtcttggcagcctactagggacctggggaagcaaaaacgaaagctgggcaacatgcctgctttagaatgttttccttctacttacacatcttccacaggtctcagaatctttccttcctctcatccttttctcctatcttcatatctatcagagtatccactgtttattcaacaactactacttgatggtcagacacaaacaaacaagctaggtgctaattaataaagatacgagttttggccgggtgcggtggctcacgcctgtaatcccagcactttgggaggccgaggcgggcgaatcacgaggtcaggagttcaagaccagcctggccaacatggtgaaaccccatctctactaaaaatacaaacaattaactgagcatagtggtgggcacctataataccagctactccggaggctgaggcaggagaatcgcttgaacccaggaggcagaggttgcagtgagctgagatcgtgccactgcactctagccggagtgacagagtaagactctgtctcaaaaataaataaataaataaataaataaataaataaataaataaataa

SEQ ID NO: 13075 - protein, 171 aa, Homo sapiens; identical to SEQ ID NO: 1364

SEQ ID NO: 13076 - DNA, 768 bp, Homo sapiens
agtaaggggacatgcaccccaagggcctccacttggcctgaccttgctgcgggggctctctgtccccaggaacagtagagatggcaagcttatcaagaccctctctgcccagctgcctctgctccttcctcctcctcctcctcctccaagtgtcttccagctatgcagggcagttcagagtgataggaccaagacaccctatccgggctctggtcggggatgaagtggaattgccatgtcgcatatctcctgggaagaacgctacaggcatggaggtggggtggtaccgcccccccttctctagggtggttcatctctacagaaatggcaaggaccaagatggagaccaggcacctgaatatcggggccggacagagctgctgaaagatgctattggtgagggaaaggtgactctcaggatccggaatgtaaggttctcagatgaaggaggtttcacctgcttcttccgagatcattcttaccaagaggaggcagcaatggaattgaaagtagaaggtgagtagtgccatataatattaggtattaactgttgggtggccaagaacaattattctctcaactgagatgagatccctcaacccaaacatctcagtcctgggaatgatttccataaaaatgtacacatcaataaacagaaactcatgcttagggatgtctgttgcatcattattcagagtagcaaggaaattgggatcaaaatcaatgcctttgagtaggtaagtgacagaatgaacaatggtagccata

SEQ ID NO: 13077 - protein, 147 aa, Homo sapiens
MASLSRPSLPSCLCSFLLLLLLQVSSSYAGQFRVIGPRHPIRALVGDEVELPCRISPGKNATGMEVGWYRPPFSRVVHLYRNGKDQDGDQAPEYRGRTELLKDAIGEGKVTLRIRNVRFSDEGGFTCFFRDHSYQEEAAMELKVEGE

SEQ ID NO: 13078 - DNA, 1629 bp, Homo sapiens
atgtttgaacagctgaagccaatcgaacctgtacagaagacgctcccatgggtgggcgaggtagctgccaccctgcaggaagccatgaagagagattgctggagggaggcacgggtgaagaagaagccagtcacctttgaggatgtggcagtgaatttcacccaggaagagtgggactgtctagatgccagccagagggtcctttaccaggatgttatgtcggaaacctttaagaatctaacatctgtggccagaatctttctgcataagccagagctaatcaccaagcttgagcaagaagaggaacagtggagagagtttgtccatctcccaaacacagaaggcctttcagaaggcaagaagaaagagcttcgagaacaacatcccagtctgagagatgaggggactagtgatgacaaggtcttccttgcatgcagaggggccggccagtgccccctatctgccccagctgggactatggacaggacccgggtgcttcaagcatcccaggctgggccaccctttttttgctacacctgtggcaaatgtttcagcaggcgctcctacctctatagccaccagtttgttcacaatcccaagctgactaacagctgcagtcagtgtgggaagttgtttcggagccccaagtccctcagctatcacagacgcatgcatcttggggagaggcccttctgttgcacgctctgtgacaagacctactgtgatgcttctggactaagtcgtcaccgccgcgtccatctgggttaccggccccattcatgctctgtgtgtgggaagagcttccgggaccagtctgagctcaaacgccaccagaagatacaccaaaaccaggagccagtggatggaaaccaggagtgtactttgaggattccaggcacccaggctgaattccagacacccatcgccagaagccagaggtccatccaggggcttttggatgtgaaccatgcaccagtggccaggtcccaggaacccatatttagaactgagggtcctatggcccagaaccaggcatctgtacttaagaaccaagcacctgtgaccaggacccaggcacccatcactggaaccctctgtcaggatgccagatccaactctcatccagtgaagccctcaagactcaatgtcttctgttgcccccattgttctttgacttttagcaagaaatcctatctctccagacaccagaaggcccacctcacagagccgcccaactactgcttccattgcagcaagtctttcagctcattttccaggctggtcagacaccagcagacccactggaagcagaagagctacctttgccctatctgtgacctctcctttggggagaaagagggccttatggatcactggaggggctataaaggcaaggacctgtgccagagcagccaccataaatgccgggtgatcctgggccagtggcttggcttctctcatgatgtccccactatggctggggaggaatggaagcatggaggtgatcaatctccccccaggatccatacccccaggagaagaggcctaagagagaaggcctgcaaaggagacaaaacaaaggaggcagtgagcatcttgaaacataaataaatggcctttctgactgag

SEQ ID NO: 13079 - protein, 536 aa, Homo sapiens
MFEQLKPIEPVQKTLPWVGEVAATLQEAMKRDCWREARVKKKPVTFEDVAVNFTQEEWDCLDASQRVLYQDVMSETFKNLTSVARIFLHKPELITKLEQEEEQWREFVHLPNTEGLSEGKKKELREQHPSLRDEGTSDDKVFLACRGAGQCPLSAPAGTMDRTRVLQASQAGPPFFCYTCGKCFSRRSYLYSHQFVHNPKLTNSCSQCGKLFRSPKSLSYHRRMHLGERPFCCTLCDKTYCDASGLSRHRRVHLGYRPHSCSVCGKSFRDQSELKRHQKIHQNQEPVDGNQECTLRIPGTQAEFQTPIARSQRSIQGLLDVNHAPVARSQEPIFRTEGPMAQNQASVLKNQAPVTRTQAPITGTLCQDARSNSHPVKPSRLNVFCCPHCSLTFSKKSYLSRHQKAHLTEPPNYCFHCSKSFSSFSRLVRHQQTHWKQKSYLCPICDLSFGEKEGLMDHWRGYKGKDLCQSSHHKCRVILGQWLGFSHDVPTMAGEEWKHGGDQSPPRIHTPRRRGLREKACKGDKTKEAVSILKHK

SEQ ID NO: 13080 - DNA, 1976 bp, Homo sapiens
tccccgggagaccctgtgcccctaaatcgcggtccactgcgcgcgtcaggtttctagaagcagggtagaacagacggcagacacctagcccaggctggtgttgttactaaacaatggcagctggtgagccaagggtgaccagggccctgaactcggtggcccagctttgagggaagcaaaattgttctcaattgtggaagaggagaatttggacagcagaacaaaaaaggaagacagcctcttggagcagatacatttgtcacaggaagccacatcaaaccctggggcctttgctgggcctctccatctgcccagttactgggaggtagatagccccaggaaggaatccagtcaggcctgggcaccaggccaggagtggataaagctagaaagagacaccacagaagagaagatgtttgaacagctgaaccatgaagagagattgctggagggaggcacgggtgaagaagaagccagtcacctttgaggatgtggcagtgaatttcacccaggaagagtgggactgtctagatgccagccagagggtcctttaccaggatgttatgtcggaaacctttaagaatctaacatctgtggccagaatctttctgcataagccagagctaatcaccaagcttgagcaagaagaggaacagtggagagagtttgtccatctcccaaacacagaaggcctttcagaaggcaagaagaaagagcttcgagaacaacatcccagtctgagagatgaggggactagtgatgacaaggtcttccttgcatgcagaggggccggccagtgccccctatctgccccagctgggactatggacaggacccgggtgcttcaagcatcccaggctgggccaccctttttttgctacacctgtggcaaatgtttcagcaggcgctcctacctctatagccaccagtttgttcacaatcccaagctgactaacagctgcagtcagtgtgggaagttgtttcggagccccaagtccctcagctatcacagacgcatgcatcttggggagaggcccttctgttgcacgctctgtgacaagacctactgtgatgcttctggactaagtcgtcaccgccgcgtccatctgggttaccggccccattcatgctctgtgtgtgggaagagcttccgggaccagtctgagctcaaacgccaccagaagatacaccaaaaccaggagccagtggatggaaaccaggagtgtactttgaggattccaggcacccaggctgaattccagacacccatcgccagaagccagaggtccatccaggggcttttggatgtgaaccatgcaccagtggccaggtcccaggaacccatatttagaactgagggtcctatggcccagaaccaggcatctgtacttaagaaccaagcacctgtgaccaggacccaggcacccatcactggaaccctctgtcaggatgccagatccaactctcatccagtgaagccctcaagactcaatgtcttctgttgcccccattgttctttgacttttagcaagaaatcctatctctccagacaccagaaggcccacctcacagagccgcccaactactgcttccattgcagcaagtctttcagctcattttccaggctggtcagacaccagcagacccactggaagcagaagagctacctttgccctatctgtgacctctcctttggggagaaagagggccttatggatcactggaggggctataaaggcaaggacctgtgccagagcagccaccataaatgccgggtgatcctgggccagtggcttggcttctctcatgatgtccccactatggctggggaggaatggaagcatggaggtgatcaatctccccccaggatccatacccccaggagaagaggcctaagagagaaggcctgcaaaggagacaaaacaaaggaggcagtgagcatcttgaaacataaataaatggcctttctgactgag

SEQ ID NO: 13081 - protein, 508 aa, Homo sapiens
MKRDCWREARVKKKPVTFEDVAVNFTQEEWDCLDASQRVLYQDVMSETFKNLTSVARIFLHKPELITKLEQEEEQWREFVHLPNTEGLSEGKKKELREQHPSLRDEGTSDDKVFLACRGAGQCPLSAPAGTMDRTRVLQASQAGPPFFCYTCGKCFSRRSYLYSHQFVHNPKLTNSCSQCGKLFRSPKSLSYHRRMHLGERPFCCTLCDKTYCDASGLSRHRRVHLGYRPHSCSVCGKSFRDQSELKRHQKIHQNQEPVDGNQECTLRIPGTQAEFQTPIARSQRSIQGLLDVNHAPVARSQEPIFRTEGPMAQNQASVLKNQAPVTRTQAPITGTLCQDARSNSHPVKPSRLNVFCCPHCSLTFSKKSYLSRHQKAHLTEPPNYCFHCSKSFSSFSRLVRHQQTHWKQKSYLCPICDLSFGEKEGLMDHWRGYKGKDLCQSSHHKCRVILGQWLGFSHDVPTMAGEEWKHGGDQSPPRIHTPRRRGLREKACKGDKTKEAVSILKHK

SEQ ID NO: 13082 - DNA, 808 bp, Homo sapiens
ccgccgcgtccatctgggttaccggccccattcatgctctgtgtgtgggaagagcttccgggaccagtctgagctcaaacgccaccagaagatacaccaaaaccaggagccagtggatggaaaccaggagtgtactttgaggattccaggcacccaggctgaattccagacacccatcgccagaagccagaggtccatccaggggcttttggatgtgaaccatgcaccagtggccaggtcccaggaacccatatttagaactgagggtcctatggcccagaaccaggcatctgtacttaagaaccaagcacctgtgaccaggacccaggcacccatcactggaaccctctgtcaggatgccagatccaactctcatccagtgaagccctcaagactcaatgtcttctgttgcccccattgttctttgacttttacaagtctttcagctcattttccaggctggtcagacaccagcagacccactggaagcagaagagctacctttgccctatctgtgacctctcctttggggagaaagagggccttatggatcactggaggggctataaaggcaaggacctgtgccagagcagccaccataaatgccgggtgatcctgggccagtggcttggcttctctcatgatgtccccactatggctggggaggaatggaagcatggaggtgatcaatctccccccaggatccatacccccaggagaagaggcctaagagagaaggcctgcaaaggagacaaaacaaaggaggcagtgagcatcttgaaacataaataaatggcctttctgactg

SEQ ID NO: 13083 - protein, 113 aa, Homo sapiens
MAQNQASVLKNQAPVTRTQAPITGTLCQDARSNSHPVKPSRLNVFCCPHCSLTFTSLSAHFPGWSDTSRPTGSRRATFALSVTSPLGRKRALWITGGAIKARTCARAATINAG

SEQ ID NO: 13084 - DNA, 340 bp, Homo sapiens
tgggttggcagccgcttgagccactgcgaggaaagcaaagtctgggccatggagatgagcctagtcctgctgttcctgatccgcactgccctttttgcaccccagggagctgctgctggtaaatggtctccctctgttatccacggtgaagtgcagtggcatgatcatggttccctgcaacctcaaactcctggcctctagaggtccccctgcctcagtgtctggagtacctgggactacaggcaagtactcctgcgtccatctcaacctgggcatcgtgccaccaccttcaagaagagaaaaactaagtagtgctttgcaaaggggcagcagcatttct

SEQ ID NO: 13085 - protein, 59 aa, Homo sapiens
MIMVPCNLKLLASRGPPASVSGVPGTTGKYSCVHLNLGIVPPPSRREKLSSALQRGSSI

SEQ ID NO: 13086 - DNA, 1180 bp, Homo sapiens
aaagtcccacgcaccccgcgggactcatatttttcccagacgcggaggttggggtcatggcgccccgaagcctcctcctgctgctctcaggggccctggccctgaccgatacttgggcgggctcccactccttgaggtatttcagcaccgctgtgtcgcggcccggccgcggggagccccgctacatcgccgtggagtacgtagacgacacgcaattcctgcggttcgacagcgacgccgcgattccgaggatggagccgcgggagccgtgggtggagcaagaggggccgcagtattgggagtggaccacagggtacgccaaggccaacgcacagactgaccgagtggccctgaggaacctgctccgccgctacaaccagagcgaggctgggtctcacaccctccagggaatgaatggctgcgacatggggcccgacggacgcctcctccgcgggtatcaccagcacgcgtacgacggcaaggattacatctccctgaacgaggacctgcgctcctggaccgcggcggacaccgtggctcagatcacccagcgcttctatgaggcagaggaatatgcagaggagttcaggacctacctggagggcgagtgcctggagttgctccgcagatacttggagaatgggaaggagacgctacagcgcgcagatcctccaaaggcacacgttgcccaccaccccatctctgaccatgaggccaccctgaggtgctgggccctgggcttctaccctgcggagatcacgctgacctggcagcgggatggggaggaacagacccaggacacagagcttgtggagaccaggcctgcaggggatggaaccttccagaagtgggccgctgtggtggtgcctcctggagaggaacagagatacacatgccatgtgcagcacgaggggctgccccagcccctcatcctgagatgggagcagtctccccagcccaccatccccatcgtgggcatcgttgctggccttgttgtccttggagctgtggtcactggagctgtggtcgctgctgtgatgtggaggaagaagagctcagatagaaacagagggagctactctcaggctgcagtgtgagacagcttccttgtgtgggactgagaagcaagatatcaatgtagcagaattgcacttgtgcctcacgaacatacataaatttt

SEQ ID NO: 13087 - protein, 346 aa, Homo sapiens
MAPRSLLLLLSGALALTDTWAGSHSLRYFSTAVSRPGRGEPRYIAVEYVDDTQFLRFDSDAAIPRMEPREPWVEQEGPQYWEWTTGYAKANAQTDRVALRNLLRRYNQSEAGSHTLQGMNGCDMGPDGRLLRGYHQHAYDGKDYISLNEDLRSWTAADTVAQITQRFYEAEEYAEEFRTYLEGECLELLRRYLENGKETLQRADPPKAHVAHHPISDHEATLRCWALGFYPAEITLTWQRDGEEQTQDTELVETRPAGDGTFQKWAAVVVPPGEEQRYTCHVQHEGLPQPLILRWEQSPQPTIPIVGIVAGLVVLGAVVTGAVVAAVMWRKKSSDRNRGSYSQAAV

SEQ ID NO: 13088 - DNA, 1228 bp, Homo sapiens
aaagtcccacgcaccccgcgggactcatatttttcccagacgcggaggttggggtcatggcgccccgaagcctcctcctgctgctctcaggggccctggccctgaccgatacttgggcgggctcccactccttgaggtatttcagcaccgctgtgtcgcggcccggccgcggggagccccgctacatcgccgtggagtacgtagacgacacgcaattcctgcggttcgacagcgacgccgcgattccgaggatggagccgcgggagccgtgggtggagcaagaggggccgcagtattgggagtggaccacagggtacgccaaggccaacgcacagactgaccgagtggccctgaggaacctgctccgccgctacaaccagagcgaggctgggtctcacaccctccagggaatgaatggctgcgacatggggcccgacggacgcctcctccgcgggtatcaccagcacgcgtacgacggcaaggattacatctccctgaacgaggacctgcgctcctggaccgcggcggacaccgtggctcagatcacccagcgcttctatgaggcagaggaatatgcagaggagttcaggacctacctggagggcgagtgcctggagttgctccgcagatacttggagaatgggaaggagacgctacagcgcgcagatcctccaaaggcacacgttgcccaccaccccatctctgaccatgaggccaccctgaggtgctgggccctgggcttctaccctgcggagatcacgctgacctggcagcgggatggggaggaacagacccaggacacagagcttgtggagaccaggcctgcaggggatggaaccttccagaagtgggccgctgtggtggtgcctcctggagaggaacagagatacacatgccatgtgcagcacgaggggctgccccagcccctcatcctgagatgggagcagtctccccagcccaccatccccatcgtgggcatcgttgctggccttgttgtccttggagctgtggtcactggagctgtggtcgctgctgtgatgtggaggaagaagagctcagatagaaacagagggagctactctcaggctgcagtcactgacagtgcccagggctctggggtgtctctcacagctaataaagtgtgagacagcttccttgtgtgggactgagaagcaagatatcaatgtagcagaattgcacttgtgcctcacgaacatacataaatttt

SEQ ID NO: 13089 - protein, 362 aa, Homo sapiens [sequence omitted]

SEQ ID NO: 13090 - DNA, 1505 bp, Homo sapiens
aaagtcccacgcaccccgcgggactcatatttttcccagacgcggaggttggggtcatggcgccccgaagcctcctcctgctgctctcaggggccctggccctgaccgatacttgggcgggctcccactccttgaggtatttcagcaccgctgtgtcgcggcccggccgcggggagccccgctacatcgccgtggagtacgtagacgacacgcaattcctgcggttcgacagcgacgccgcgattccgaggatggagccgcgggagccgtgggtggagcaagaggggccgcagtattgggagtggaccacagggtacgccaaggccaacgcacagactgaccgagtggccctgaggaacctgctccgccgctacaaccagagcgaggctgggtctcacaccctccagggaatgaatggctgcgacatggggcccgacggacgcctcctccgcgggtatcaccagcacgcgtacgacggcaaggattacatctccctgaacgaggacctgcgctcctggaccgcggcggacaccgtggctcagatcacccagcgcttctatgaggcagaggaatatgcagaggagttcaggacctacctggagggcgagtgcctggagttgctccgcagatacttggagaatgggaaggagacgctacagcgcgcagatcctccaaaggcacacgttgcccaccaccccatctctgaccatgaggccaccctgaggtgctgggccctgggcttctaccctgcggagatcacgctgacctggcagcgggatggggaggaacagacccaggacacagagcttgtggagaccaggcctgcaggggatggaaccttccagaagtgggccgctgtggtggtgcctcctggagaggaacagagatacacatgccatgtgcagcacgaggggctgccccagcccctcatcctgagatgggagcagtctccccagcccaccatccccatcgtgggcatcgttgctggccttgttgtccttggagctgtggtcactggagctgtggtcgctgctgtgatgtggaggaagaagagctcagatagaaacagagggagctactctcaggctgcagcctactcagtggtcagcggaaacttgatgataacatggtggtcaagcttatttctcctgggggtgctcttccaaggatatttgggctgcctccggagtcacagtgtcttgggccgccggaaggtgggtgacatgtggatcttgttttttttgtggctgtggacatctttcaacactgccttcttggccttgcaaagccttcgctttggcttcggctttaggaggggcaggagcttccttcttcgttcttggcaccatcttatgaaaagggtccagattaagatttttgactgagtcattctaaagtaagttgcaagacccatgatactagaccactaaatacttcatcacacacctcctaagaataagaaccaacattatcacaccaaagaaaataaataattccataatatt

SEQ ID NO: 13091 - protein, 442 aa, Homo sapiens
MAPRSLLLLLSGALALTDTWAGSHSLRYFSTAVSRPGRGEPRYIAVEYVDDTQFLRFDSDAAIPRMEPREPWVEQEGPQYWEWTTGYAKANAQTDRVALRNLLRRYNQSEAGSHTLQGMNGCDMGPDGRLLRGYHQHAYDGKDYISLNEDLRSWTAADTVAQITQRFYEAEEYAEEFRTYLEGECLELLRRYLENGKETLQRADPPKAHVAHHPISDHEATLRCWALGFYPAEITLTWQRDGEEQTQDTELVETRPAGDGTFQKWAAVVVPPGEEQRYTCHVQHEGLPQPLILRWEQSPQPTIPIVGIVAGLVVLGAVVTGAVVAAVMWRKKSSDRNRGSYSQAAAYSVVSGNLMITWWSSLFLLGVLFQGYLGCLRSHSVLGRRKVGDMWILFFLWLWTSFNTAFLALQSLRFGFGFRRGRSFLLRSWHHLMKRVQIKIFD

SEQ ID NO: 13092 - DNA, 2636 bp, Homo sapiens
aaagtcccacgcaccccgcgggactcatatttttcccagacgcggaggttggggtcatggcgccccgaagcctcctcctgctgctctcaggggccctggccctgaccgatacttgggcgggctcccactccttgaggtatttcagcaccgctgtgtcgcggcccggccgcggggagccccgctacatcgccgtggagtacgtagacgacacgcaattcctgcggttcgacagcgacgccgcgattccgaggatggagccgcgggagccgtgggtggagcaagaggggccgcagtattgggagtggaccacagggtacgccaaggccaacgcacagactgaccgagtggccctgaggaacctgctccgccgctacaaccagagcgaggctgggtctcacaccctccagggaatgaatggctgcgacatggggcccgacggacgcctcctccgcgggtatcaccagcacgcgtacgacggcaaggattacatctccctgaacgaggacctgcgctcctggaccgcggcggacaccgtggctcagatcacccagcgcttctatgaggcagaggaatatgcagaggagttcaggacctacctggagggcgagtgcctggagttgctccgcagatacttggagaatgggaaggagacgctacagcgcgcagatcctccaaaggcacacgttgcccaccaccccatctctgaccatgaggccaccctgaggtgctgggccctgggcttctaccctgcggagatcacgctgacctggcagcgggatggggaggaacagacccaggacacagagcttgtggagaccaggcctgcaggggatggaaccttccagaagtgggccgctgtggtggtgcctcctggagaggaacagagatacacatgccatgtgcagcacgaggggctgccccagcccctcatcctgagatgggagcagtctccccagcccaccatccccatcgtgggcatcgttgctggccttgttgtccttggagctgtggtcactggagctgtggtcgctgctgtgatgtggaggaagaagagctcaggaaagttgactcatactggtgtccagtgaagaaacccaggcgcataagagggacagttggatctcaggtttgtgcttgatctggaaaaggaagagcagagaccactaggaggcaccactgcactgctcatgagcccaggaggtggatgccggggctgagctcagggtggagagatgtcattgctcatcctccaggttccaggtgaaaacccacctgcccagcccatctggttctccctggttcttcaattctagggaggactgtcttcttctcacctccccggacgatgcttcttgacacaggaaagaggatgtgctgctagggtcatcatgtcctggtttattgtgttgtcagtagaatgaaatcaaaatacatacttcataaataataaaataacccataataagtaaacatttacaatttactcacaccattgaggtttcctccaggtgtgagcacagctgcagacacaccttgtcgcttcagtcaggacacaggacagagtaaaatgggaagaaaccacagtcactgcagaaagggcccccatggaagaggcctggcagggaggccagctgccccagggccaccatatttagagatgacttcccctttctaggcaggactgggattttaaaattctttttgtattcatagttgttctgaaattgcaggatgatgagacccagcactggtgagttatactgtctctttcttccctattaaattctgtgccaaacagcaccttcatatatttatctcctcttcctggagagaataaaaacaatggaaaaattgaaccatacaaacatactttaaatatgtgctgtcagaagtagctactaaaggattaattccaccaaagtgagggaaggtttgaaaagaaaaacattgtatacccatattcaaagcagcattattcacgatagccaagacaacacacaccaacacatgaatgaagaaaatgtggtatatatcgacaacggaatatcattcagccttaagaaggaaacctggtcacaggctgcaacagggataaacctgaaggacactgctaagtaaaataatgtccaacgtcttgaaagaatcatacaaacaaaagagatatcaaacttaaattaatgagagttaataaaataaacaaaaacaaatgcaagtattaactccaagaagaaccaatgttgtacaggcagtgaaaagtagtccagttgacatatgagaggattagtcatggtaaaagaaacaagagatggctgaactaaacataatcactatataaatatactgggaagagtgaaagagaacaagtactcttaactgttgcatccaccattgcgctgtgcaacaatgggtgcatctgaaaaaaatcaagcaataataataaagaaatggtagttagagatacagaagtaaagtcaaaagaatcagctaaaaaacttgaaagtggttggcccctagaaaggcagaaattgagaagaggcagagaggactctcatttttctcaagagattctgcacaaatatttgactctttcaattgtgcacaattataaatttgattaaaataaaaacaaaagcttc

SEQ ID NO: 13093 - protein, 343 aa, Homo sapiens
MAPRSLLLLLSGALALTDTWAGSHSLRYFSTAVSRPGRGEPRYIAVEYVDDTQFLRFDSDAAIPRMEPREPWVEQEGPQYWEWTTGYAKANAQTDRVALRNLLRRYNQSEAGSHTLQGMNGCDMGPDGRLLRGYHQHAYDGKDYISLNEDLRSWTAADTVAQITQRFYEAEEYAEEFRTYLEGECLELLRRYLENGKETLQRADPPKAHVAHHPISDHEATLRCWALGFYPAEITLTWQRDGEEQTQDTELVETRPAGDGTFQKWAAVVVPPGEEQRYTCHVQHEGLPQPLILRWEQSPQPTIPIVGIVAGLVVLGAVVTGAVVAAVMWRKKSSGKLTHTGVQ

SEQ ID NO: 13094 - DNA, 1575 bp, Homo sapiens
cgcgggactcatatttttcccagacgcggaggttggggtcatggcgccccgaagcctcctcctgctgctctcaggggccctggccctgaccgatacttgggcgggtgagtgcggggtccagagagaaacggcctctgtggggaggagtgaggggcccgcccggtgggggcgcaggactcagggagccgcctccggaggagggtctggcgggtctcagcccctcctcgcccccaggctcccactccttgaggtatttcagcaccgctgtgtcgcggcccggccgcggggagccccgctacatcgccgtggagtacgtagacgacacgcaattcctgcggttcgacagcgacgccgcgattccgaggatggagccgcgggagccgtgggtggagcaagaggggccgcagtattgggagtggaccacagggtacgccaaggccaacgcacagactgaccgagtggccctgaggaacctgctccgccgctacaaccagagcgaggctggtgagtgaacccggccgggggcgcaggtcacgaccaccccccatccgccacggaccgcccgggtccctcagagtctccggatccgaaatctaccccgaggcagcgggacccgcccagaccctccacccgggagagtcccaggcgcctttacccaggttcattttcagtttaggccaaaatccccgcgggttgggcggggagggggcggggctagctgggcggggctgactgcggggaccggctagggtctcacaccctccagggaatgaatggctgcgacatggggcccgacggacgcctcctccgcgggtatcaccagcacgcgtacgacggcaaggattacatctccctgaacgaggacctgcgctcctggaccgcggcggacaccgtggctcagatcacccagcgcttctatgaggcagaggaatatgcagaggagttcaggacctacctggagggcgagtgcctggagttgctccgcagatacttggagaatgggaaggagacgctacagcgcgcagatcctccaaaggcacacgttgcccaccaccccatctctgaccatgaggccaccctgaggtgctgggccctgggcttctaccctgcggagatcacgctgacctggcagcgggatggggaggaacagacccaggacacagagcttgtggagaccaggcctgcaggggatggaaccttccagaagtgggccgctgtggtggtgcctcctggagaggaacagagatacacatgccatgtgcagcacgaggggctgccccagcccctcatcctgagatgggagcagtctccccagcccaccatccccatcgtgggcatcgttgctggccttgttgtccttggagctgtggtcactggagctgtggtcgctgctgtgatgtggaggaagaagagctcagatagaaacagagggagctactctcaggctgcagtgtgagacagcttccttgtgtgggactgagaagcaagatatcaatgtagcagaattgcacttgtgcctcacgaacatacataaattttaaaaataaagaataaaaatatatctttttatagata

SEQ ID NO: 13095 - protein, 228 aa, Homo sapiens
MNGCDMGPDGRLLRGYHQHAYDGKDYISLNEDLRSWTAADTVAQITQRFYEAEEYAEEFRTYLEGECLELLRRYLENGKETLQRADPPKAHVAHHPISDHEATLRCWALGFYPAEITLTWQRDGEEQTQDTELVETRPAGDGTFQKWAAVVVPPGEEQRYTCHVQHEGLPQPLILRWEQSPQPTIPIVGIVAGLVVLGAVVTGAVVAAVMWRKKSSDRNRGSYSQAAV

SEQ ID NO: 13096 - DNA, 486 bp, Homo sapiens
gggactcatatttttcccagacgcggagatcacgctgacctggcagcgggatggggaggaacagacccaggacacagagcttgtggagaccaggcctgcaggggatggaaccttccagaagtgggccgctgtggtggtgcctcctggagaggaacagagatacacatgccatgtgcagcacgaggggctgccccagcccctcatcctgagatgggagcagtctccccagcccaccatccccatcgtgggcatcgttgctggccttgttgtccttggagctgtggtcactggagctgtggtcgctgctgtgatgtggaggaagaagagctcagatagaaacagagggagctactctcaggctgcagtgtgagacagcttccttgtgtgggactgagaagcaagatatcaatgtagcagaattgcacttgtgcctcacgaacatacataaattttaaaaataaagaataaaaatatatctttttatag

SEQ ID NO: 13097 - protein, 56 aa, Homo sapiens
MPCAARGAAPAPHPEMGAVSPAHHPHRGHRCWPCCPWSCGHWSCGRCCDVEEEELR

SEQ ID NO: 13098 - DNA, 760 bp, Homo sapiens
gcccagaccctccacccgggagagtcccaggcgcctttacccagcacgcgtacgacggcaaggattacatctccctgaacgaggacctgcgctcctggaccgcggcggacaccgtggctcagatcacccagcgcttctatgaggcagaggaatatgcagaggagttcaggacctacctggagggcgagtgcctggagttgctccgcagatacttggagaatgggaaggagacgctacagcgcgcagatcctccaaaggcacacgttgcccaccaccccatctctgaccatgaggccaccctgaggtgctgggccctgggcttctaccctgcggagatcacgctgacctggcagcgggatggggaggaacagacccaggacacagagcttgtggagaccaggcctgcaggggatggaaccttccagaagtgggccgctgtggtggtgcctcctggagaggaacagagatacacatgccatgtgcagcacgaggggctgccccagcccctcatcctgagatgggagcagtctccccagcccaccatccccatcgtgggcatcgttgctggccttgttgtccttggagctgtggtcactggagctgtggtcgctgctgtgatgtggaggaagaagagctcagatagaaacagagggagctactctcaggctgcagtgtgagacagcttccttgtgtgggactgagaagcaagatatcaatgtagcagaattgcacttgtgcctcacgaacatacataaatttt

SEQ ID NO: 13099 - protein, 56 aa, Homo sapiens; identical to SEQ ID NO: 13097

SEQ ID NO: 13100 - DNA, 750 bp, Homo sapiens
cgcgtacgacggcaaggattacatctccctgaacgaggacctgcgctcctggaccgcggcggacaccgtggctcagatcacccagcgcttctatgaggcagaggaatatgcagaggagttcaggacctacctggagggcgagtgcctggagttgctccgcagatacttggagaatgggaaggagacgctacagcgcgcagatcctccaaaggcacacgttgcccaccaccccatctctgaccatgaggccaccctgaggtgctgggccctgggcttctaccctgcggagatcacgctgacctggcagcgggatggggaggaacagacccaggacacagagcttgtggagaccaggcctgcaggggatggaaccttccagaagtgggccgctgtggtggtgcctcctggagaggaacagagatacacatgccatgtgcagcacgaggggctgccccagcccctcatcctgagatgggagcagtctccccagcccaccatccccatcgtgggcatcgttgctggccttgttgtccttggagctgtggtcactggagctgtggtcgctgctgtgatgtggaggaagaagagctcagatagaaacagagggagctactctcaggctgcagtgtgagacagcttccttgtgtgggactgagaagcaagatatcaatgtagcagaattgcacttgtgcctcacgaacatacataaattttaaaaataaagaataaaaatatatctttttatagata

SEQ ID NO: 13101 - protein, 56 aa, Homo sapiens; identical to SEQ ID NO: 13097

SEQ ID NO: 13102 - DNA, 900 bp, Homo sapiens
gtgcctgaattttctgactcttctcagatcctccaaaggcacacgttgcccaccaccccatctctgaccatgaggccaccctgaggtgctgggccctgggcttctaccctgcggagatcacgctgacctggcagcgggatggggaggaacagacccaggacacagagcttgtggagaccaggcctgcaggggatggaaccttccagaagtgggccgctgtggtggtgcctcctggagaggaacagagatacacatgccatgtgcagcacgaggggctgccccagcccctcatcctgagatgggagcagtctccccagcccaccatccccatcgtgggcatcgttgctggccttgttgtccttggagctgtggtcactggagctgtggtcgctgctgtgatgtggaggaagaagagctcagatagaaacagagggagctactctcaggctgcaggtaagatgaaggaggctgatccctgagattgttgggatattgtggtcaggagcctatgagggagctcacccaccccacagttcctctagccacatctgtgggctctgaccaggtcctgtttttgttctaccccaatcactgacagtgcccagggctctggggtgtctctcacagctaataaaggtgacactccagggcaggggccctgatgtgagtggggtgttgggggggaacagaggggactcagctgtgctattgggtttctttgacttggatgtcttgagcatgaaatgggctatttagagtgttacctctcactgtgactgatacgaatttgttcatgaatattttctctatagtgtgagacagcttccttgtgtgggactgagaagcaagatatcaatgtagcagaattgcacttgtgcctcacgaacatacataaatttt

SEQ ID NO: 13103 - protein, 56 aa, Homo sapiens; identical to SEQ ID NO: 13097

SEQ ID NO: 13104 - DNA, 934 bp, Homo sapiens
gtgcctgaattttctgactcttctcagatcctccaaaggcacacgttgcccaccaccccatctctgaccatgaggccaccctgaggtgctgggccctgggcttctaccctgcggagatcacgctgacctggcagcgggatggggaggaacagacccaggacacagagcttgtggagaccaggcctgcaggggatggaaccttccagaagtgggccgctgtggtggtgcctcctggagaggaacagagatacacatgccatgtgcagcacgaggggctgccccagcccctcatcctgagatgggagcagtctccccagcccaccatccccatcgtgggcatcgttgctggccttgttgtccttggagctgtggtcactggagctgtggtcgctgctgtgatgtggaggaagaagagctcagatagaaacagagggagctactctcaggctgcaggtaagatgaaggaggctgatccctgagattgttgggatattgtggtcaggagcctatgagggagctcacccaccccacagttcctctagccacatctgtgggctctgaccaggtcctgtttttgttctaccccaatcactgacagtgcccagggctctggggtgtctctcacagctaataaaggtgacactccagggcaggggccctgatgtgagtggggtgttgggggggaacagaggggactcagctgtgctattgggtttctttgacttggatgtcttgagcatgaaatgggctatttagagtgttacctctcactgtgactgatacgaatttgttcatgaatattttctctatagtgtgagacagcttccttgtgtgggactgagaagcaagatatcaatgtagcagaattgcacttgtgcctcacgaacatacataaattttaaaaataaagaataaaaatatatctttttataga

SEQ ID NO: 13105 - protein, 56 aa, Homo sapiens; identical to SEQ ID NO: 13097

SEQ ID NO: 13106 - DNA, 1705 bp, Homo sapiens
gtgcctgaattttctgactcttctcagatcctccaaaggcacacgttgcccaccaccccatctctgaccatgaggccaccctgaggtgctgggccctgggcttctaccctgcggagatcacgctgacctggcagcgggatggggaggaacagacccaggacacagagcttgtggagaccaggcctgcaggggatggaaccttccagaagtgggccgctgtggtggtgcctcctggagaggaacagagatacacatgccatgtgcagcacgaggggctgccccagcccctcatcctgagatgggagcagtctccccagcccaccatccccatcgtgggcatcgttgctggccttgttgtccttggagctgtggtcactggagctgtggtcgctgctgtgatgtggaggaagaagagctcagatagaaacagagggagctactctcaggctgcaggtaagatgaaggaggctgatccctgagattgttgggatattgtggtcaggagcctatgagggagctcacccaccccacagttcctctagccacatctgtgggctctgaccaggtcctgtttttgttctaccccaatcactgacagtgcccagggctctggggtgtctctcacagctaataaaggtgacactccagggcaggggccctgatgtgagtggggtgttgggggggaacagaggggactcagctgtgctattgggtttctttgacttggatgtcttgagcatgaaatgggctatttagagtgttacctctcactgtgactgatacgaatttgttcatgaatattttctctatagtgtgagacagcttccttgtgtgggactgagaagcaagatatcaatgtagcagaattgcacttgtgcctcacgaacatacataaattttaaaaataaagaataaaaatatatctttttatagatacaggtagatatgtttttatagcatgcacgtaaatgtgtgtgtgtgtgtgtgtgtgtgaagagaaagagtgaatagagagattaagattcttttaatggtgaaaagatatacatatatttggaactagccagcttgactcagtttaggtgatcccaattttggtggcaacaaccaaagcatcgtagtcaggagccagtcgaacatatgccttcctctctccatcagactgaatcagagtgttgactttggccacatcaatgtcacaaacttcttcacagcctgtttgatctggtgcttgttggctttaacatccacagtgaacacaagtaggctgttgttttctatcttcttcacagcctactcagtggtcagcggaaacttgatgataacatggtggtcaagcttatttctcctgggggtgctcttccaaggatatttgggctgcctccggagtcacagtgtcttgggccgccggaaggtgggtgacatgtggatcttgttttttttgtggctgtggacatctttcaacactgccttcttggccttgcaaagccttcgctttggcttcggctttaggaggggcaggagcttccttcttcgttcttggcaccatcttatgaaaagggtccagattaagatttttgactgagtcattctaaagtaagttgcaagacccatgatactagaccactaaatacttcatcacacacctcctaagaataagaaccaacattatcacaccaaagaaaataaataattccataatatt

SEQ ID NO: 13107 - protein, 56 aa, Homo sapiens; identical to SEQ ID NO: 13097

SEQ ID NO: 13108 - DNA, 833 bp, Homo sapiens
gtgcctgaattttctgactcttctcagatcctccaaaggcacacgttgcccaccaccccatctctgaccatgaggccaccctgaggtgctgggccctgggcttctaccctgcggagatcacgctgacctggcagcgggatggggaggaacagacccaggacacagagcttgtggagaccaggcctgcaggggatggaaccttccagaagtgggccgctgtggtggtgcctcctggagaggaacagagatacacatgccatgtgcagcacgaggggctgccccagcccctcatcctgagatgggagcagtctccccagcccaccatccccatcgtgggcatcgttgctggccttgttgtccttggagctgtggtcactggagctgtggtcgctgctgtgatgtggaggaagaagagctcagcctactcagtggtcagcggaaacttgatgataacatggtggtcaagcttatttctcctgggggtgctcttccaaggatatttgggctgcctccggagtcacagtgtcttgggccgccggaaggtgggtgacatgtggatcttgttttttttgtggctgtggacatctttcaacactgccttcttggccttgcaaagccttcgctttggcttcggctttaggaggggcaggagcttccttcttcgttcttggcaccatcttatgaaaagggtccagattaagatttttgactgagtcattctaaagtaagttgcaagacccatgatactagaccactaaatacttcatcacacacctcctaagaataagaaccaacattatcacaccaaagaaaataaataattccataatatt

SEQ ID NO: 13109 - protein, 104 aa, Homo sapiens
MWRKKSSAYSVVSGNLMITWWSSLFLLGVLFQGYLGCLRSHSVLGRRKVGDMWILFFLWLWTSFNTAFLALQSLRFGFGFRRGRSFLLRSWHHLMKRVQIKIFD

SEQ ID NO: 13110 - DNA, 421 bp, Homo sapiens
cgctgacctggcagcgggatggggaggaacagacccaggacacagagcttgtggagaccaggcctgcaggggatggaaccttccagaagtgggccgctgtggtggtgcctcctggagaggaacagagatacacatgccatgtgcagcacgaggggctgccccagcccctcatcctgagatgggagcagtctccccagcccaccatccccatcgtgggcatcgttgctggccttgttgtccttggagctgtggtcactggagctgtggtcgctgctgtgatgtggaggaagaagagctcagatagaaacagagggagctactctcaggctgcagtgtgagacagcttccttgtgtgggactgagaagcaagatatcaatgtagcagaattgcacttgtgcctcacgaacatacataaatttt

SEQ ID NO: 13111 - protein, 56 aa, Homo sapiens; identical to SEQ ID NO: 13097

SEQ ID NO: 13112 - DNA, 205 bp, Homo sapiens
atggccctgcctcctttctggcctctcacaggacattttcttcccatagatagaaacagagggagctactctcaggctgcagtgtgagacagcttccttgtgtgggactgagaagcaagatatcaatgtagcagaattgcacttgtgcctcacgaacatacataaattttaaaaataaagaataaaaatatatctttttatagat

SEQ ID NO: 13113 - protein, 40 aa, Homo sapiens
IETEGATLRLQCETASLCGTEKQDINVAELHLCLTNIHKF

SEQ ID NO: 13114 - DNA, 495 bp, Homo sapiens
gccccagctgacctgatgaatatcaacatccaatgccctgtaatgaagtcatgtgtgcacatatcatcacttctgcatgcagtctcatgggaagatggtgccaagaaactgtgactccggaggcagcccaaatatccttggaagagcacccccaggagaaataagcttgaccaccatgttatcatcaagtttccgctgaccactgagtaggctgtgaagaagatagaaaacaacagcctacttgtgttcactgtggatgttaaagccaacaagcaccagatcaaacaggctgtgaagaagtttgtgacattgatgtggccaaagtcaacactctgattcagtctgatggagagaggaaggcatatgttcgactggctcctgactacgatgctttggttgttgccaccaaaattgggatcacctaaactgagtcaagctggctagttccaaatatatgtatatcttttcaccattaaaagaatcttaatctctcta

SEQ ID NO: 13115 - protein, 43 aa, Homo sapiens
MPCNEVMCAHIITSACSLMGRWCQETVTPEAAQISLEEHPQEK

SEQ ID NO: 13116 - DNA, 728 bp, Homo sapiens
caagcctcactcccatgcagagaagaagctctgactgtaactgcacctgtggagagaggattgcggcctgttggcagaagagtagtgtcttgggccccagctgacctgatgaatatcaacatccaatgccctgtaatgaagtcatgtgtgcacatatcatcacttctgcatgcagtctcatgggaagatggtgccaagaacgaagaaggaagctcctgcccctcctaaagccgaagccaaagcgaaggctttgcaaggccaagaaggcagtgttgaaagatgtccacagccacaaaaaaaacaagatccacatgtcacccaccttccggcggcccaagacactgtgactccggaggcagcccaaatatccttggaagagcacccccaggagaaataagcttgaccaccatgttatcatcaagtttccgctgaccactgagtaggctgtgaagaagatagaaaacaacagcctacttgtgttcactgtggatgttaaagccaacaagcaccagatcaaacaggctgtgaagaagtttgtgacattgatgtggccaaagtcaacactctgattcagtctgatggagagaggaaggcatatgttcgactggctcctgactacgatgctttggttgttgccaccaaaattgggatcacctaaactgagtcaagctggctagttccaaatatatgtatatcttttcaccattaaaagaatcttaatctctcta

SEQ ID NO: 13117 - protein, 75 aa, Homo sapiens
MQSHGKMVPRTKKEAPAPPKAEAKAKALQGQEGSVERCPQPQKKQDPHVTHLPAAQDTVTPEAAQISLEEHPQEK

SEQ ID NO: 13118 - DNA, 737 bp, Homo sapiens
actgcgaggaaagcaaagtctgggccatggagatgagcctagtcctgctgttcctgatccgcactgccctttttgcaccccagggagctgctgctggaggtgtgtgatgaagtatttagtggtctagtatcatgggtcttgcaacttactttagaatgactcagtcaaaaatcttaatctggacccttttcataagatggtgccaagaacgaagaaggaagctcctgcccctcctaaagccgaagccaaagcgaaggctttgcaaggccaagaaggcagtgttgaaagatgtccacagccacaaaaaaaacaagatccacatgtcacccaccttccggcggcccaagacactgtgactccggaggcagcccaaatatccttggaagagcacccccaggagaaataagcttgaccaccatgttatcatcaagtttccgctgaccactgagtaggctgtgaagaagatagaaaacaacagcctacttgtgttcactgtggatgttaaagccaacaagcaccagatcaaacaggctgtgaagaagtttgtgacattgatgtggccaaagtcaacactctgattcagtctgatggagagaggaaggcatatgttcgactggctcctgactacgatgctttggttgttgccaccaaaattgggatcacctaaactgagtcaagctggctagttccaaatatatgtatatcttttcaccattaaaagaatcttaatctctcta

SEQ ID NO: 13119 - protein, 74 aa, Homo sapiens
MGLATYFRMTQSKILIWTLFIRWCQERRRKLLPLLKPKPKRRLCKAKKAVLKDVHSHKKNKIHMSPTFRRPKTL

SEQ ID NO: 13120 - DNA, 649 bp, Homo sapiens
gccgcttgagccactgcgaggaaagcaaagtctgggccatggagatgagcctagtcctgctgttcctgatccgcactgccctttttgcaccccagggagctgctgctgatggtgccaagaacgaagaaggaagctcctgcccctcctaaagccgaagccaaagcgaaggctttgcaaggccaagaaggcagtgttgaaagatgtccacagccacaaaaaaaacaagatccacatgtcacccaccttccggcggcccaagacactgtgactccggaggcagcccaaatatccttggaagagcacccccaggagaaataagcttgaccaccatgttatcatcaagtttccgctgaccactgagtaggctgtgaagaagatagaaaacaacagcctacttgtgttcactgtggatgttaaagccaacaagcaccagatcaaacaggctgtgaagaagtttgtgacattgatgtggccaaagtcaacactctgattcagtctgatggagagaggaaggcatatgttcgactggctcctgactacgatgctttggttgttgccaccaaaattgggatcacctaaactgagtcaagctggctagttccaaatatatgtatatcttttcaccattaaaagaatcttaatctctcta

SEQ ID NO: 13121 - protein, 69 aa, Homo sapiens [sequence omitted]

SEQ ID NO: 13122 - DNA, 1926 bp, Homo sapiens
aggaaatttctggtgggccttcgcggctccgctgggttggcagccgcttgagccactgcgaggaaagcaaagtctgggccatggagatgagcctagtcctgctgttcctgatccgcactgccctttttgcaccccagggagctgctgctgacggcgcctccctctgtcgccaaagttggagtgcagtggcgcggtctcggctcactgcaagctccgcctcccggattcaagtgattcccctgccttagcctcctaagtagctgggattacaagtgcccaccaccacacccggctaatattttgtattttaatagagactgggtttcaccatgttgaccgggatggtctcaatctcctgacctcgtgatctgcctgcctaagcctcccgaagtgctgggattacaggcgtgagccaccacacctagctggaagaggagataaatatatgaaggtgctgtttggcacagaatttaatagggaagaaagagacagtataactcaccagtgctgggtctcatcatcctgcaatttcagaacaactatgaatacaaaaagaattttaaaatcccagtcctgcctagaaaggggaagtcatctctaaatatggtggccctggggcagctggcctccctgccaggcctcttccatgggggccctttctgcagtgactgtggtttcttcccattttactctgtcctgtgtcctgactgaagcgacaaggtgtgtctgcagctgtgctcacacctggaggaaacctcaatggtgacatgatgaccctagcagcacatcctctttcctgtgtcaagaagcatcgtccggggaggtgagaagaagacagtcctccctagaattgaagaaccagggagaaccagatgggctgggcaggtgggttttcacctggaacctggaggatgagcaatgacatctctccaccctgagctcagccccggcatccacctcctgggctcatgagcagtgcagtggtgcctcctagtggtctctgctcttccttttccagatcaagcacaaacctgagatccaactgtccctcttatgcgcctgggtttcttcactggacaccagtatgagtcaactttcctgtaaagcagaacaagcacgagattggaccatgttagaggaggaatggtgtcatctccacttctggagagatcactgtccccgtgtttgggggaaggaccaagcctcactcccatgcagagaagaagctctgactgtaactgcacctgtggagagaggattgcggcctgttggcagaagagtagtgtcttgggccccagctgacctgatgaatatcaacatccaatgccctgtaatgaagtcatgtgtgcacatatcatcacttctgcatgcagtctcatgggaagatggtgccaagaacgaagaaggaagctcctgcccctcctaaagccgaagccaaagcgaaggctttgcaaggccaagaaggcagtgttgaaagatgtccacagccacaaaaaaaacaagatccacatgtcacccaccttccggcggcccaagacactgtgactccggaggcagcccaaatatccttggaagagcacccccaggagaaataagcttgaccaccatgttatcatcaagtttccgctgaccactgagtaggctgtgaagaagatagaaaacaacagcctacttgtgttcactgtggatgttaaagccaacaagcaccagatcaaacaggctgtgaagaagtttgtgacattgatgtggccaaagtcaacactctgattcagtctgatggagagaggaaggcatatgttcgactggctcctgactacgatgctttggttgttgccaccaaaattgggatcacctaaactgagtcaagctggctagttccaaatatatgtatatcttttcaccattaaaagaatcttaatctctcta

SEQ ID NO: 13123 - protein, 113 aa, Homo sapiens
MSQLSCKAEQARDWTMLEEEWCHLHFWRDHCPRVWGKDQASLPCREEALTVTAPVERGLRPVGRRVVSWAPADLMNINIQCPVMKSCVHISSLLHAVSWEDGAKNEEGSSCPS

SEQ ID NO: 13124 - DNA, 606 bp, Homo sapiens
agcagtggcgcctaaagtctgtgaggagaaagtcgcctctgtgccccggagttcagaggtctaagatggtgccaagaacgaagaaggaagctcctgcccctcctaaagccgaagccaaagcgaaggctttgcaaggccaagaaggcagtgttgaaagatgtccacagccacaaaaaaaacaagatccacatgtcacccaccttccggcggcccaagacactgtgactccggaggcagcccaaatatccttggaagagcacccccaggagaaataagcttgaccaccatgttatcatcaagtttccgctgaccactgagtaggctgtgaagaagatagaaaacaacagcctacttgtgttcactgtggatgttaaagccaacaagcaccagatcaaacaggctgtgaagaagtttgtgacattgatgtggccaaagtcaacactctgattcagtctgatggagagaggaaggcatatgttcgactggctcctgactacgatgctttggttgttgccaccaaaattgggatcacctaaactgagtcaagctggctagttccaaatatatgtatatcttttcaccattaaaagaatcttaatctctcta

SEQ ID NO: 13125 - protein, 69 aa, Homo sapiens [sequence omitted]

SEQ ID NO: 13126 - DNA, 2834 bp, Homo sapiens
tgcgaggaaagcaaagtctgggccatggagatgagcctagtcctgctgttcctgatccgcactgccctttttgcaccccagggagctgctgctgagccccacagtctttgttacaacctcacggtgctgtcccaggatggatctgtgcagtcagggtttctcgctgagggacatctggatggtcagctcttcctgctctgtgacaggcagaaaggcagggcagggccccggggacagtgggcagaagcagtcctgggagctgagacctgggacacagagactgaagacttgacagagaatgggcaggagctcaggaggaccctggctcatatcaagggccagaaaggaggaagaggagataaatatatgaaggtgctgtttggcacagaatttaatagggaagaaagagacagtataactcaccagtgctgggtctcatcatcctgcaatttcagaacaactatgaatacaaaaagaattttaaaatcccagtcctgcctagaaaggggaagtcatctctaaatatggtggccctggggcagctggcctccctgccaggcctcttccatgggggccctttctgcagtgactgtggtttcttcccattttactctgtcctgtgtcctgactgaagcgacaaggtgtgtctgcagctgtgctcacacctggaggaaacctcaatggtgacatgatgaccctagcagcacatcctctttcctgtgtcaagaagcatcgtccggggaggtgagaagaagacagtcctccctagaattgaagaaccagggagaaccagatgggctgggcagatcaagcacaaacctgagatccaactgtccctcttatgcgcctgggtttcttcactggacaccagtatgagtcaactttcctgtaaagcagaacaagcacgagattggaccatgttagaggaggaatggtgtcatctccacttctggagagatcactgtccccgtgtttgggggaaggaccaagcctcactcccatgcagagaagaagctctgactgtaactgcacctgtggagagtggagagacaagaagtgtgagctatttataaagctgagcacctgactgccacgggagtgatagtgaccacacacagcaagacctgggacatggcagtgactgtgtccagaactgacagaactaatctatcatattagaaatcaagaaagtgtctgctctagggttggggagggtgatttatgaccaagtagaacccaatggtgtttcctggaggctggaaatgctattccttgatgtggctgctatttacctgagtgttcactttgtgaaaatccacggcccacttatggtttgtccacctttctccatgcatgttgtccttcattcaagtatacatttctgatgttttgaaacaattctctctaagctaatatagaatctccattactgaaagtccttagaaatgctgcattggaaaaaattagtccaattattaaaaatctatgaaataaatgctgtgactcagacattaagaggagaatctacaacaagagcagtaggcttgggagctaacgcaagaacagctttggaaatggctgttgagccaggaactaggaatcaaaacccaaaaaggcccatgcaaggtggagggtgtgaaatgatgccccagtagtgcatgaatgaatgagtcatgggcagtggctcatgggttgcttggtcagtcaggaacttgagcaaaataaagttggaaaactgggggatggaagagagaggtatgcacagacctcttgacatgggcagagcttcagaagatggtggttgcaggtttccccaaatagagaacatcaataaaaaggtagaaattttacaaagagaccagataaaaagtttggagctgaaaagtgcaataactgaaatgaaaaattcactagaggggctccagagcaaatttcaccatgcagaatggagaatcagcaagcttgaagataagacaattgaaattctctagttcagtagcagaaagaaaaaaaattatgaagaaaaataaacagaactttaaagatctgtgagacaacatcaagcacatgcactttgggagtcctcaaagaaaggagagagagaaaggagaagaatgactatttaaagaataactccaaaccttccaaatttgatgaaaaacattattcatccaacaaacttgacaaattttaagcagcaaaaaaaattaaatttaaagaggtccacaccaagagaacattataatcaacctgtcaaaagccaatgacaaacagagcatattgaaatgaataacagagaaggaacttttcaggttcaatggatcctcaataagattgcagcccagttttcttcagaaaccatagagttcagaaggcattggaatgttgacaaatttagaggtcagaaaaaaaaagactgtcatgcaggaattgtgtgtctggaaaaactctccttcagaaataatggattttatatatatataaatatatatatatacacacatatatatacatatatatacatatatatgactatacatagtactacatatatataactatatatagtactactatgaaattatatatatagtactatatatagtagtcatactataaaagctagtagtaatatgtatatttttggtgtttatatgtgtgtgtgtgtgtgtgtgtgtgtgcatatatatatagtactatatatagtagtcctataaaagctagtagtaacatgtatatttttggtgtttaattcttcctttgtttttcctatttggtttaaaagaaaatgcccattgactaatgaatgaataaacaacatgtagtgtatttct

SEQ ID NO: 13127 - protein, 165 aa, Homo sapiens
MEMSLVLLFLIRTALFAPQGAAAEPHSLCYNLTVLSQDGSVQSGFLAEGHLDGQLFLLCDRQKGRAGPRGQWAEAVLGAETWDTETEDLTENGQELRRTLAHIKGQKGGRGDKYMKVLFGTEFNREERDSITHQCWVSSSCNFRTTMNTKRILKSQSCLERGSHL

SEQ ID NO: 13128 - DNA, 758 bp, Homo sapiens
cccattttactctgtcctgtgtcctgactgaagcgacaaggtgtgtctgcagctgtgctcacacctggaggaaacctcaatggtgtgagtaaattgtaaatgtttacttattatgggttattttattatttatgaagtatgtattttgatttcattctactgacaacacaataaaccaggacatgatgaccctagcagcacatcctctttcctgtgtcaagaagcatcgtccggggaggtgagaagaagacagtcctccctagaattgaagaaccagggagaaccagatgggctgggcagatcaagcacaaacctgagatccaactgtccctcttatgcgcctgggtttcttcactggacaccagtatgagtcaactttcctgtaaagcagaacaagcacgagattggaccatgttagaggaggaatggtgtcatctccacttctggagagatcactgtccccgtgtttgggggaaggaccaagcctcactcccatgcagagaagaagctctgactgtaactgcacctgtggagaggtgaggacctgtcccctctacaccgatggccagagcctccagagtggggccaggcttttccctcagctgtgtcctgtcaggtttatctaggcctcaaagaatagaccctggacattgcctctggcaatgtgagctggacacacacccagatgtaaggtagccctgccaagtatcctggggttgccagtagttctgggtgctcagtgtctggagcggagggtg

SEQ ID NO: 13129 - protein, 66 aa, Homo sapiens
MVSSPLLERSLSPCLGEGPSLTPMQRRSSDCNCTCGEVRTCPLYTDGQSLQSGARLFPQLCPVRFI

SEQ ID NO: 13130 - DNA, 649 bp, Homo sapiens
acagtgggcagaagcagtcctgggagctgagacctgggacacagagactgaagacttgacagagaatgggcaggagctcaggaggaccctggctcatatcaagggccagaaaggagagcacgtgagcctgcaaggcccggatcaacgcccggttgggacaggagaccaccagggcagtgcacagctgggatttcagtctctggtgtcaactcctgggtctactggctccactgagggcagctacactctgcagccagatggccagaattcaactccctgcccaggtctcaccagcactttcccacttggtgcctcagtttcctcatctatgaaatggggaaactaacagcatttatttcttgtggttgggtggatgaaaagcgttagtatatatgaggggtttgcagctgtgccacattatttttgttatcatttgattatattttaatatattacatatgcggtcattgtattattattataaatgagatttatgagtgagtgtcctggttacggctccttctggggagcccaggaccagctttcctggcaccttgaggtcccctcaccctgtcacactctcatgcattacctcatatctactatgtcttcataattttatactatagaaatttaccctttaagtaga

SEQ ID NO: 13131 - protein, 43 aa, Homo sapiens
MRFMSECPGYGSFWGAQDQLSWHLEVPSPCHTLMHYLISTMSS

SEQ ID NO: 13132 - DNA, 468 bp, Homo sapiens
tgagccactgcgaggaaagcaaagtctgggccatggagatgagcctagtcctgctgttcctgatccgcactgccctttttgcaccccagggagctgctgctgagccccacagtctttgttacaactcctgggtctactggctccactgagggcagctacactctgcagccagatggccagaattcaactccctgcccaggtctcaccagcactttcccacttggtgcctcagtttcctcatctatgaaatggggaaactaacagcatttatttcttgtggttgggtggatgaaaagcgttagtatatatgaggggtttgcagctgtgccacattatttttgttatcatttgattatattttaatatattacatatgcggtcattgtattattattataaatgagatttatgagtgagtgtcctggttacggctccttctggggagcccaggaccagctttcctggcac

SEQ ID NO: 13133 - protein, 38 aa, Homo sapiens
MEMSLVLLFLIRTALFAPQGAAAEPHSLCYNSWVYWLH

SEQ ID NO: 13134 - DNA, 690 bp, Homo sapiens
gagccactgcgaggaaagcaaagtctgggccatggagatgagcctagtcctgctgttcctgatccgcactgccctttttgcaccccagggagctgctgctgagccccacagtctttgttacaacctcacggtgctgtcccaggatggatctgtgcagtcagggtttctcgctgagggacatctggatggtcagctcttcctgctctgtgacaggcagaaaggcagggcagggccccggggacagtgggcagaagcagtcctgggagctgagacctgggacacagagactgaagacttgacagagaatgggcaggagctcaggaggaccctggctcatatcaagggccagaaaggaggcagactacatgcaaaagctatggtgatatctgaaattctggaggtatcagaaaaacagtgaatgagatgcacagtggggccttagaaggcaatgtcaccatgatgtgctggcctccatcttctatccctggaatatctctctgacctggcatcaggatgaggcatctttgagccaggatgcccagcagtctaggggtgtcctgcccaatgggaatgggacctaccagacctgcatggccaccaggattccccgaggagaggagcagaggttcacctgctacatgggacacagagggaatcacagcactcaccctgtgccctctggtgagcctg

SEQ ID NO: 13135 - protein, 128 aa, Homo sapiens
MEMSLVLLFLIRTALFAPQGAAAEPHSLCYNLTVLSQDGSVQSGFLAEGHLDGQLFLLCDRQKGRAGPRGQWAEAVLGAETWDTETEDLTENGQELRRTLAHIKGQKGGRLHAKAMVISEILEVSEKQ

SEQ ID NO: 13136 - DNA, 583 bp, Homo sapiens
atgaaccacactgcccaaaccttcttcattcctgccaacagtggctgccctcccccgccccccaaccccagctatgagatgctcaaggaggagcatgaggtggctgtgctgggggcgccccacaaccctgctcccccaatgtccaccatgatccatatctgcagcgagacctccgtgtctgactatgttgtctggtccctgtccaacatcctcttcatgaacccccactgcctgggattcatagcattcacctactccctgaagtctagggacaggaagatggttggagacctgactggggcccaggcctatgcctccactgccaagtacctgaacatctgagccctgattgtgtgcatcatcatgaccattctgctcaccgtcatcatcctagtgttgatcttccaagtctgtcgatagatcaggaggcatcatccaggccaggagctctgcccatgacctgtattccacatactccaacttccattcctcgtcctggccccagagctgagttctgtatcagcgctttatcctcacacactcttctacaatggcattcaataaagtgcatgtgttcctggtt

SEQ ID NO: 13137 - protein, 113 aa, Homo sapiens [sequence omitted]

SEQ ID NO: 13138 - DNA, 2064 bp, Homo sapiens
caaggagcacaggtcctcgttcaggacgatgtaatccttgccatcgtaagcaagctggtgatacccgcggagtaggcgcccgtccgaccccacgtcgcagacagacatcctctagatgggtgtgagaccctggccccgcccccgcggccagccccgcccaccgagccccgccctcgccaggaccaacctgcggggattttggctgaaaatgaaaccgggtaacggctcctgggcctctcccgggtcaagggtctccaggtcccgctgcctcggcgtggatctcggacccagagactcggggagacccgggcggtccgtgggggatgtggaggggtagtgacctgcgcccccggccggtgtcactcacaggcctcactctggttgtagtagccgctcagggtccgcaggttcactcggtaaaactgtgctttggccttggcggtccctgtctcctcttcccaatattccggcccctcctgctccatccacggcgcccgcggctccatcctgggactcgtggcgtcgctgtcgagccgcacgcactgcgtgtcgtccacgtcgcccacggagaggaagcggggatccgcgcggccgggccgggacatggtggtgtggaaatacctcaaggagtggaagcctgggagcaaggagggggctgagaccctcccgaccctcctcccggcaccgcaaccgggttcctgcgcccccgccgggcaggcccctagctactccccacagacgccgtttccctcccgaccccgcactcacctgcccaggtctgggtcaggaccagggcccccgagagcagcagaagcagggttcggggcgccatgacaccatcctcggcgactgggaagaatcggagtcccggtgggtgcgtgggaactttagaaccgggaccgcggctacattgattggcttctctagaaacccgacactcaatgggagtgagaactggggcagcccggtgagtacccaggaagaaggacccgacacaggttgggagagggagaagagaaaccctgcaaagatggggaatgcccagcgctgggcctccccaatccatacaccgcctttggggcctgagatcctgagagccacgcctgaggccctgggacttcgccctgaccccgctacttctgtgccaagcgctctgtctcaatgtttccctgagtcttggcccaggagctgtctgagaaaccagggagaaaccctcggaatgggccccgtccctctctcttcactttgcatcacggaatccccgtcccagaactggactccctgcctcctactccttacctgtccccgtggactcttctagaagaaaaatcaccccagggagcttgttgccagagagtgagcttgccctgggaatggaggtgtagagacagggttttttgttgttgttgtttgtttgttttttaaatctggaaaagttgtgcctgagtgcatgagatagaatagagaccagtttgctttttgtttattaactacagtgggtagcagaatcttggtaactcctaatgatcaggaatctaatcggccaaaaatgtgactttggtcccttgacatataaatgtgtctaaaagcattacaacaggaatcacaaagctcctaagtttcactttcccagacaatgtatctgtgactcccgcttgtagtattttaaatttaccttcattccatagccctgagtttctgtgtgagtccaggacatctcctaatacaaggtagccactgtgttactatatgttgtaaccaggagccagtacggactttattcatctcacagtggcaagcactcaatgcagtcacaatgcccctcaccagtgctcatgcactgcctgtttttaggaagtatccacttctaagtgttgtgtatattttatatgaacacttagtattttttaaacctgattaacataaaaaaattagtttttaggcagacccacataaggtattaaaggccaactgcaaagatcaccctgcaaggctctgtagattgatgtattaaaatatataaaacaatgtgtttaaacctgagttctgctgctttcgaattct

SEQ ID NO: 13139 - protein, 111 aa, Homo sapiens [sequence omitted]

SEQ ID NO: 13140 - DNA, 1629 bp, Homo sapiens
caggtttaaacacattgttttatatattttaatacatcaatctacagagccttgcagggtgatctttgcagttggcctttaataccttatgtgggtctgcctaaaaactaatttttttatgttaatcaggtttaaaaaatactaagtgttcatataaaatatacacaacacttagaagtggatacttcctaaaaacaggcagtgcatgagcactggtgaggggcattgtgactgcattgagtgcttgccactgtgagatgaataaagtccgtactggctcctggttacaacatatagtaacacagtggctaccttgtattaggagatgtcctggactcacacagaaactcagggctatggaatgaaggtaaatttaaaatactacaagcgggagtcacagatacattgtctgggaaagtgaaacttaggagctttgtgattcctgttgtaatgcttttagacacatttatatgtcaagggaccaaagtcacatttttggccgattagattcctgatcattaggagttaccaagattctgctacccactgtagttaataaacaaaaagcaaactggtctctattctatctcatgcactcaggcacaacttttccagatttaaaaaacaaacaaacaacaacaacaaaaaaccctgtctctacacctccattcccagggcaagctcactctctggcaacaagctccctggggtgatttttcttctagaagagtccacggggacagggtttctcttctccctctcccaacctgtgtcgggtccttcttcctgggtactcaccgggctgccccagttctcactcccattgagtgtcgggtttctagagaagccaatcaatgtagccgcggtcccggttctaaagttcccacgcacccaccgggactccgattcttcccagtcgccgaggatggtgtcatggcgccccgaaccctgcttctgctgctctcgggggccctggtcctgacccagacctgggcaggcttccactccttgaggtatttccacaccaccatgtcccggcccggccgcgcggatccccgcttcctctccgtgggcgacgtggacgacacgcagtgcgtgcggctcgacagcgacgccacgagtcccaggatggagccgcgggcgccgtggatggagcaggaggggccggaatattgggaagaggagacagggaccgccaaggccaaagcacagttttaccgagtgaacctgcggaccctgagcggctactacaaccagagtgaggcctgtgagtgacaccggccgggggcgcaggtcactacccctccacatcccccacggaccgcccgggtctccccgagtctctgggtccgagatccacgccgaggcagcgggacctggagacccttgacccgggagaggcccaggagccgttacccggtttcattttcagccaaaatccccgcaggttggtcctggcgagggcggggctcggtgggcggggctggccgcgggggcggggccagggtctcacacccatctagaggatgtctgtctgcgacgtggggtcggacgggcgcctactccgcgggtatcaccagcttgcttacgatggcaaggattacatcgtcctgaacgaggacctgtgct

SEQ ID NO: 13141 - protein, 113 aa, Homo sapiens
MAPRTLLLLLSGALVLTQTWAGFHSLRYFHTTMSRPGRADPRFLSVGDVDDTQCVRLDSDATSPRMEPRAPWMEQEGPEYWEEETGTAKAKAQFYRVNLRTLSGYYNQSEACE

SEQ ID NO: 13142 - DNA, 2042 bp, Homo sapiens
caaggagcacaggtcctcgttcaggacgatgtaatccttgccatcgtaagcaagctggtgatacccgcggagtaggcgcccgtccgaccccacgtcgcagacagacatcctctagatgggtgtgagaccctggccccgcccccgcggccagccccgcccaccgagccccgccctcgccaggaccaacctgcggggattttggctgaaaatgaaaccgggtaacggctcctgggcctctcccgggtcaagggtctccaggtcccgctgcctcggcgtggatctcggacccagagactcggggagacccgggcggtccgtgggggatgtggaggggtagtgacctgcgcccccggccggtgtcactcacaggcctcactctggttgtagtagccgctcagggtccgcaggttcactcggtaaaactgtgctttggccttggcggtccctgtctcctcttcccaatattccggcccctcctgctccatccacggcgcccgcggctccatcctgggactcgtggcgtcgctgtcgagccgcacgcactgcgtgtcgtccacgtcgcccacggagaggaagcggggatccgcgcggccgggccgggacatggtggtgtggaaatacctcaaggagtggaagcctgggagcaaggagggggctgagaccctcccgaccctcctcccggcaccgcaaccgggttcctgcgcccccgccgggcaggcccctagctactccccacagacgccgtttccctcccgaccccgcactcacctgcccaggtctgggtcaggaccagggcccccgagagcagcagaagcagggttcggggcgccatgacaccatcctcggcgactgggaagaatcggagtcccggtgggtgcgtgggaactttagaaccgggaccgcggctacattgattggcttctctagaaacccgacactcaatgggagtgagaactggggcagcccggtgagtacccaggaagaaggacccgacacaggttgggagagggagaagagaaaccctgcaaagatggggaatgcccagcgctgggcctccccaatccatacaccgcctttggggcctgagatcctgagagccacgcctgaggccctgggacttcgccctgaccccgctacttctgtgccaagcgctctgtctcaatgtttccctgagtcttggcccaggagctgtctgagaaaccagggagaaaccctcggaatgggccccgtccctctctcttcactttgcatcacggaatccccgtcccagaactggactccctgcctcctactccttacctgtccccgtggactcttctagaagaaaaatcaccccagggagcttgttgccagagagtgagcttgccctgggaatggaggtgtagagacagggttttttgttgttgttgtttgtttgttttttaaatctggaaaagttgtgcctgagtgcatgagatagaatagagaccagtttgctttttgtttattaactacagtgggtagcagaatcttggtaactcctaatgatcaggaatctaatcggccaaaaatgtgactttggtcccttgacatataaatgtgtctaaaagcattacaacaggaatcacaaagctcctaagtttcactttcccagacaatgtatctgtgactcccgcttgtagtattttaaatttaccttcattccatagccctgagtttctgtgtgagtccaggacatctcctaatacaaggtagccactgtgttactatatgttgtaaccaggagccagtacggactttattcatctcacagtggcaagcactcaatgcagtcacaatgcccctcaccagtgctcatgcactgcctgtttttaggaagtatccacttctaagtgttgtgtatattttatatgaacacttagtattttttaaacctgattaacataaaaaaattagtttttaggcagacccacataaggtattaaaggccaactgcaaagatcaccctgcaaggctctgtagattgatgtattaaaatatataaaacaatgtgtttaaacctg

SEQ ID NO: 13143 - protein, 111 aa, Homo sapiens [sequence omitted]

SEQ ID NO: 13144 - DNA, 1467 bp, Homo sapiens
caggtttaaacacattgttttatatattttaatacatcaatctacagagccttgcagggtgatctttgcagttggcctttaataccttatgtgggtctgcctaaaaactaatttttttatgttaatcaggtttaaaaaatactaagtgttcatataaaatatacacaacacttagaagtggatacttcctaaaaacaggcagtgcatgagcactggtgaggggcattgtgactgcattgagtgcttgccactgtgagatgaataaagtccgtactggctcctggttacaacatatagtaacacagtggctaccttgtattaggagatgtcctggactcacacagaaactcagggctatggaatgaaggtaaatttaaaatactacaagcgggagtcacagatacattgtctgggaaagtgaaacttaggagctttgtgattcctgttgtaatgcttttagacacatttatatgtcaagggaccaaagtcacatttttggccgattagattcctgatcattaggagttaccaagattctgctacccactgtagttaataaacaaaaagcaaactggtctctattctatctcatgcactcaggcacaacttttccagatttaaaaaacaaacaaacaacaacaacaaaaaaccctgtctctacacctccattcccagggcaagctcactctctggcaacaagctccctggggtgatttttcttctagaagagtccacggggacagtcgccgaggatggtgtcatggcgccccgaaccctgcttctgctgctctcgggggccctggtcctgacccagacctgggcaggcttccactccttgaggtatttccacaccaccatgtcccggcccggccgcgcggatccccgcttcctctccgtgggcgacgtggacgacacgcagtgcgtgcggctcgacagcgacgccacgagtcccaggatggagccgcgggcgccgtggatggagcaggaggggccggaatattgggaagaggagacagggaccgccaaggccaaagcacagttttaccgagtgaacctgcggaccctgagcggctactacaaccagagtgaggcctgtgagtgacaccggccgggggcgcaggtcactacccctccacatcccccacggaccgcccgggtctccccgagtctctgggtccgagatccacgccgaggcagcgggacctggagacccttgacccgggagaggcccaggagccgttacccggtttcattttcagccaaaatccccgcaggttggtcctggcgagggcggggctcggtgggcggggctggccgcgggggcggggccagggtctcacacccatctagaggatgtctgtctgcgacgtggggtcggacgggcgcctactccgcgggtatcaccagcttgcttacgatggcaaggattacatcgtcctgaacgaggacctgtgctccttgacagcc

SEQ ID NO: 13145 - protein, 113 aa, Homo sapiens; identical to SEQ ID NO: 13141

SEQ ID NO: 13146 - DNA, 3360 bp, Homo sapiens
aggagatgtcctggactcacacagaaactcagggctatggaatgaagggcaagctcactctctggcaacaagctccctggggtgatttttcttctagaagagtccacggggacaggctgccccagttctcactcccattgagtgtcgggtttctagagaagccaatcaatgtagccgcggtcccggttctaaagttcccacgcacccaccgggactccgattcttcccagtcgccgaggatggtgtcatggcgccccgaaccctgcttctgctgctctcgggggccctggtcctgacccagacctgggcaggcttccactccttgaggtatttccacaccaccatgtcccggcccggccgcgcggatccccgcttcctctccgtgggcgacgtggacgacacgcagtgcgtgcggctcgacagcgacgccacgagtcccaggatggagccgcgggcgccgtggatggagcaggaggggccggaatattgggaagaggagacagggaccgccaaggccaaagcacagttttaccgagtgaacctgcggaccctgagcggctactacaaccagagtgaggcctgtgagtgacaccggccgggggcgcaggtcactacccctccacatcccccacggaccgcccgggtctccccgagtctctgggtccgagatccacgccgaggcagcgggacctggagacccttgacccgggagaggcccaggagccgttacccggtttcattttcagccaaaatccccgcaggggctgccagccacacagagtcatggacaggtctctacagacacaacttagtgccagcttggatgaaaccctctgaggaatgggtgccatctttcaggatgtggtgcatgtattgaatcaaagatgtctctatagtgctgtgtttacagaaggaagaatacgtgggtccaaaaaccaagaagtagaagcagggatgtttgaatagtatgtgtccagatacaagcaggtgagaagaggaggaggcagggctgctatcacacaaggagggcaggagatgtgtgtgtggaaataagagatccacttggagaccttatggttccccttgtcctgttgtaagtgtgagcagaatcatccagcaacccagcctgagagggtttcatattcaagagcccagaaccctcaggaaggaaggattgagtgatactcacaggtaatgtcccaaggctgtgctcctgtgctctgacatcctcagcaggattggtgcaaagccctgcttcccatgggctgttcccagccagtgactggtcacagcaggcattaaggcaagccattcctgggagacacgggactcctctgatggctaactgtagctggaagactcctccacggccttgctcaactctccttagattgcctgtgctctaggatgcgtcaaacaaactttctctccttctgtccagcacttggggtcacacttgcatcgtggtctgccgccttttctcagggatttctggctcacttcccatattcccttacgggtgtgtccccttataagatgtcgcagactttaagctcatcttggcatctgctccttgaaggacttggactaaaaattatttccatctgcatatcaataactcttattccaacctgtaaaatccttctctttatccaacttctgccacccccacagaatctattttacttgtgtgtgtagtatctctttgagttaacagatatttgttctattaagctactaaattttgaggtagtttgtgacacagcacttgataactattaaggctttcttaagtttccattattccatggatattatctacatatcttttaatcccttgcattttaataacattagctatacttgctgtttccaactctttcctcctatttttgaacattttaaattttgtctttctctgtccttccttccttctttcctcctttcctccctcagagctttctccctccctccatttttttcataaactccaagtgtttaggccaaaaggaagcattatttgaactttatgctaaaagtataatgccgtaatttataatataaaagtaaagaaaaggaagttgttaatggaatatgaaaaaatgcctagggtgattctatagccaagacagtaccttttaacatttaatttctgcctccaactgaatgttttcagaacacatgagcaacacaagctctttcccattcttggtacaagcacttgagaaatcaaattagccttatctagtatgattaatgtccatacatcatataatcccaccatctgcctcctgatcataccccctggggacattcttggctatgtgtccaggagacatgtacaccaatgtttatggcaaaaactggaaacaatcacatatacatcaatgggaattaacaaaatagtcgtataataataaaaagtaaaacttcagcagcaacagtgaatgaacagcaccctcccacatcagagataactctcctacacataacatgcatcagcatcacagaagaatgcacattgtgtgagttctctgtacggggaagttaaaaaaagcaggtcaaactgtgatttggatatatatatatatacttattgtaaaaatctttagagacaatgaaaaggaatagtaaatacaagactcaagatagaagttccttttggggaatagaattggacaacagccgagggtggcttcataggttttgttttttatgccaggaggggatgtccaggtagttaagttacttgatcataaatctttcttttttctttctttctttcttttcgagatggagtctccctcttgttgcccaggctggagtgcagtggcatgatctcagttcactgcaacctccgcctcccaggttcaagcaattctcctacctcagcctcctgagtagctggaattataggcatccaccacgacacccagccctgggggaagctggctgttgtgtcataaggaggcctgtggtccatgtgactaggaagtgagtcctcctgggaccagacaataagaagctaaagcctcttccaaaagccatgtgagagattcttgtgtcttgtgaatccccggccccatttgagccctcagatgattcagccctggaagacaactagactgcaacgttgtgagaggccctgagccagaagcattcagagaaacttctcctggattcctgaccatggataactgtgggagatgataaatatttgttgatttgagctgctaagttgtaggtgacttgttatgcagcagtagataactaatacagcttcacaagagaggatgaatcactgaactttttcatttgctctaaattcattataagatattaaacatgtcatttgctttt

SEQ ID NO: 13147 - protein, 113 aa, Homo sapiens; identical to SEQ ID NO: 13141

SEQ ID NO: 13148 - DNA, 1618 bp, Homo sapiens
ctacccactgtagttaataaacaaaaagcaaactggtctctattctatctcatgcactcaggcacaacttttccagatttaaaaaacaaacaaacaacaacaacaaaaaaccctgtctctacacctccattcccagggcaagctcactctctggcaacaagctccctggggtgatttttcttctagaagagtccacggggacaggtaaggagtaggaggcagggagtccagttctgggacggggattccgtgatgcaaagtgaagagagagggacggggcccattccgagggtttctccctggtttctcagacagctcctgggccaagactcagggaaacattgagacagagcgcttggcacagaagtagcggggtcagggcgaagtcccagggcctcaggcgtggctctcaggatctcaggccccaaaggcggtgtatggattggggaggcccagcgctgggcattccccatctttgcagggtttctcttctccctctcccaacctgtgtcgggtccttcttcctgggtactcaccgggctgccccagttctcactcccattgagtgtcgggtttctagagaagccaatcaatgtagccgcggtcccggttctaaagttcccacgcacccaccgggactccgattcttcccagtcgccgaggatggtgtcatggcgccccgaaccctgcttctgctgctctcgggggccctggtcctgacccagacctgggcaggcttccactccttgaggtatttccacaccaccatgtcccggcccggccgcgcggatccccgcttcctctccgtgggcgacgtggacgacacgcagtgcgtgcggctcgacagcgacgccacgagtcccaggatggagccgcgggcgccgtggatggagcaggaggggccggaatattgggaagaggagacagggaccgccaaggccaaagcacagttttaccgagtgaacctgcggaccctgagcggctactacaaccagagtgaggcctaagtgcagcttcattccctccctgttcgtgtggcctggacttaatgactcacttctaactgatagagtaatgctgacataatagtttgtgattctgggtgtagaacataagactcactgaagtttctactttggttctttctttctctggaatcatgagccctgggggaagctggctgttgtgtcataaggaggcctgtggtccatgtgactaggaagtgagtcctcctgggaccagacaataagaagctaaagcctcttccaaaagccatgtgagagattcttgtgtcttgtgaatccccggccccatttgagccctcagatgattcagccctggaagacaactagactgcaacgttgtgagaggccctgagccagaagcattcagagaaacttctcctggattcctgaccatggataactgtgggagatgataaatatttgttgatttgagctgctaagttgtaggtgacttgttatgcagcagtagataactaatacagcttcacaagagaggatgaatcactgaactttttcatttgctctaaattcattataagatattaaacatgtcatttgcttttaatatttaataaaaatttccatggctatat

SEQ ID NO: 13149 - protein, 189 aa, Homo sapiens
MDWGGPALGIPHLCRVSLLPLPTCVGSFFLGTHRAAPVLTPIECRVSREANQCSRGPGSKVPTHPPGLRFFPVAEDGVMAPRTLLLLLSGALVLTQTWAGFHSLRYFHTTMSRPGRADPRFLSVGDVDDTQCVRLDSDATSPRMEPRAPWMEQEGPEYWEEETGTAKAKAQFYRVNLRTLSGYYNQSEA

SEQ ID NO: 13150 - DNA, 3798 bp, Homo sapiens
agtcgccgaggatggtgtcatggcgccccgaaccctgcttctgctgctctcgggggccctggtcctgacccagacctgggcaggcttccactccttgaggtatttccacaccaccatgtcccggcccggccgcgcggatccccgcttcctctccgtgggcgacgtggacgacacgcagtgcgtgcggctcgacagcgacgccacgagtcccaggatggagccgcgggcgccgtggatggagcaggaggggccggaatattgggaagaggagacagggaccgccaaggccaaagcacagttttaccgagtgaacctgcggaccctgagcggctactacaaccagagtgaggcctgggctgccagccacacagagtcatggacaggtctctacagacacaacttagtgccagcttggatgaaaccctctgaggaatgggtgccatctttcaggatgtggtgcatgtattgaatcaaagatgtctctatagtgctgtgtttacagaaggaagaatacgtgggtccaaaaaccaagaagtagaagcaggtgtggctccatatctaaacccttatattcaccttcagggtgattttgcacttctcatctccaatatctgggctctgtaggggaggaggtcctggtttcccaaagggggcaccctggcaaggagacatttaaatgagagtccatggaaatatacattatggctgcccccagggatgtttgaatagtatgtgtccagatacaagcaggtgagaagaggaggaggcagggctgctatcacacaaggagggcaggagatgtgtgtgtggaaataagagatccacttggagaccttatggttccccttgtcctgttgtaagtgtgagcagaatcatccagcaacccagcctgagagggtttcatattcaagagcccagaaccctcaggaaggaaggattgagtgatactcacaggtaatgtcccaaggctgtgctcctgtgctctgacatcctcagcaggattggtgcaaagccctgcttcccatgggctgttcccagccagtgactggtcacagcaggcattaaggcaagccattcctgggagacacgggactcctctgatggctaactgtagctggaagactcctccacggccttgctcaactctccttagattgcctgtgctctaggatgcgtcaaacaaactttctctccttctgtccagcacttggggtcacacttgcatcgtggtctgccgccttttctcagggatttctggctcacttcccatattcccttacgggtgtgtccccttataagatgtcgcagactttaagctcatcttggcatctgctccttgaaggacttggactaaaaattatttccatctgcatatcaataactcttattccaacctgtaaaatccttctctttatccaacttctgccacccccacagaatctattttacttgtgtgtgtagtatctctttgagttaacagatatttgttctattaagctactaaattttgaggtagtttgtgacacagcacttgataactattaaggctttcttaagtttccattattccatggatattatctacatatcttttaatcccttgcattttaataacattagctatacttgctgtttccaactctttcctcctatttttgaacattttaaattttgtctttctctgtccttccttccttctttcctcctttcctccctcagagctttctccctccctccatttttttcataaactccaagtgtttaggccaaaaggaagcattatttgaactttatgctaaaagtataatgccgtaatttataatataaaagtaaagaaaaggaagttgttaatggaatatgaaaaaatgcctagggtgattctatagccaagacagtaccttttaacatttaatttctgcctccaactgaatgttttcagaacacatgagcaacacaagctctttcccattcttggtacaagcacttgagaaatcaaattagccttatctagtatgattaatgtccatacatcatataatcccaccatctgcctcctgatcataccccctggggacattcttggctatgtgtccaggagacatgtacaccaatgtttatggcaaaaactggaaacaatcacatatacatcaatgggaattaacaaaatagtcgtataataataaaaagtaaaacttcagcagcaacagtgaatgaacagcaccctcccacatcagagataactctcctacacataacatgcatcagcatcacagaagaatgcacattgtgtgagttctctgtacggggaagttaaaaaaagcaggtcaaactgtgatttggatatatatatatatacttattgtaaaaatctttagagacaatgaaaaggaatagtaaatacaagactcaagatagaagttccttttggggaatagaattggacaacagccgagggtggcttcataggttttgttttttatgccaggaggggatgtccaggtagttaagttacttgatcataaatctttcttttttctttctttctttcttttcgagatggagtctccctcttgttgcccaggctggagtgcagtggcatgatctcagttcactgcaacctccgcctcccaggttcaagcaattctcctacctcagcctcctgagtagctggaattataggcatccaccacgacacccaggtaatttttgtatttttagtagagacggggtttcaccatattgtccaggttggtctcaaactcctgacctcaggtgatccgccaacttcggccttccaaagtgctgggattacagacatgagccaccattcccggcccacaaatctttaaagtgtcatttttcaaaatgcaccttgtgtgccattcctgactgattatttggaaatgaaagagaaaagaaaataccaaagttcatctcaaggatccttagcaataactacacacgttaaaacaaagccacagccaattgtaaagagtcatgtgacagagaggaccaggatctcatgaaaaatagccttggctagaaagaggtcatttgaccctgggctaattggcaactctctacattgtctggcatacagtgttcaatctgatgtgcaaggcaattgtatcttgcaaagaatttgagaatttgatatgttgctcacattttaccacacatacaagtggattaaacttttacacagtaaaaaaaaaaagcattgttgagcaaaataaattaaatgaaaagacataaaggaataactagtgatgaaatagcaataagaatggaaaacatgaaagagatgcttgtacagcaatgatagcagcacaaaagaacagtgtttttcagaatcatacaggagtccaaatcacttctaccacatctaattaaaaaacacagtgaaagatgttaaactttcataggatgcccactgaatagccagttattgaaaaatcttgttcctagattggagtaaacaatttctgcctaccctagccaaacaaattattgtcatgatgctaagctagtgtatagacagaggtgtgagattcacatttttctaactgcaaagcaccctgattaggcaaatatttttgtagatgcttgagtaagaaaattggcattttgggcattcttaaaccgaattagaaacttctgaagagaaacaaacgtagttatgattgtaaaggcattattgtatggcaccaaagtcttgggacactttaatttagctactgtattttctcaactctgttgcaacttatcaaagagaatattaatattaaaggcatttac

SEQ ID NO: 13151 - protein, 149 aa, Homo sapiens
MAPRTLLLLLSGALVLTQTWAGFHSLRYFHTTMSRPGRADPRFLSVGDVDDTQCVRLDSDATSPRMEPRAPWMEQEGPEYWEEETGTAKAKAQFYRVNLRTLSGYYNQSEAWAASHTESWTGLYRHNLVPAWMKPSEEWVPSFRMWCMY

SEQ ID NO: 13152 - DNA, 1383 bp, Homo sapiens
atatagtaacatagtgtggtactttgtcttgaggagatgtcctggactcacacggaaacttagggctacggaatgaagacgccaaggatggtggtcatggcgccccgaaccctcttcctgctgctctcgggggccctgaccctgaccgagacctgggcgggctcccactccatgaggtatttcagcgccgccgtgtcccggcccggccgcggggagccccgcttcatcgccatgggctacgtggacgacacgcagttcgtgcggttcgacagcgactcggcgtgtccgaggatggagccgcgggcgccgtgggtggagcaggaggggccggagtattgggaagaggagacacggaacaccaaggcccacgcacagactgacagaatgaacctgcagaccctgcgcggctactacaaccagagcgaggccagttctcacaccctccagtggatgattggctgcgacctggggtccgacggacgcctcctccgcgggtatgaacagtatgcctacgatggcaaggattacctcgccctgaacgaggacctgcgctcctggaccgcagcggacactgcggctcagatctccaagcgcaagtgtgaggcggccaatgtggctgaacaaaggagagcctacctggagggcacgtgcgtggagtggctccacagatacctggagaacgggaaggagatgctgcagcgcgcggacccccccaagacacacgtgacccaccaccctgtctttgactatgaggccaccctgaggtgctgggccctgggcttctaccctgcggagatcatactgacctggcagcgggatggggaggaccagacccaggacgtggagctcgtggagaccaggcctgcaggggatggaaccttccagaagtgggcagctgtggtggtgccttctggagaggagcagagatacacgtgccatgtgcagcatgaggggctgccggagcccctcatgctgagatggaagcagtcttccctgcccaccatccccatcatgggtatcgttgctggcctggttgtccttgcagctgtagtcactggagctgcggtcgctgctgtgctgtggagaaagaagagctcagattgaaaaggagggagctactctcaggctgcaatgtgaaacagctgccctgtgtgggactgagtggcaagtccctttgtgacttcaagaaccctgactcctctttgtgcagagaccagcccacccctgtgcccaccatgaccctcttcctcatgctgaactgcattccttccccaatcacctttcctgttccagaaaaggggctgggatgtctccgtctctgtctcaaatttgtggtccactgagctataacttacttctgtattaaaattagaatctgagtat

SEQ ID NO: 13153 - protein, 343 aa, Homo sapiens
MKTPRMVVMAPRTLFLLLSGALTLTETWAGSHSMRYFSAAVSRPGRGEPRFIAMGYVDDTQFVRFDSDSACPRMEPRAPWVEQEGPEYWEEETRNTKAHAQTDRMNLQTLRGYYNQSEASSHTLQWMIGCDLGSDGRLLRGYEQYAYDGKDYLALNEDLRSWTAADTAAQISKRKCEAANVAEQRRAYLEGTCVEWLHRYLENGKEMLQRADPPKTHVTHHPVFDYEATLRCWALGFYPAEIILTWQRDGEDQTQDVELVETRPAGDGTFQKWAAVVVPSGEEQRYTCHVQHEGLPEPLMLRWKQSSLPTIPIMGIVAGLVVLAAVVTGAAVAAVLWRKKSSD

SEQ ID NO: 13154 - DNA, 1966 bp, Homo sapiens
atatagtaacatagtgtggtactttgtcttgaggagatgtcctggactcacacggaaacttagggctacggaatgaagacgccaaggatggtggtcatggcgccccgaaccctcttcctgctgctctcgggggccctgaccctgaccgagacctgggcgggctcccactccatgaggtatttcagcgccgccgtgtcccggcccggccgcggggagccccgcttcatcgccatgggctacgtggacgacacgcagttcgtgcggttcgacagcgactcggcgtgtccgaggatggagccgcgggcgccgtgggtggagcaggaggggccggagtattgggaagaggagacacggaacaccaaggcccacgcacagactgacagaatgaacctgcagaccctgcgcggctactacaaccagagcgaggccagtgagtaactccggcccagggagcagatcacgacccccacctccatgccccacggacggcccgggtactcccgagtctccgggtctgggatccaccccgaggccgcgggacccgcccagaccctctacctgggagaaccccaaggcgcctttaccaaaatccccgcgggtgggtccgggcgagggcgaggctcggtgggcggggctgaccgagggggtggggccaggttctcacaccctccagtggatgattggctgcgacctggggtccgacggacgcctcctccgcgggtatgaacagtatgcctacgatggcaaggattacctcgccctgaacgaggacctgcgctcctggaccgcagcggacactgcggctcagatctccaagcgcaagtgtgaggcggccaatgtggctgaacaaaggagagcctacctggagggcacgtgcgtggagtggctccacagatacctggagaacgggaaggagatgctgcagcgcgcggacccccccaagacacacgtgacccaccaccctgtctttgactatgaggccaccctgaggtgctgggccctgggcttctaccctgcggagatcatactgacctggcagcgggatggggaggaccagacccaggacgtggagctcgtggagaccaggcctgcaggggatggaaccttccagaagtgggcagctgtggtggtgccttctggagaggagcagagatacacgtgccatgtgcagcatgaggggctgccggagcccctcatgctgagatggaagcagtcttccctgcccaccatccccatcatgggtatcgttgctggcctggttgtccttgcagctgtagtcactggagctgcggtcgctgctgtgctgtggagaaagaagagctcagattgaaaaggagggagctactctcaggctgcaagtaagtatgaaggaggctgatccctgagatccttgggatcttgtgtttgggagcccatgggggagctcacccaccccacaattcctcctctggccacatctcctgtggtctctgaccaggtgctgtttttgttctactctaggcagtgacagtgcccagggctctaatgtgtctctcacggcttgtaaatgtgacaccccggggggcctgatgtgtgtgggttgttgaggggaacaggggacatagctgtgctatgaggtttctttgacttcaatgtattgagcatgtgatgggctgtttaaagtgtcacccctcactgtgactgatatgaatttgttcatgaatatttttctgtagtgtgaaacagctgccctgtgtgggactgagtggcaagtccctttgtgacttcaagaaccctgactcctctttgtgcagagaccagcccacccctgtgcccaccatgaccctcttcctcatgctgaactgcattccttccccaatcacctttcctgttccagaaaaggggctgggatgtctccgtctctgtctcaaatttgtggtccactgagctataacttacttctgtattaaaattagaatctgagtat

SEQ ID NO: 13155 - protein, 217 aa, Homo sapiens
MIGCDLGSDGRLLRGYEQYAYDGKDYLALNEDLRSWTAADTAAQISKRKCEAANVAEQRRAYLEGTCVEWLHRYLENGKEMLQRADPPKTHVTHHPVFDYEATLRCWALGFYPAEIILTWQRDGEDQTQDVELVETRPAGDGTFQKWAAVVVPSGEEQRYTCHVQHEGLPEPLMLRWKQSSLPTIPIMGIVAGLVVLAAVVTGAAVAAVLWRKKSSD

SEQ ID NO: 13156 - DNA, 1834 bp, Homo sapiens
cccattaggtgacaggtttttagagaagccaatcagcgtcgccgcggtcctggttctaaagtcctcgctcacccacccggactcattctccccagacgccaaggatggtggtcatggcgccccgaaccctcttcctgctgctctcgggggccctgaccctgaccgagacctgggcgggctcccactccatgaggtatttcagcgccgccgtgtcccggcccggccgcggggagccccgcttcatcgccatgggctacgtggacgacacgcagttcgtgcggttcgacagcgactcggcgtgtccgaggatggagccgcgggcgccgtgggtggagcaggaggggccggagtattgggaagaggagacacggaacaccaaggcccacgcacagactgacagaatgaacctgcagaccctgcgcggctactacaaccagagcgaggccagttctcacaccctccagtggatgattggctgcgacctggggtccgacggacgcctcctccgcgggtatgaacagtatgcctacgatggcaaggattacctcgccctgaacgaggacctgcgctcctggaccgcagcggacactgcggctcagatctccaagcgcaagtgtgaggcggccaatgtggctgaacaaaggagagcctacctggagggcacgtgcgtggagtggctccacagatacctggagaacgggaaggagatgctgcagcgcgcggacccccccaagacacacgtgacccaccaccctgtctttgactatgaggccaccctgaggtgctgggccctgggcttctaccctgcggagatcatactgacctggcagcgggatggggaggaccagacccaggacgtggagctcgtggagaccaggcctgcaggggatggaaccttccagaagtgggcagctgtggtggtgccttctggagaggagcagagatacacgtgccatgtgcagcatgaggggctgccggagcccctcatgctgagatggaagcagtcttccctgcccaccatccccatcatgggtatcgttgctggcctggttgtccttgcagctgtagtcactggagctgcggtcgctgctgtgctgtggagaaagaagagctcagattgaaaaggagggagctactctcaggctgcaagtaagtatgaaggaggctgatccctgagatccttgggatcttgtgtttgggagcccatgggggagctcacccaccccacaattcctcctctggccacatctcctgtggtctctgaccaggtgctgtttttgttctactctaggcagtgacagtgcccagggctctaatgtgtctctcacggcttgtaaatgtgacaccccggggggcctgatgtgtgtgggttgttgaggggaacaggggacatagctgtgctatgaggtttctttgacttcaatgtattgagcatgtgatgggctgtttaaagtgtcacccctcactgtgactgatatgaatttgttcatgaatatttttctgtagtgtgaaacagctgccctgtgtgggactgagtggcaagtccctttgtgacttcaagaaccctgactcctctttgtgcagagaccagcccacccctgtgcccaccatgaccctcttcctcatgctgaactgcattccttccccaatcacctttcctgttccagaaaaggggctgggatgtctccgtctctgtctcaaatttgtggtccactgagctataacttacttctgtattaaaattagaatctgagtataaatttactttttcaaattatttccaagagagattgatgggttaattaaaggagaagattcctgaaatttgagagac

SEQ ID NO: 13157 - protein, 338 aa, Homo sapiens; identical to SEQ ID NO: 1376

SEQ ID NO: 13158 - DNA, 1544 bp, Homo sapiens
attctccccagacgccaaggatggtggtcatggcgccccgaaccctcttcctgctgctctcgggggccctgaccctgaccgagacctgggcgggctcccactccatgaggtatttcagcgccgccgtgtcccggcccggccgcggggagccccgcttcatcgccatgggctacgtggacgacacgcagttcgtgcggttcgacagcgactcggcgtgtccgaggatggagccgcgggcgccgtgggtggagcaggaggggccggagtattgggaagaggagacacggaacaccaaggcccacgcacagactgacagaatgaacctgcagaccctgcgcggctactacaaccagagcgaggccagttctcacaccctccagtggatgattggctgcgacctggggtccgacggacgcctcctccgcgggtatgaacagtatgcctacgatggcaaggattacctcgccctgaacgaggacctgcgctcctggaccgcagcggacactgcggctcagatctccaagcgcaagtgtgaggcggccaatgtggctgaacaaaggagagcctacctggagggcacgtgcgtggagtggctccacagatacctggagaacgggaaggagatgctgcagcgcgcggacccccccaagacacacgtgacccaccaccctgtctttgactatgaggccaccctgaggtgctgggccctgggcttctaccctgcggagatcatactgacctggcagcgggatggggaggaccagacccaggacgtggagctcgtggagaccaggcctgcaggggatggaaccttccagaagtgggcagctgtggtggtgccttctggagaggagcagagatacacgtgccatgtgcagcatgaggggctgccggagcccctcatgctgagatggagtaaggagggagatggaggcatcatgtctgttagggaaagcaggagcctctctgaagacctttaacagggtcggtggtgagggctgggggtcagagaccctcaccttcacctcctttcccagagcagtcttccctgcccaccatccccatcatgggtatcgttgctggcctggttgtccttgcagctgtagtcactggagctgcggtcgctgctgtgctgtggagaaagaagagctcagattgaaaaggagggagctactctcaggctgcaatgtgaaacagctgccctgtgtgggactgagtggcaagtccctttgtgacttcaagaaccctgactcctctttgtgcagagaccagcccacccctgtgcccaccatgaccctcttcctcatgctgaactgcattccttccccaatcacctttcctgttccagaaaaggggctgggatgtctccgtctctgtctcaaatttgtggtccactgagctataacttacttctgtattaaaattagaatctgagtataaatttactttttcaaattatttccaagagagattgatgggttaattaaaggagaagattcctgaaatttgagagacaaaataaatggaagacatgagaactttcc

SEQ ID NO: 13159 - protein, 319 aa, Homo sapiens
MVVMAPRTLFLLLSGALTLTETWAGSHSMRYFSAAVSRPGRGEPRFIAMGYVDDTQFVRFDSDSACPRMEPRAPWVEQEGPEYWEEETRNTKAHAQTDRMNLQTLRGYYNQSEASSHTLQWMIGCDLGSDGRLLRGYEQYAYDGKDYLALNEDLRSWTAADTAAQISKRKCEAANVAEQRRAYLEGTCVEWLHRYLENGKEMLQRADPPKTHVTHHPVFDYEATLRCWALGFYPAEIILTWQRDGEDQTQDVELVETRPAGDGTFQKWAAVVVPSGEEQRYTCHVQHEGLPEPLMLRWSKEGDGGIMSVRESRSLSEDL

SEQ ID NO: 13160 - DNA, 875 bp, Homo sapiens
attctccccagacgccaaggatggtggtcatggcgccccgaaccctcttcctgctgctctcgggggccctgaccctgaccgagacctgggcgggctcccactccatgaggtatttcagcgccgccgtgtcccggcccggccgcggggagccccgcttcatcgccatgggctacgtggacgacacgcagttcgtgcggttcgacagcgactcggcgtgtccgaggatggagccgcgggcgccgtgggtggagcaggaggggccggagtattgggaagaggagacacggaacaccaaggcccacgcacagactgacagaatgaacctgcagaccctgcgcggctactacaaccagagcgaggccagttctcacaccctccagtggatgattggctgcgacctggggtccgacggacgcctcctccgcgggtatgaacagtatgcctacgatggcaaggattacctcgccctgaacgaggacctgcgctcctggaccgcagcggacactgcggctcagatctccaagcgcaagtgtgaggcggccaatgtggctgaacaaaggagagcctacctggagggcacgtgcgtggagtggctccacagatacctggagaacgggaaggagatgctgcagcgcgcggacccccccaagacacacgtgacccaccaccctgtctttgactatgaggccaccctgaggtgctgggccctgggcttctaccctgcggagatcatactgacctggcagcgggatggggaggaccagacccaggacgtggagctcgtggagaccaggcctgcaggggatggaaccttccagaagtgggcagctgtggtggtgccttctggagaggaacagagatacccgtgccatgtg

SEQ ID NO: 13161 - protein, 284 aa, Homo sapiens
MVVMAPRTLFLLLSGALTLTETWAGSHSMRYFSAAVSRPGRGEPRFIAMGYVDDTQFVRFDSDSACPRMEPRAPWVEQEGPEYWEEETRNTKAHAQTDRMNLQTLRGYYNQSEASSHTLQWMIGCDLGSDGRLLRGYEQYAYDGKDYLALNEDLRSWTAADTAAQISKRKCEAANVAEQRRAYLEGTCVEWLHRYLENGKEMLQRADPPKTHVTHHPVFDYEATLRCWALGFYPAEIILTWQRDGEDQTQDVELVETRPAGDGTFQKWAAVVVPSGEEQRYPCH

SEQ ID NO: 13162 - DNA, 1411 bp, Homo sapiens
acgccaaggatggtggtcatggcgccccgaaccctcttcctgctgctctcgggggccctgaccctgaccgagacctgggcgggctcccactccatgaggtatttcagcgccgccgtgtcccggcccggccgcggggagccccgcttcatcgccatgggctacgtggacgacacgcagttcgtgcggttcgacagcgactcggcgtgtccgaggatggagccgcgggcgccgtgggtggagcaggaggggccggagtattgggaagaggagacacggaacaccaaggcccacgcacagactgacagaatgaacctgcagaccctgcgcggctactacaaccagagcgaggccagttctcacaccctccagtggatgattggctgcgacctggggtccgacggacgcctcctccgcgggtatgaacagtatgcctacgatggcaaggattacctcgccctgaacgaggacctgcgctcctggaccgcagcggacactgcggctcagatctccaagcgcaagtgtgaggcggccaatgtggctgaacaaaggagagcctacctggagggcacgtgcgtggagtggctccacagatacctggagaacgggaaggagatgctgcagcgcgcggacccccccaagacacacgtgacccaccaccctgtctttgactatgaggccaccctgaggtgctgggccctgggcttctaccctgcggagatcatactgacctggcagcgggatggggaggaccagacccaggacgtggagctcgtggagaccaggcctgcaggggatggaaccttccagaagtgggcagctgtggtggtgccttctggagaggagcagagatacacgtgccatgtgcagcatgaggggctgccggagcccctcatgctgagatggaagcagtcttccctgcccaccatccccatcatgggtatcgttgctggcctggttgtccttgcagctgtagtcactggagctgcggtcgctgctgtgctgtggagaaagaagagctcagattgaaaaggagggagctactctcaggctgcaatgtgaaacagctgccctgtgtgggactgagtggcaagtccctttgtgacttcaagaaccctgactcctctttgtgcagagaccagcccacccctgtgcccaccatgaccctcttcctcatgctgaactgcattccttccccaatcacctttcctgttccagaaaaggggctgggatgtctccgtctctgtctcaaatttgtggtccactgagctataacttacttctgtattaaaattagaatctgagtataaatttactttttcaaattatttccaagagagattgatgggttaattaaaggagaagattcctgaaatttgagagacaaaataaatggaagacatgagaactttcc

SEQ ID NO: 13163 - protein, 338 aa, Homo sapiens; identical to SEQ ID NO: 1376

SEQ ID NO: 13164 - DNA, 904 bp, Homo sapiens
atggtggtcatggcgccccgaaccctcttcctgctgctctcgggggccctgaccctgaccgagacctgggcgggctcccactccatgaggtatttcagcgccgccgtgtcccggcccggccgcggggagccccgcttcatcgccatgggctacgtggacgacacgcagttcgtgcggttcgacagcgactcggcgtgtccgaggatggagccgcgggcgccgtgggtggagcaggaggggccggagtattgggaagaggagacacggaacaccaaggcccacgcacagactgacagaatgaacctgcagaccctgcgcggctactacaaccagagcgaggccaacccccccaagacacacgtgacccaccaccctgtctttgactatgaggccaccctgaggtgctgggccctgggcttctaccctgcggagatcatactgacctggcagcgggatggggaggaccagacccaggacgtggagctcgtggagaccaggcctgcaggggatggaaccttccagaagtgggcagctgtggtggtgccttctggagaggagcagagatacacgtgccatgtgcagcatgaggggctgccggagcccctcatgctgagatggaagcagtcttccctgcccaccatccccatcatgggtatcgttgctggcctggttgtccttgcagctgtagtcactggagctgcggtcgctgctgtgctgtggagaaagaagagctcagattgaaaaggagggagctactctcaggctgcaagcagtgacagtgcccagggctctaatgtgtctctcacggcttgtaaattgtgaaacagctgccctgtgtgggactgagtggcaagtccctttgtgacttcaagaaccctgactcctctttgtgcagagaccagcc

SEQ ID NO: 13165 - protein, 246 aa, Homo sapiens
MVVMAPRTLFLLLSGALTLTETWAGSHSMRYFSAAVSRPGRGEPRFIAMGYVDDTQFVRFDSDSACPRMEPRAPWVEQEGPEYWEEETRNTKAHAQTDRMNLQTLRGYYNQSEANPPKTHVTHHPVFDYEATLRCWALGFYPAEIILTWQRDGEDQTQDVELVETRPAGDGTFQKWAAVVVPSGEEQRYTCHVQHEGLPEPLMLRWKQSSLPTIPIMGIVAGLVVLAAVVTGAAVAAVLWRKKSSD

SEQ ID NO: 13166 - DNA, 1020 bp, Homo sapiens
atggtggtcatggcgccccgaaccctcttcctgctgctctcgggggccctgaccctgaccgagacctgggcgggctcccactccatgaggtatttcagcgccgccgtgtcccggcccggccgcggggagccccgcttcatcgccatgggctacgtggacgacacgcagttcgtgcggttcgacagcgactcggcgtgtccgaggatggagccgcgggcgccgtgggtggagcaggaggggccggagtattgggaagaggagacacggaacaccaaggcccacgcacagactgacagaatgaacctgcagaccctgcgcggctactacaaccagagcgaggccaacccccccaagacacacgtgacccaccaccctgtctttgactatgaggccaccctgaggtgctgggccctgggcttctaccctgcggagatcatactgacctggcagcgggatggggaggaccagacccaggacgtggagctcgtggagaccaggcctgcaggggatggaaccttccagaagtgggcagctgtggtggtgccttctggagaggagcagagatacacgtgccatgtgcagcatgaggggctgccggagcccctcatgctgagatggaagcagtcttccctgcccaccatccccatcatgggtatcgttgctggcctggttgtccttgcagctgtagtcactggagctgcggtcgctgctgtgctgtggagaaagaagagctcagattgaaaaggagggagctactctcaggctgcaatgtgaaacagctgccctgtgtgggactgagtggcaagtccctttgtgacttcaagaaccctgactcctctttgtgcagagaccagcccacccctgtgcccaccatgaccctcttcctcatgctgaactgcattccttccccaatcacctttcctgttccagaaaaggggctgggatgtctccgtctctgtctcaaatttgtggtccactgagctataacttacttctgtattaaaattagaatctgagtat

SEQ ID NO: 13167 - protein, 246 aa, Homo sapiens; identical to SEQ ID NO: 13165

SEQ ID NO: 13168 - DNA, 850 bp, Homo sapiens
atggtggtcatggcgccccgaaccctcttcctgctgctctcgggggccctgaccctgaccgagacctgggcgggctcccactccatgaggtatttcagcgccgccgtgtcccggcccggccgcggggagccccgcttcatcgccatgggctacgtggacgacacgcagttcgtgcggttcgacagcgactcggcgtgtccgaggatggagccgcgggcgccgtgggtggagcaggaggggccggagtattgggaagaggagacacggaacaccaaggcccacgcacagactgacagaatgaacctgcagaccctgcgcggctactacaaccagagcgaggccaagcagtcttccctgcccaccatccccatcatgggtatcgttgctggcctggttgtccttgcagctgtagtcactggagctgcggtcgctgctgtgctgtggagaaagaagagctcagattgaaaaggagggagctactctcaggctgcaatgtgaaacagctgccctgtgtgggactgagtggcaagtccctttgtgacttcaagaaccctgactcctctttgtgcagagaccagcccacccctgtgcccaccatgaccctcttcctcatgctgaactgcattccttccccaatcacctttcctgttccagaaaaggggctgggatgtctccgtctctgtctcaaatttgtggtccactgagctataacttacttctgtattaaaattagaatctgagtataaatttactttttcaaattatttccaagagagattgatgggttaattaaaggagaagattcctgaaatttgagagacaaaataaatggaagacatgagaactttcc

SEQ ID NO: 13169 - protein, 154 aa, Homo sapiens
MVVMAPRTLFLLLSGALTLTETWAGSHSMRYFSAAVSRPGRGEPRFIAMGYVDDTQFVRFDSDSACPRMEPRAPWVEQEGPEYWEEETRNTKAHAQTDRMNLQTLRGYYNQSEAKQSSLPTIPIMGIVAGLVVLAAVVTGAAVAAVLWRKKSSD

SEQ ID NO: 13170 - DNA, 1126 bp, Homo sapiens
atggtggtcatggcgccccgaaccctcttcctgctgctctcgggggccctgaccctgaccgagacctgggcgggctcccactccatgaggtatttcagcgccgccgtgtcccggcccggccgcggggagccccgcttcatcgccatgggctacgtggacgacacgcagttcgtgcggttcgacagcgactcggcgtgtccgaggatggagccgcgggcgccgtgggtggagcaggaggggccggagtattgggaagaggagacacggaacaccaaggcccacgcacagactgacagaatgaacctgcagaccctgcgcggctactacaaccagagcgaggccaacccccccaagacacacgtgacccaccaccctgtctttgactatgaggccaccctgaggtgctgggccctgggcttctaccctgcggagatcatactgacctggcagcgggatggggaggaccagacccaggacgtggagctcgtggagaccaggcctgcaggggatggaaccttccagaagtgggcagctgtggtggtgccttctggagaggagcagagatacacgtgccatgtgcagcatgaggggctgccggagcccctcatgctgagatggaagcagtcttccctgcccaccatccccatcatgggtatcgttgctggcctggttgtccttgcagctgtagtcactggagctgcggtcgctgctgtgctgtggagaaagaagagctcagattgaaaaggagggagctactctcaggctgcaatgtgaaacagctgccctgtgtgggactgagtggcaagtccctttgtgacttcaagaaccctgactcctctttgtgcagagaccagcccacccctgtgcccaccatgaccctcttcctcatgctgaactgcattccttccccaatcacctttcctgttccagaaaaggggctgggatgtctccgtctctgtctcaaatttgtggtccactgagctataacttacttctgtattaaaattagaatctgagtataaatttactttttcaaattatttccaagagagattgatgggttaattaaaggagaagattcctgaaatttgagagacaaaataaatggaagacatgagaactttcc

SEQ ID NO: 13171 - protein, 246 aa, Homo sapiens; identical to SEQ ID NO: 13165

SEQ ID NO: 13172 - DNA, 1072 bp, Homo sapiens
ggggtggggccaggttctcacaccctccagtggatgattggctgcgacctggggtccgacggacgcctcctccgcgggtatgaacagtatgcctacgatggcaaggattacctcgccctgaacgaggacctgcgctcctggaccgcagcggacactgcggctcagatctccaagcgcaagtgtgaggcggccaatgtggctgaacaaaggagagcctacctggagggcacgtgcgtggagtggctccacagatacctggagaacgggaaggagatgctgcagcgcgcggacccccccaagacacacgtgacccaccaccctgtctttgactatgaggccaccctgaggtgctgggccctgggcttctaccctgcggagatcatactgacctggcagcgggatggggaggaccagacccaggacgtggagctcgtggagaccaggcctgcaggggatggaaccttccagaagtgggcagctgtggtggtgccttctggagaggagcagagatacacgtgccatgtgcagcatgaggggctgccggagcccctcatgctgagatggaagcagtcttccctgcccaccatccccatcatgggtatcgttgctggcctggttgtccttgcagctgtagtcactggagctgcggtcgctgctgtgctgtggagaaagaagagctcagattgaaaaggagggagctactctcaggctgcaatgtgaaacagctgccctgtgtgggactgagtggcaagtccctttgtgacttcaagaaccctgactcctctttgtgcagagaccagcccacccctgtgcccaccatgaccctcttcctcatgctgaactgcattccttccccaatcacctttcctgttccagaaaaggggctgggatgtctccgtctctgtctcaaatttgtggtccactgagctataacttacttctgtattaaaattagaatctgagtataaatttactttttcaaattatttccaagagagattgatgggttaattaaaggagaagattcctgaaatttgagagacaaaataaatggaagacatgagaactttcc

SEQ ID NO: 13173 - protein, 217 aa, Homo sapiens; identical to SEQ ID NO: 13155

SEQ ID NO: 13174 - DNA, 2296 bp, Homo sapiens
ccttgatactcacgaagcggacacagttctcattcccactaggtgtcgggtttctagagaagccaatcggtgccgccgcggtcccggttctaaagtccccacgcacccaccgggactcagattctccccagacgccgaggatggtgctcatggcgccccgaaccctcctcctgctgctctcaggggccctggccctgaccctgacccagacctgggcgccgacgacgcgagtccgagagaggagccgcgggcgccgtggatggagcgggaggggccagagtattgggaccggaacacacagatctgcaaggcccaggcacagactgaacgagagaacctgcggatcgcgctccgctactacaaccagagcgagggcggttctcacaccatgcaggtgatgtatggctgcgacgtggggcccgacgggcgcttcctccgcgggtatgaacagcacgcctacgacggcaaggattacatcgccctgaacgaggacctgcgctcctggaccgcggcggacatggcagctcagatcaccaagcgcaagtgggaggcggcccgtcgggcggagcagctgagagcctacctggagggcgagttcgtggagtggctccgcagatacctggagaacgggaaggagacgctgcagcgcgcgggtaccaggggccacagggcgcctcccggatcgcctgtagatctccggggctggcctcccacaagaaagggagacaaatgggaccaacactataatatcgccctccctctggtcttgagggagaagaatcctcctgggtttccagagagtgactctgagggtccgccctgctctctgacacaattaagggatgaaatctgtgaggaaatgaagggaagacaatccctggaatactgatgagtggttccctttgacactggcagcagccttgggccccgtgacttttcctctcaggccttgttctctgcttcacactcaatgtgcgtgggggtctgagtccagctcttctgagtccctcagcctccactcaggtcaggaccagaagtcgctgttccctcttcagggactagaattttccacggaataggagattatcccaggtgcctgtgtccaggctgttgtctgggttctgtgctcccttccccaccccaggcatcctgtccattctcaagatggccacatgcgtgctggaggagtgtcccatgacagatgcaaaatgcctgaattttctgactcttcccgtcagaccccccccaagacacatatgacccaccaccccatctctgaccatgaggccaccctgaggtgctgggccctgggcttctaccctgcggagatcacactgacctggcagcgggatggggaggaccagacccaggacacggagctcgtggagaccaggcctgcaggggatggaaccttccagaagtgggcggctgtggtggtgccttctggagaggagcagagatacacctgccatgtgcagcatgagggtctgcccgagcccctcaccctgagatgggagccatcttcccagcccaacgtccccatcgtgggcatcgttgctggcctggttctacttgtagctgtggtcactggagctgtggtcgctgctgtaatgtggaggaagaagagctcagatagaaaaggagggagctactctcaggctgcaagcagcaacagtgcccagggctctgatgtgtctctcacggcttgaaaggtgagaccttggggggcctgatgtgtgggggatgttgggggggaacagtggacacagctgtgctatggggttctttgaatttgatgttttgagcatgcgatgggctgccaaagtgtcatccattactgggacagatatgaatttgttcatgaatattttttctatagtgtgagacagctgccttgtgtgggactgagaggcaagagttgttcctgccttccctttgtgacttgaagaaccctgactttctttctacaaaggcacctgaatgtgtctgtgttcctgtaggcataatgtgtggaggaggggagaccaacccaccctcatgtccaccatgaccctcttccccacgctgatctgtgttccctccccaatcatctttcctgttccagagaggaggggctgagatgtctccatctttttctcaactttatgtgcactgagctgtaacttcttacttccctcttaaaattagaatctgagtaaacatttactttttcaaattcttgccatgagaggttgatgacttaattaaaggagaagattcctaaaatttgagagacaaaataaatggaacacatgag

SEQ ID NO: 13175 - protein, 209 aa, Homo sapiens
MEREGPEYWDRNTQICKAQAQTERENLRIALRYYNQSEGGSHTMQVMYGCDVGPDGRFLRGYEQHAYDGKDYIALNEDLRSWTAADMAAQITKRKWEAARRAEQLRAYLEGEFVEWLRRYLENGKETLQRAGTRGHRAPPGSPVDLRGWPPTRKGDKWDQHYNIALPLVLREKNPPGFPESDSEGPPCSLTQLRDEICEEMKGRQSLEY

SEQ ID NO: 13176 - DNA, 1518 bp, Homo sapiens
atggtgctcatggcgccccgaaccctcctcctgctgctctcaggggccctggccctgaccctgacccagacctgggcgctcccactccatgaggtatttctacaccaccatgtcccggcccggccgcggggagccccgcttcatctccgtcggctacgtggacgatacgcagttcgtgcggttcgacagcgacgacgcgagtccgagagaggagccgcgggcgccgtggatggagcgggaggggccagagtattgggaccggaacacacagatctgcaaggcccaggcacagactgaacgagagaacctgcggatcgcgctccgctactacaaccagagcgagggcggttctcacaccatgcaggtgatgtatggctgcgacgtggggcccgacgggcgcttcctccgcgggtatgaacagcacgcctacgacggcaaggattacatcgccctgaacgaggacctgcgctcctggaccgcggcggacatggcagctcagatcaccaagcgcaagtgggaggcggcccgtcgggcggagcagctgagagcctacctggagggcgagttcgtggagtggctccgcagatacctggagaacgggaaggagacgctgcagcgcgcggaccccccccaagacacatatgacccaccaccccatctctgaccatgaggccaccctgaggtgctgggccctgggcttctaccctgcggagatcacactgacctggcagcgggatggggaggaccagacccaggacacggagctcgtggagaccaggcctgcaggggatggaaccttccagaagtgggcggctgtggtggtgccttctggagaggagcagagatacacctgccatgtgcagcatgagggtctgcccgagcccctcaccctgagatgggagccatcttcccagcccaacgtccccatcgtgggcatcgttgctggcctggttctacttgtagctgtggtcactggagctgtggtcgctgctgtaatgtggaggaagaagagctcagatagaaaaggagggagctactctcaggctgcaagcagcaacagtgcccagggctctgatgtgtctctcacggcttgaaagtgtgagacagctgccttgtgtgggactgagaggcaagagttgttcctgccttccctttgtgacttgaagaaccctgactttctttctacaaaggcacctgaatgtgtctgtgttcctgtaggcataatgtgtggaggaggggagaccaacccaccctcatgtccaccatgaccctcttccccacgctgatctgtgttccctccccaatcatctttcctgttccagagaggaggggctgagatgtctccatctttttctcaactttatgtgcactgagctgtaacttcttacttccctcttaaaattagaatctgagtaaacatttactttttcaaattcttgccatgagaggttgatgacttaattaaaggagaagattcctaaaatttgagagacaaaataaatggaacacatgagaacc

SEQ ID NO: 13177 - protein, 191 aa, Homo sapiens
MRYFYTTMSRPGRGEPRFISVGYVDDTQFVRFDSDDASPREEPRAPWMEREGPEYWDRNTQICKAQAQTERENLRIALRYYNQSEGGSHTMQVMYGCDVGPDGRFLRGYEQHAYDGKDYIALNEDLRSWTAADMAAQITKRKWEAARRAEQLRAYLEGEFVEWLRRYLENGKETLQRADPPQDTYDPPPHL

SEQ ID NO: 13178 - DNA, 322 bp, Homo sapiens
gagaacctgcggatcgcgctccgctactacaaccagagcgagggcggttctcacaccatgcaggtgatgtatggctgcgacgtggggcccgacgggcgcttcctccgcgggtatgaacagcacgcctacgacggcaaggattacatcgccctgaacgaggacctgcgctcctggaccgcggcggacatggcagctcagatcaccaagcgcaagtgggaggcggcccgtcgggcggagcagctgagagcctacctggagggcgagttcgtggagtggctccgcagatacctggagaacgggaaggagacgctgcagcgcgcgg

SEQ ID NO: 13179 - protein, 87 aa, Homo sapiens
MQVMYGCDVGPDGRFLRGYEQHAYDGKDYIALNEDLRSWTAADMAAQITKRKWEAARRAEQLRAYLEGEFVEWLRRYLENGKETLQR

SEQ ID NO: 13180 - DNA, 907 bp, Homo sapiens
cccccccaagacacatatgacccaccaccccatctctgaccatgaggccaccctgaggtgctgggccctgggcttctaccctgcggagatcacactgacctggcagcgggatggggaggaccagacccaggacacggagctcgtggagaccaggcctgcaggggatggaaccttccagaagtgggcggctgtggtggtgccttctggagaggagcagagatacacctgccatgtgcagcatgagggtctgcccgagcccctcaccctgagatgggagccatcttcccagcccaacgtccccatcgtgggcatcgttgctggcctggttctacttgtagctgtggtcactggagctgtggtcgctgctgtaatgtggaggaagaagagctcagatagaaaaggagggagctactctcaggctgcaagcagtgacagtgcccagggctctgatgtgtccctcacagcttgtaaagtgtgagacagctgccttgtgtgggactgagaggcaagagttgttcctgcccttccctttgtgacttgaagaaccctgactttgtttctgcaaaggcacctgcatgtgtctgtgttcgtgtaggcataatgtgaggaggtggggagaccaccccacccccatgtccaccatgaccctcttcccacgctgacctgtgctccctccccaatcatctttcctgttccagagaggtggggctgaggtgtctccatctctgtctcaacttcatggtgcactgagctgtaacttcttccttccctattaaaattagaaccttagtataaatttactttctcaaattcttgccatgagaggttgatgagttaattaaaggagaagattcctaaaatttgagagacaaaataaatggaagacatgagaaccttccagagtcca

SEQ ID NO: 13181 - protein, 153 aa, Homo sapiens
MTHHPISDHEATLRCWALGFYPAEITLTWQRDGEDQTQDTELVETRPAGDGTFQKWAAVVVPSGEEQRYTCHVQHEGLPEPLTLRWEPSSQPNVPIVGIVAGLVLLVAVVTGAVVAAVMWRKKSSDRKGGSYSQAASSDSAQGSDVSLTACKV

SEQ ID NO: 13182 - DNA, 3616 bp, Homo sapiens
ctttggctggctagggaggggatgcaatgatataaacatttatcccctgatacctcatgttaaaatctgatgcccactgtgggacgtggggcctaatggccaccatttgggtcatggtgaccaatcttttatgaatagagagatactgccctctcttgggaatgaatgaattgttgctttattattttccaagagagctagttgttaaaaagaccctggcaacttcctactctctctgttcctctgttaccatgtgttctctgcatataccagctcacctttgtcttctgccatgagtggaagcagcctgaggccctcactaaatgcgcaaacatttccagacatcagaatcttgagccacatgaaccttgtttatataaattagtcagtctcagacatttctttatagcaacacaaaatggaaaaagataacactcgcatcacaggtatgtgtctctggcagctagccaccgttcttaagatatccaggatccactcagccaagagtcttctcatcagtactctaaagacacttatcactcaagagagtctaaggtttttaggagaaaccagggacaaagtctaaatgtttttgtgataactcagattgcccacttttctttgaccacatatcttttacaggaaaaaggattgtaacagtaaagaggtattggcatattatcagagtctcatccattcattcaaaattaggccagtttatcatcctcttgtatgaatatgtctcccagaatgaaatcactcagctttgctgacaacactcaatcttaccaggttccaaaaacaagaatggtctcagggacatacagcttcactcttttaggcatccagtataattgacctaagtgacaatatcttctcttgctcacaccacctttgaggagttaagctaatattgaatttttctcattatataaccctttgatttattcacttgccctcagccactattcctccctctgtccctttatatcagttgtttccaggtttgggagtgacattaggtttgtctgctgggctggcctagactgcaggcagcaatagtattctagcatgtcttccctcagtctagtcttgatcatagagggtaggttatataggtaaggaactagtgggggctatcaagaccaccaggctatataactctacttactgttaatcctaacttttccagatgaaatgaatacttgagaattcttacataaaggtataaaaatatagttatggtttttggcttagggataattcctgtttctggcacttttatttacatccctattcctggtactatggcataacatatgaaaaaataaatttgaggtgaagtgtagtctttattccagcatcctctcctcttcagaagaattgtatgtatcgtcataacagcatcgtcctgatccatcaggtaaaagagaggatgctacctagtggagttattcttgcagccccactcatgttgacagcgagcacattcatgaagatataaaagccagtccttcatgtttatattgcccaacaattagattggcagtttttagacaaacaatgtttcaattgaccatttcaattttctatcaaattttcccctgaggaggacatgtccctctgcattgttggccatttgaggctgtaaagtgtgttttcttgtgtaaagaagtgtgactcggcagtccaaattggtgcaatctcttcttttctggttcttgtatagcccttgaagcattgacatctacccctggttgagcatagcccaatccagagtcagtgattttcctgtcaagatccattggcagctcctttggggttgctggcatcattctggcttgccaggtattatgatcaaagccttcccactagagaatctgtcacatctccatctgctgcctctgtctgttttcttgaccaacagtgaaaaaagagattatgagaaataagataaattaccaaaattgtgaacaaaagagagattatcactaatgacccttaggaagttaaaaaacattataagtgaatactctgaaaaacctgaagccaataagttagaccacttggataaaaaggaccaattcgtgcagagatagaaattgccaaaactgacccaaattaactggaaaacctgaagagaactgtgaactaagtcagaaattgaaaaaccttctcaaaaagaaatgccaaagcccagatatcttcactggtgaattctatcaaatattttgaaagctctttcagacaagaagagaggagggaagactttccagcccatttacagaactggcattaccctcatatcaaagtcacagcaagactcacaggaaaagagtgccatacaccagtgtcaccaataaacataaatgaaaacatccttaacaaacattggcagataatacaaagccacataaaaaaggattacactccatgaccaatgggattcatcccaggaacatatggttggattaacatttgaaaatcagttcatggaatgcactgtattaatggaaaaaaagacataattatctcaaaagatgcaggagaaacagttgacaaaaatgttaacatcactcatgttcataagtttcaacaaaataggaatggaggagaccttcttcactctgataaagggcgtctataaaaaacccacagctaaaatcaaacttaatgaagaaagactgaagactgaatgcttttctcctaagatggggatcaatgcaaggatgtccaatcccaccacttttatttaatattatactggagattgtagccagtgcaataaggcagaaaattaaaaattaaaggcatccagataaaaaggaaaacatacaattctattcacagataacatgaccctgtctgtagaattcacaagcagataaaaactggctagcactaataaatgaatccagaagggcccataggatatcaaatcaatataaaaattaattattaacatatttctctatagaagcaatgaaaatctcaactttcctatcacagtagttaccagaagagcgaaataggaataaatttaggaagacagcagtgtttgttcactgaaaataaaaaaacattcctcagagaaattaaaggtctaaataaatggagagatgcgagttggaaagctcgataatactgttaagatggcagttctcccccagtagatctataggttcaacacaatccctatcaaaatcccagcagggattttatagaaaattgacaaaataggccgggcgcggtggctcatgccggtaatcccagcactttgggaggctgaggcgggcggatcatgagatcaggagatccagaccatcctggctaacacggtgaaaccccgtctctactaaaaatacaaaaaattagccgggcgtggtggcaggctcctcgggaggctgaggcagaaaaatggcatgaacccggtaggcagaagttgcagtgagcggagatcgtgccactgcactccagcctgggtgacagagcgagactccgtctcaaaaaaaaaaaaaaaaaaaaagaaaagaaaaaaagaaaagaaaattgacaaaataatcctaaaaatgtatatgaaaatgcagaggatgcagaagggccaacacaaatttgg

SEQ ID NO: 13183 - protein, 71 aa, Homo sapiens [sequence omitted]

SEQ ID NO: 13184 - DNA, 2368 bp, Homo sapiens
ccgtgcgctgcagcgtctccttcccgttctccaggtatctgcggagccactccacgcacgtgccatccaggtaggctctcaactgctccgcctcatgggccgcctcccacttgcgcttggtgatctgagccgccatgtccgccgcggtccaagagcgcaggtcctcgttcagggcgatgtaatccttgccgtcgtaggcgtcctgccggtacccgcggaggaagcgcccgtccgaccccacgtcgcagccatacattatctggatggtgtgagaacctggccccgaccccgcgcagaaaccacagctccagtgactacagctccaaggagaaccaggccagcaacgatacccacgatggggatggtgggctgagaagactgctctgggaaaaaaggggaagaaggcaccaccacagctgcccacttctggaaggttccatcccctgcaggcctggtctctagaagctccatgtcccgagtctggtcctctccatcctgctgccaggatctggaaacccaggaggattcctctccctcaggaccagagagaggacgacattctagtgttggtcccattttccttctctctttgtgggaagccagcccaggagatctacaggcgatcagggaggcgtcttgtgttccctggtacccgtgagctgcagcgtctccttcccgttctccaggtgtctgcgagcctctccacgcacgtgccctccagtggtcctgctcctgtgagtcagagtgtgtcatttcctcacctaaaacactccagtggctccacctcggtcttgtgaagcttctagaatgtcaggcacaggcagcagatggagatgtgacagattctctagtgggaaggctttgatcataatacctggcaagccagaatgatgccagcaaccccaaaggagctgccaatggatcttgacaggaaaatcactgactctggattgggctatgctcaaccaggggtagatgtcaatgcttcaagggctatacaagaaccagaaaagaagagattgcaccaatttggactgccgagtcacacttctttacacaagaaaacacactttacagcctcaaatggccaacaatgcagagggacatgtcctcctcaggggaaaatttgatagaaaattgaaatggtcaattgaaacattgtttgtctaaaaactgccaatctaattgttgggcaatataaacatgaaggactggcttttatatcttcatgaatgtgctcgctgtcaacatgagtggggctgcaagaataactccactaggtagcatcctctcttttacctgatggatcaggacgatgctgttatgacgatacatacaattcttctgaagaggagaggatgctggaataaagactacacttcacctcaaatttattttttcatatgttatgccatagtaccaggaatagggatgtaaataaaagtgccagaaacaggaattatccctaagccaaaaaccataactatatttttatacctttatgtaagaattctcaagtattcatttcatctggaaaagttaggattaacagtaagtagagttatatagcctggtggtcttgatagcccccactagttccttacctatataacctaccctctatgatcaagactagactgagggaagacatgctagaatactattgctgcctgcagtctaggccagcccagcagacaaacctaatgtcactcccaaacctggaaacaactgatataaagggacagagggaggaatagtggctgagggcaagtgaataaatcaaagggttatataatgagaaaaattcaatattagcttaactcctcaaaggtggtgtgagcaagagaagatattgtcacttaggtcaattatactggatgcctaaaagagtgaagctgtatgtccctgagaccattcttgtttttggaacctggtaagattgagtgttgtcagcaaagctgagtgatttcattctgggagacatattcatacaagaggatgataaactggcctaattttgaatgaatggatgagactctgataatatgccaatacctctttactgttacaatcctttttcctgtaaaagatatgtggtcaaagaaaagtgggcaatctgagttatcacaaaaacatttagactttgtccctggtttctcctaaaaaccttagactctcttgagtgataagtgtctttagagtactgatgagaagactcttggctgagtggatcctggatatcttaagaacggtggctagctgccagagacacatacctgtgatgcgagtgttatctttttccattttgtgttgctataaagaaatgtctgagactgactaatttatataaacaaggttcatgtggctc

SEQ ID NO: 13185 - protein, 92 aa, Homo sapiens
MGRLPLALGDLSRHVRRGPRAQVLVQGDVILAVVGVLPVPAEEAPVRPHVAAIHYLDGVRTWPRPRAETTAPVTTAPRRTRPATIPTMGMVG

SEQ ID NO: 13186 - DNA, 2624 bp, Homo sapiens
caagtcgcagccatacattatctggagggtgttagaccctggccccgcccccgcggtcagccccgcccaccgagccccgcccccgccccgaccaacccgcggggattttggcctaaacggaaaatgaaacctggtaaaggcgcctgggcctctcccgggtcgaggatctggcgggtcccgcagcctcggggtggatcttggagccggagactcgcgggggggacccgggacgtccgtgggggatgaggaggggtcgtgaccttcgccccaggccggggtcattcaccggcctagctctggtggtagtagcggcgcggcatgggcaggttcactcttgtcagtctgtgcgcgggcctgatgttccgtgtgctccggtcccaatactccggtccctcctgctccaaccacggcgactgcggctacatcctcggagtcgccgcgtcgctgtcgaaccgcacgaactgcgtgtcgtccacgtagcccactgcgatgtaccggggctccccgcgacccggccgggacacggcggtgctgaaataccttatggagtgggtacctgggggcgaggaggggctgagacccgtccgaccctcctccttgcgctgctccccgggtcctgcgccccagtgcgcgggcccctacctcctccccgcagaggccatttccctccggatcccgcactcacccgcccaggtctcggtcagggccagggcccccaagagcagcaggaggagggttcgggacgccatgaccccatcctcggcgtctggggagaatctgagtcccaatgggttcgcggggacttctggaacagggaccccagcgacgccgattggcttcgctagaaacccgacaccaaatgggggtgagaactgagtccacatcctgagtgtccaggaagaaggaccctacataagttgggagagggagaagagaaactgcggagatggggaatccccaaccctgggcctccccaatcaatacatcgccttcggggcctgaaaccctgagagccacgcctggggccataggacttcgccctgaccccgctcctcctgtgccaagcgctctgtctcaatgtctccctgagtcttggcccaagagctgtctgagaaaccagggagaaaccctcgtcatgggccccgtccctcttcatttttcatcccggaatccccgtcccagaactggactccctgcctcccactccttacctatttccctgaactcttctagaaaaaaactcaccccagggagcttggtgacagagagggagctcgccgccagagagggagctcgccgccagagagggagctcgatgccagagagggagctcgccctgggaatggaggcgtagagacaggtttttgttttttttttctttaaatccggaaaagttgtgcctgagtacatgagacagcatagagacaagttttctctttgtttattaactacagtgggtagcagaatcttggcaacccctaaatgatcaggtatctaatcggtaaaaaaatgtaactttggccccttgatacataaatgtgtctgaaagcattacaacaggactcacaaagctactaagtttgactttcgcagacaatgtatctgtgactcccgcttgttttttacatttaccttcattccacagccctgagttactgggtgagtccaagacatctcctcaatataaagtagcacactgcgttactatatgttgcaaccgggagccagtacagactttattcacctcacagttgcaagtgttcaatgcagtcacaatgcccctcagcagtgctcatgtgctgcctgtttttaggaagtattcacgtctaagtggtgtgtatatcttataggaacacttagtatttttaaaacctgattaattaaaaaaaattagtttctaggcagtcccaaatatagtattaaaggccaactgcaaagaaggaacactaagtgttttttaaaccttattaacataaaaaacattagtttttaggcagtcctacattaggtattaaaggccaactgcaaagaacactgagcgaggctctgtagatggatgtaataaaaatctataaaacaatgtgtttaaacctaagaattctactgctttccaattccttccctctgctccttttcctaacctcctgcttctccagcccttccctctgtccctttcatccctcaggccctcctctccccttagtccccaccaccctgtcacttctaaattgtggctctagcattgtcccattacctgctacgtgactgttctctccacagtggtcctgctcctgtgagtcagagtgtgtcatttcctcacctaaaacactccagtggctccacctcggtcttgtgaagcttctagaatgtcaggcacgtgagcatatgagggcatacctggttcatcttaggcactaaatttttgttgactgaatgaatgaaatatgaatgtattaaattgcatcacagaaagttataaaatgtaaaacactgaaaaattaagaaatattttattttatgtaactagtgtgcatatcaattcattccgagtctgttgagcctgtgtatgaattttataagattgcataacaaattatcacaaacattgactttaaacaacaccc

SEQ ID NO: 13187 - protein, 200 aa, Homo sapiens
MRRGRDLRPRPGSFTGLALVVVAARHGQVHSCQSVRGPDVPCAPVPILRSLLLQPRRLRLHPRSRRVAVEPHELRVVHVAHCDVPGLPATRPGHGGAEIPYGVGTWGRGGAETRPTLLLALLPGSCAPVRGPLPPPRRGHFPPDPALTRPGLGQGQGPQEQQEEGSGRHDPILGVWGESESQWVRGDFWNRDPSDADWLR

SEQ ID NO: 13188 - DNA, 320 bp, Homo sapiens
gtctccctgagtcttggcccaagagctgtctgagaaaccagggagaaaccctcgtcatgggccccgtccctcttcatttttcatcccggaatccccgtcccagaactggactccctgcctcccactccttacctatttccctgaactcttctagaaaaaaactcaccccagggagcttggtgacagagagggagctcgccgccagagagggagctcgccgccagagagggagctcgatgcagtgggtagcagaatcttggcaacccctaaatgatcagtggtcctgctcctgtgagtcagagtgtgtcatttcctcacct

SEQ ID NO: 13189 - protein, 87 aa, Homo sapiens
MGPVPLHFSSRNPRPRTGLPASHSLPISLNSSRKKLTPGSLVTERELAAREGARRQRGSSMQWVAESWQPLNDQWSCSCESECVISS

SEQ ID NO: 13190 - DNA, 2516 bp, Homo sapiens
aggatgtggactcagttctcacccccatttggtgtcgggtttctagcgaagccaatcggcgtcgctggggtccctgttccagaagtccccgcgaacccattgggactcagattctccccagacgccgaggatggggtcatggcgtcccgaaccctcctcctgctgctcttgggggccctggccctgaccgagacctgggcgggtgagtgcgggatccggagggaaatggcctctgcggggaggaggtaggggcccgcgcactggggcgcaggacccggggagcagcgcaaggaggagggtcggacgggtctcagcccctcctcgcccccaggtacccactccataaggtatttcagcaccgccgtgtcccggccgggtcgcggggagccccggtacatcgcagtgggctacgtggacgacacgcagttcgtgcggttcgacagcgacgcggcgactccgaggatgtagccgcagtcgccgtggttggagcaggagggaccggagtattgggaccggagcacacggaacatcaggcccgcgcacagactgacaagagtgaacctgcccatgccgcgccgctactaccaccagagctaggccggtgaatgaccccggcctggggcgaaggtcacgacccctcctcatcccccacggacgtcccgggtcccccccgcgagtctccggctccaagatccaccccgaggctgcgggacccgccagatcctcgacccgggagaggcccaggcgcctttaccaggtttcattttccgtttaggccaaaatccccgcgggttggtcggggcgggggcggggctcggtgggcggggctgaccgcgggggcggggccagggtctaacaccctccagataatgtatggctgcgacttggggctggaagggcgcctcctccgcgggtatgaacagcacgccaacgatggcaaggattacatagcccggaactaggacctgcgctcctggaccgcggcggacatggcggctcagatcaccaagcgcaagtgggaggcagaagaatttgcagagcagatcagggcctacctggagggcacgtgcgtggagaggctcgcagacacctggagaacgggaaggagacgctgcagctcacgggtaccagggaacacaagacgcctccctgatcgcctgtagatctcctgggctggcttcccacaaagagagaaggaaaatgggaccaacactagaatgtcgtcctctctctggtcctgagggagaggaatcctcctgggtttccagatcctgtacaagagagtgactctgagggtctgccctgctctctgatacaattaagggatgaaatctctgaggaaatgaagggaagacaatccctggaatactgatgaggggttccctttgacaccagcagcagccttgggccccgttacttttcccctcaggccttgttctctgctttacactcaatgtgtgtgggggtctgagtccagctcttctgagtccctcagcctccactcaggtcaggaccagaagtcactgttccctcctcagggactggaattttccacggaattcggagattatcccagatacctgtgtccaggttggtgtctgggttctgtgctcccttccccaccccaggtgtcctgtccattctcaggatggccacatgcgtgctgctggagtgtctcatgagagatgcaaagtgcctgaattttctgacacttcctgttagacctctcccccagacacatatgatccaccattccgtctctgactataaggccaccctgaggtgctgggccctgggcttctaccctgtggagatcacactggcctggcagcaggatggagaggaccagactcgggacatggagcttctagagaccaggcctgcaggggatggaaccttccagaagtgggcagctgtggtggtgccttctggagaggaacagagatacccgtgccatgtgcagcatgaggggttgcccaagcccctcaccctgagatgggagcagtcttctcagcccaccatccccatcgtgggtatcgttgctggcctggttctccttggagctgtagtcactggagctgtggtttctgctgtgatgtgcaggaagaagaactcagatagagtgagctactctgaagctgcaagcagcgaccatgcgcagggttctgatgtgtctctcacggcttgtaaagtgtgagacagctgccttgtgtgggactgagaggcaagatttgttcacgccttccctttgtgacttcaaaaaccctgactctctttctgcaaaggcacctgaatgtgcctgtgttcctgtaggcataatatgaggaggtggggagaccaacccacccccatgtccaccatgaccctcttccctcatgctgacctgtgttccgtctccaataattaatcattcctgctccatagaggtgaggctgagatgtctccatctctgtctcaactttatgtgcactgagctgtaacttcttacttccctattaaaattagaatctgagtat

SEQ ID NO: 13191 - protein, 182 aa, Homo sapiens
MATCVLLECLMRDAKCLNFLTLPVRPLPQTHMIHHSVSDYKATLRCWALGFYPVEITLAWQQDGEDQTRDMELLETRPAGDGTFQKWAAVVVPSGEEQRYPCHVQHEGLPKPLTLRWEQSSQPTIPIVGIVAGLVLLGAVVTGAVVSAVMCRKKNSDRVSYSEAASSDHAQGSDVSLTACKV

SEQ ID NO: 13192 - DNA, 2630 bp, Homo sapiens
aggatgtggactcagttctcacccccatttggtgtcgggtttctagcgaagccaatcggcgtcgctggggtccctgttccagaagtccccgcgaacccattgggactcagattctccccagacgccgaggatggggtcatggcgtcccgaaccctcctcctgctgctcttgggggccctggccctgaccgagacctgggcgggtgagtgcgggatccggagggaaatggcctctgcggggaggaggtaggggcccgcgcactggggcgcaggacccggggagcagcgcaaggaggagggtcggacgggtctcagcccctcctcgcccccaggtacccactccataaggtatttcagcaccgccgtgtcccggccgggtcgcggggagccccggtacatcgcagtgggctacgtggacgacacgcagttcgtgcggttcgacagcgacgcggcgactccgaggatgtagccgcagtcgccgtggttggagcaggagggaccggagtattgggaccggagcacacggaacatcaggcccgcgcacagactgacaagagtgaacctgcccatgccgcgccgctactaccaccagagctaggccggtgaatgaccccggcctggggcgaaggtcacgacccctcctcatcccccacggacgtcccgggtcccccccgcgagtctccggctccaagatccaccccgaggctgcgggacccgccagatcctcgacccgggagaggcccaggcgcctttaccaggtttcattttccgtttaggccaaaatccccgcgggttggtcggggcgggggcggggctcggtgggcggggctgaccgcgggggcggggccagggtctaacaccctccagataatgtatggctgcgacttggggctggaagggcgcctcctccgcgggtatgaacagcacgccaacgatggcaaggattacatagcccggaactaggacctgcgctcctggaccgcggcggacatggcggctcagatcaccaagcgcaagtgggaggcagaagaatttgcagagcagatcagggcctacctggagggcacgtgcgtggagaggctcgcagacacctggagaacgggaaggagacgctgcagctcacgggtaccagggaacacaagacgcctccctgatcgcctgtagatctcctgggctggcttcccacaaagagagaaggaaaatgggaccaacactagaatgtcgtcctctctctggtcctgagggagaggaatcctcctgggtttccagatcctgtacaagagagtgactctgagggtctgccctgctctctgatacaattaagggatgaaatctctgaggaaatgaagggaagacaatccctggaatactgatgaggggttccctttgacaccagcagcagccttgggccccgttacttttcccctcaggccttgttctctgctttacactcaatgtgtgtgggggtctgagtccagctcttctgagtccctcagcctccactcaggtcaggaccagaagtcactgttccctcctcagggactggaattttccacggaattcggagattatcccagatacctgtgtccaggttggtgtctgggttctgtgctcccttccccaccccaggtgtcctgtccattctcaggatggccacatgcgtgctgctggagtgtctcatgagagatgcaaagtgcctgaattttctgacacttcctgttagacctctcccccagacacatatgatccaccattccgtctctgactataaggccaccctgaggtgctgggccctgggcttctaccctgtggagatcacactggcctggcagcaggatggagaggaccagactcgggacatggagcttctagagaccaggcctgcaggggatggaaccttccagaagtgggcagctgtggtggtgccttctggagaggaacagagatacccgtgccatgtgcagcatgaggggttgcccaagcccctcaccctgagatgggagcagtcttctcagcccaccatccccatcgtgggtatcgttgctggcctggttctccttggagctgtagtcactggagctgtggtttctgctgtgatgtgcaggaagaagaactcagatagagtgagctactctgaagctgcaagcagcgaccatgcgcagggttctgatgtgtctctcacggcttgtaaagtgtgagacagctgccttgtgtgggactgagaggcaagatttgttcacgccttccctttgtgacttcaaaaaccctgactctctttctgcaaaggcacctgaatgtgcctgtgttcctgtaggcataatatgaggaggtggggagaccaacccacccccatgtccaccatgaccctcttccctcatgctgacctgtgttccgtctccaataattaatcattcctgctccatagaggtgaggctgagatgtctccatctctgtctcaactttatgtgcactgagctgtaacttcttacttccctattaaaattagaatctgagtataaatttactttttcaaattcttgccatgagaggttgatgggttaattaaaggagaagattcctaaaatttgagagacaaaataaatggaagacatgagaaccttccagagtcca

SEQ ID NO: 13193 - protein, 182 aa, Homo sapiens; identical to SEQ ID NO: 13191

SEQ ID NO: 13194 - DNA, 2532 bp, Homo sapiens
cgcttcgcacaggagcagaggggtcagggcgaagtcccagggccccaggcgtggctctcagagtctcaggccccgaaggcggtgtatggattggggagtcccagccttggggattccccaactccgcagtttcttttctccctctcccaacctacgtagggtccttcatcctggatactcacgacgcggacccagttctcactcccattgggtgtcgggtttccagagaagccaatcagtgtcgtcgcggtcgctgttctaaagcccgcacgcacccaccgggactcagattctccccagacgccgaggatggccgtcatggcgccccgaaccctcctcctgctactctcgggggccctggccctgacccagacctgggcgggctcccactccatgaggtatttcttcacatccgtgtcccggcccggccgcggggagccccgcttcatcgccgtgggctacgtggacgacacgcagttcgtgcggttcgacagcgacgccgcgagccagaggatggagccgcgggcgccgtggatagagcaggaggggccggagtattgggaccaggagacacggaatgtgaaggcccagtcacagactgaccgagtggacctggggaccctgcgcggctactacaaccagagcgaggccggttctcacaccatccagataatgtatggctgcgacgtggggtcggacgggcgcttcctccgcgggtaccggcaggacgcctacgacggcaaggattacatcgccctgaacgaggacctgcgctcttggaccgcggcggacatggcggctcagatcaccaagcgcaagtgggaggcggcccatgaggcggagcagttgagagcctacctggatggcacacccccccaagacacatatgacccaccaccccatctctgaccatgaggccaccctgaggtgctgggccctgggcttctaccctgcggagatcacactgacctggcagcgggatggggaggaccagacccaggacacggagctcgtggagaccaggcctgcaggggatggaaccttccagaagtgggcggctgtggtggtgccttctggagaggagcagagatacacctgccatgtgcagcatgagggtctgcccaagcccctcaccctgagatggggtaaggagggagatgggggtgtcatgtctcttagggaaagcaggagcctctctggagacctttagcagggtcagggcccctcaccttcccctcttttcccagagctgtcttcccagcccaccatccccatcgtgggcatcattgctggcctggttctccttggagctgtgatcactggagctgtggtcgctgccgtgatgtggaggaggaagagctcaggtggagaaggggtgaagggtggggtctgagatttcttgtctcactgagggttccaagccccagctagaaatgtgccctgtctcattactgggaagcaccgtccacaatcatgggcctacccagtctgggccctgtgtgccagcacttactcttttgtaaagcacctgttaaaatgaaggacagatttatcaccttgattacggcggtgatgggacctgatcccagcagtcacaagtcacaggggaaggtccctgaggacagacctcaggagggctattggtccaggacccacacctgctttcttcatgtttcctgatcccgccctgggtctgcagtcacacatttctggaaacttctctggggtccaagactaggaggttcctctaggaccttaaggccctggctcctttctggtatctcacaggacattttcttctcacagatagaaaaggagggagttacactcaggctgcaagtaagtatgaaggaggctgatgcctgaggtccttgggatattgtgtttgggagcccatgggggagcccacccacctcacaattcctcctctagccacatcttctgtgggatctgaccaggttctgtttttgttctaccccaggcagtgacagtgcccagggctctgatgtgtccctcacagcttgtaaaggtgagagcttggaggacctaatgtgtgttgggtgttgggcggaacagtggacacagctgtgctatggggtttctttgcattggatgtattgagcatgcgatgggctgtttaaggtgtgacccctcactgtgatggatatgaatttgttcatgaatatttttttctatagtgtgagacagctgccttgtgtgggactgagaggcaagagttgttcctgcccttccctttgtgacttgaagaaccctgactttgtttctgcaaaggcacctgcatgtgtctgtgttcgtgtaggcataatgtgaggaggtggggagaccaccccacccccatgtccaccatgaccctcttcccacgctgacctgtgctccctccccaatcatctttcctgttccagagaggtggggctgaggtgtctccatctctgtctcaacttcatggtgcactgagctgtaacttcttccttccctattaaaattagaaccttagtataaatttactttctc

SEQ ID NO: 13195 - protein, 199 aa, Homo sapiens
MAVMAPRTLLLLLSGALALTQTWAGSHSMRYFFTSVSRPGRGEPRFIAVGYVDDTQFVRFDSDAASQRMEPRAPWIEQEGPEYWDQETRNVKAQSQTDRVDLGTLRGYYNQSEAGSHTIQIMYGCDVGSDGRFLRGYRQDAYDGKDYIALNEDLRSWTAADMAAQITKRKWEAAHEAEQLRAYLDGTPPQDTYDPPPHL

SEQ ID NO: 13196 - DNA, 2581 bp, Homo sapiens
cgcttcgcacaggagcagaggggtcagggcgaagtcccagggccccaggcgtggctctcagagtctcaggccccgaaggcggtgtatggattggggagtcccagccttggggattccccaactccgcagtttcttttctccctctcccaacctacgtagggtccttcatcctggatactcacgacgcggacccagttctcactcccattgggtgtcgggtttccagagaagccaatcagtgtcgtcgcggtcgctgttctaaagcccgcacgcacccaccgggactcagattctccccagacgccgaggatggccgtcatggcgccccgaaccctcctcctgctactctcgggggccctggccctgacccagacctgggcgggctcccactccatgaggtatttcttcacatccgtgtcccggcccggccgcggggagccccgcttcatcgccgtgggctacgtggacgacacgcagttcgtgcggttcgacagcgacgccgcgagccagaggatggagccgcgggcgccgtggatagagcaggaggggccggagtattgggaccaggagacacggaatgtgaaggcccagtcacagactgaccgagtggacctggggaccctgcgcggctactacaaccagagcgaggccggttctcacaccatccagataatgtatggctgcgacgtggggtcggacgggcgcttcctccgcgggtaccggcaggacgcctacgacggcaaggattacatcgccctgaacgaggacctgcgctcttggaccgcggcggacatggcggctcagatcaccaagcgcaagtgggaggcggcccatgaggcggagcagttgagagcctacctggatggcacacccccccaagacacatatgacccaccaccccatctctgaccatgaggccaccctgaggtgctgggccctgggcttctaccctgcggagatcacactgacctggcagcgggatggggaggaccagacccaggacacggagctcgtggagaccaggcctgcaggggatggaaccttccagaagtgggcggctgtggtggtgccttctggagaggagcagagatacacctgccatgtgcagcatgagggtctgcccaagcccctcaccctgagatggggtaaggagggagatgggggtgtcatgtctcttagggaaagcaggagcctctctggagacctttagcagggtcagggcccctcaccttcccctcttttcccagagctgtcttcccagcccaccatccccatcgtgggcatcattgctggcctggttctccttggagctgtgatcactggagctgtggtcgctgccgtgatgtggaggaggaagagctcaggtggagaaggggtgaagggtggggtctgagatttcttgtctcactgagggttccaagccccagctagaaatgtgccctgtctcattactgggaagcaccgtccacaatcatgggcctacccagtctgggccctgtgtgccagcacttactcttttgtaaagcacctgttaaaatgaaggacagatttatcaccttgattacggcggtgatgggacctgatcccagcagtcacaagtcacaggggaaggtccctgaggacagacctcaggagggctattggtccaggacccacacctgctttcttcatgtttcctgatcccgccctgggtctgcagtcacacatttctggaaacttctctggggtccaagactaggaggttcctctaggaccttaaggccctggctcctttctggtatctcacaggacattttcttctcacagatagaaaaggagggagttacactcaggctgcaagtaagtatgaaggaggctgatgcctgaggtccttgggatattgtgtttgggagcccatgggggagcccacccacctcacaattcctcctctagccacatcttctgtgggatctgaccaggttctgtttttgttctaccccaggcagtgacagtgcccagggctctgatgtgtccctcacagcttgtaaaggtgagagcttggaggacctaatgtgtgttgggtgttgggcggaacagtggacacagctgtgctatggggtttctttgcattggatgtattgagcatgcgatgggctgtttaaggtgtgacccctcactgtgatggatatgaatttgttcatgaatatttttttctatagtgtgagacagctgccttgtgtgggactgagaggcaagagttgttcctgcccttccctttgtgacttgaagaaccctgactttgtttctgcaaaggcacctgcatgtgtctgtgttcgtgtaggcataatgtgaggaggtggggagaccaccccacccccatgtccaccatgaccctcttcccacgctgacctgtgctccctccccaatcatctttcctgttccagagaggtggggctgaggtgtctccatctctgtctcaacttcatggtgcactgagctgtaacttcttccttccctattaaaattagaaccttagtataaatttactttctcaaattcttgccatgagaggttgatgagttaattaaaggagaagattcct

SEQ ID NO: 13197 - protein, 199 aa, Homo sapiens; identical to SEQ ID NO: 13195

SEQ ID NO: 13198 - DNA, 2632 bp, Homo sapiens
cgcttcgcacaggagcagaggggtcagggcgaagtcccagggccccaggcgtggctctcagagtctcaggccccgaaggcggtgtatggattggggagtcccagccttggggattccccaactccgcagtttcttttctccctctcccaacctacgtagggtccttcatcctggatactcacgacgcggacccagttctcactcccattgggtgtcgggtttccagagaagccaatcagtgtcgtcgcggtcgctgttctaaagcccgcacgcacccaccgggactcagattctccccagacgccgaggatggccgtcatggcgccccgaaccctcctcctgctactctcgggggccctggccctgacccagacctgggcgggctcccactccatgaggtatttcttcacatccgtgtcccggcccggccgcggggagccccgcttcatcgccgtgggctacgtggacgacacgcagttcgtgcggttcgacagcgacgccgcgagccagaggatggagccgcgggcgccgtggatagagcaggaggggccggagtattgggaccaggagacacggaatgtgaaggcccagtcacagactgaccgagtggacctggggaccctgcgcggctactacaaccagagcgaggccggttctcacaccatccagataatgtatggctgcgacgtggggtcggacgggcgcttcctccgcgggtaccggcaggacgcctacgacggcaaggattacatcgccctgaacgaggacctgcgctcttggaccgcggcggacatggcggctcagatcaccaagcgcaagtgggaggcggcccatgaggcggagcagttgagagcctacctggatggcacacccccccaagacacatatgacccaccaccccatctctgaccatgaggccaccctgaggtgctgggccctgggcttctaccctgcggagatcacactgacctggcagcgggatggggaggaccagacccaggacacggagctcgtggagaccaggcctgcaggggatggaaccttccagaagtgggcggctgtggtggtgccttctggagaggagcagagatacacctgccatgtgcagcatgagggtctgcccaagcccctcaccctgagatggggtaaggagggagatgggggtgtcatgtctcttagggaaagcaggagcctctctggagacctttagcagggtcagggcccctcaccttcccctcttttcccagagctgtcttcccagcccaccatccccatcgtgggcatcattgctggcctggttctccttggagctgtgatcactggagctgtggtcgctgccgtgatgtggaggaggaagagctcaggtggagaaggggtgaagggtggggtctgagatttcttgtctcactgagggttccaagccccagctagaaatgtgccctgtctcattactgggaagcaccgtccacaatcatgggcctacccagtctgggccctgtgtgccagcacttactcttttgtaaagcacctgttaaaatgaaggacagatttatcaccttgattacggcggtgatgggacctgatcccagcagtcacaagtcacaggggaaggtccctgaggacagacctcaggagggctattggtccaggacccacacctgctttcttcatgtttcctgatcccgccctgggtctgcagtcacacatttctggaaacttctctggggtccaagactaggaggttcctctaggaccttaaggccctggctcctttctggtatctcacaggacattttcttctcacagatagaaaaggagggagttacactcaggctgcaagtaagtatgaaggaggctgatgcctgaggtccttgggatattgtgtttgggagcccatgggggagcccacccacctcacaattcctcctctagccacatcttctgtgggatctgaccaggttctgtttttgttctaccccaggcagtgacagtgcccagggctctgatgtgtccctcacagcttgtaaaggtgagagcttggaggacctaatgtgtgttgggtgttgggcggaacagtggacacagctgtgctatggggtttctttgcattggatgtattgagcatgcgatgggctgtttaaggtgtgacccctcactgtgatggatatgaatttgttcatgaatatttttttctatagtgtgagacagctgccttgtgtgggactgagaggcaagagttgttcctgcccttccctttgtgacttgaagaaccctgactttgtttctgcaaaggcacctgcatgtgtctgtgttcgtgtaggcataatgtgaggaggtggggagaccaccccacccccatgtccaccatgaccctcttcccacgctgacctgtgctccctccccaatcatctttcctgttccagagaggtggggctgaggtgtctccatctctgtctcaacttcatggtgcactgagctgtaacttcttccttccctattaaaattagaaccttagtataaatttactttctcaaattcttgccatgagaggttgatgagttaattaaaggagaagattcctaaaatttgagagacaaaataaatggaagacatgagaaccttccagagtcca

SEQ ID NO: 13199 - protein, 199 aa, Homo sapiens; identical to SEQ ID NO: 13195

SEQ ID NO: 13200 - DNA, 2271 bp, Homo sapiens
tggatactcacgacgcggacccagttctcactcccattgggtgtcgggtttccagagaagccaatcagtgtcgtcgcggtcgctgttctaaagcccgcacgcacccaccgggactcagattctccccagacgccgaggatggccgtcatggcgccccgaaccctcctcctgctactctcgggggccctggccctgacccagacctgggcgggctcccactccatgaggtatttcttcacatccgtgtcccggcccggccgcggggagccccgcttcatcgccgtgggctacgtggacgacacgcagttcgtgcggttcgacagcgacgccgcgagccagaggatggagccgcgggcgccgtggatagagcaggaggggccggagtattgggaccaggagacacggaatgtgaaggcccagtcacagactgaccgagtggacctggggaccctgcgcggctactacaaccagagcgaggccggttctcacaccatccagataatgtatggctgcgacgtggggtcggacgggcgcttcctccgcgggtaccggcaggacgcctacgacggcaaggattacatcgccctgaacgaggacctgcgctcttggaccgcggcggacatggcggctcagatcaccaagcgcaagtgggaggcggcccatgaggcggagcagttgagagcctacctggatggcacgtgcgtggagtggctccgcagatacctggagaacgggaaggagacgctgcagcgcacgggccaccctgaggtgctgggccctgggcttctaccctgcggagatcacactgacctggcagcgggatggggaggaccagacccaggacacggagctcgtggagaccaggcctgcaggggatggaaccttccagaagtgggcggctgtggtggtgccttctggagaggagcagagatacacctgccatgtgcagcatgagggtctgcccaagcccctcaccctgagatgggagctgtcttcccagcccaccatccccatcgtgggcatcattgctggcctggttctccttggagctgtgatcactggagctgtggtcgctgccgtgatgtggaggaggaagagctcaggtggagaaggggtgaagggtggggtctgagatttcttgtctcactgagggttccaagccccagctagaaatgtgccctgtctcattactgggaagcaccgtccacaatcatgggcctacccagtctgggccctgtgtgccagcacttactcttttgtaaagcacctgttaaaatgaaggacagatttatcaccttgattacggcggtgatgggacctgatcccagcagtcacaagtcacaggggaaggtccctgaggacagacctcaggagggctattggtccaggacccacacctgctttcttcatgtttcctgatcccgccctgggtctgcagtcacacatttctggaaacttctctggggtccaagactaggaggttcctctaggaccttaaggccctggctcctttctggtatctcacaggacattttcttctcacagatagaaaaggagggagttacactcaggctgcaagtaagtatgaaggaggctgatgcctgaggtccttgggatattgtgtttgggagcccatgggggagcccacccacctcacaattcctcctctagccacatcttctgtgggatctgaccaggttctgtttttgttctaccccaggcagtgacagtgcccagggctctgatgtgtccctcacagcttgtaaaggtgagagcttggaggacctaatgtgtgttgggtgttgggcggaacagtggacacagctgtgctatggggtttctttgcattggatgtattgagcatgcgatgggctgtttaaggtgtgacccctcactgtgatggatatgaatttgttcatgaatatttttttctatagtgtgagacagctgccttgtgtgggactgagaggcaagagttgttcctgcccttccctttgtgacttgaagaaccctgactttgtttctgcaaaggcacctgcatgtgtctgtgttcgtgtaggcataatgtgaggaggtggggagaccaccccacccccatgtccaccatgaccctcttcccacgctgacctgtgctccctccccaatcatctttcctgttccagagaggtggggctgaggtgtctccatctctgtctcaacttcatggtgcactgagctgtaacttcttccttccctattaaaattagaaccttagtataaatttactttctc

SEQ ID NO: 13201 - protein, 271 aa, Homo sapiens
MAVMAPRTLLLLLSGALALTQTWAGSHSMRYFFTSVSRPGRGEPRFIAVGYVDDTQFVRFDSDAASQRMEPRAPWIEQEGPEYWDQETRNVKAQSQTDRVDLGTLRGYYNQSEAGSHTIQIMYGCDVGSDGRFLRGYRQDAYDGKDYIALNEDLRSWTAADMAAQITKRKWEAAHEAEQLRAYLDGTCVEWLRRYLENGKETLQRTGHPEVLGPGLLPCGDHTDLAAGWGGPDPGHGARGDQACRGWNLPEVGGCGGAFWRGAEIHLPCAA
